United States Patent Application Publication US 2006/0123505 A1 - sequence listing, part 12

SEQ ID NO: 19671 - DNA, 2399 bp, Oryza sativa
  ref <308>: DATABASE ACCESSION NUMBER: AK070019
  ref <309>: DATABASE ENTRY DATE: 2001-12-06
ggatctcgcctcgcctcgcctcgccgcgccgccgcgccgccccagatccgccccgcctccggccatccccgccgccagatccggtgggggaagccccctctctccgctctcgcccaagggggggttggtttatccggtaggaggaggagtagtgaggtggtggtagtggtttaagcggccatggcggcggcggaggagaacagctcgctgttcctcatattcatcctcaccatgatcgcgctccccctcgtgccctacaccatcatgcgcctctgccgcgccgccaacgtcaaggccaagaccatccactgccgctgctccggctgccaccgctccggcaagtaccgcaagtcgatctacaagaggatatccaacttctcgacatgcagtaacctcaccatcctgcttctctggatagttatgatcttccttgtatactacatcaagcatgttagccgcgaggtacaagtgtttgagccgtatagcattcttggactggaaccaggtgcatcagagtctgatatcaagaaatcataccgtagactttctatccaataccatcctgataaaaatcctgatcctgaggcccacaagtactttgttgaatttatatccaaggcatatcaggctttaactgatcctgtatctcgtgaaaactatgagaagtatggtcacccagatggacgccaggggatgcaaatgggcattgctttgcccaagttcttgttgaatatggatggtgcatctggtggaataatgcttcttggaatagtagggctatgcatactcttgcccttgatgatagcagttatttatttgtcaaggtcatcaaagtacaccggaaattatgtcatgcatcaaactctgtccacttattactacttcatgaagccttcactggctccaagcaaagtcatggatgtcttcattaaggctgcagagtatatggagatgccagtccggcgcagtgacgatgaacccttgcagaaattatttgtagctgttaggagtgaattaaatctagacttgaagaatattagaacagaacaagctaaattctggaagcagcatccatctctagtgaagatggagcttttgattcaggctcacctcactggagagtcatttgctttgacaccagcgttactgaaggattacaggcacatgcttgaacttgcacctcgtcttctggatgaacttgtcaagattgcactactaccaaggagtccccatggttttggatggctcaggcctgcaatcggtgtaattgagctttcccaaaatatcatccaggctgtccctctcagtgcacgaaaagctagcggaggcaactctgaaggaatagcacctttcttgcagctaccgcattttactgaaacggttgtcaaaaaaattgctcgcaagaaaatccgttcattccaagaattctgtgacatgcctgtggaggaacgcgccacgttgctgacacaggttgctgggctttctgatgaaggtgctcaagatgtagagcttgtgctggagatgattccttctattgaagtggatattaaatgtgagactgaaggcgaagaggggattcaagagggtgatgttgtgaccatgtatgcttgggtctcacttcaccgtcgcaatggcctaactgctgctcttccccatgctccttccttcccgttccacaaggaagagaacttctggttgcttctagcagatgctgcatcgaatgaagtttggttatcccagaaggtcagcttcatggatgagactaccgctataactgcagcatcaaaagctatacaagagacccaagaagcactaggtgcaagtgcaaaggaaatagggattgcgattagagaggcagtcgacagggtgaagaaaggcagtaggttggtaatgggcgagttccaagccccggccgagggcactcacaacctgacttccttctgtttgtgcgacgcatggataggatgtgacaccaagaccagcttgaagttgaaggtcctgaagcgcagccgggcaggaacaagaggtcatgtggctgaagaaggcccagtggcagaggatggtattgaggaagaagaagaggaggaagaagaggagtacgacgactacgagagcgagtacagcgatgacgaggaggatgagaagagcaaaggaaagggtaaggtcgcgaacggagtagcccaccaaaaggcaaactccgatatagattctggcagtgatgattgatatagtaccttgagttgtccaaccatagacacttaacatcgttgtttttgccctttgtgcaccctgttgaaacttgaacatatcagttgtcaacttatagagcaatcggcgatagctaccaaagttaccatttttgtttaatattgttgtgttggatgaatgaaaaataattg

SEQ ID NO: 19672 - DNA, 1590 bp, Oryza sativa
  ref <308>: DATABASE ACCESSION NUMBER: AK070020
  ref <309>: DATABASE ENTRY DATE: 2001-12-06
gctcgtcaaatccgcgcctcgtagagggaggcaagaatcgaggggtccggtgttttttctgcgggatcgtgggggaatttttcctcggatttttccgtgctcgtttccgccgcgggcggcgtcgcagagtgtttgagaaataatacgagtcaatgaaattccgcaaagggacaaaggtggaggtgttgcagaaggggggtgcgccattgggttcctggaggcctgctgagattgtttctggcaatggacacacctatcttgtaagctatggctcatgtccaactcagggtagtgtggctgcggaaagggtgccaaggaaggcaatgagacctttgcgcccacccttggatggtattgtatgctgggtcaaaggtgagattgcagaagtctttgacagctacacatggaaggttgcggaagtggtgagattgcttggttttagttactatctcgtcaggctccttggatcctccctggagttgaaagtacatgcatccaatcttaggataaggcagctgtgggaagatggcaaatgggttgctattccaaaggattctgcaagattccctggtgattcacctagaagccagttgagatgtggaaaagttggccatgagttggtgcatacttcaagggacaaccgtcttctactgaagaaaaagaaagtatatgagggcaatacttctcagggcttgaagagaaaatcatctgcactatcagctttccccatgcagtacagtgaagtaagtaagagatttcagacatcacatagagatggaaggtgcctgcctgttgttcctggaggttctcttcatttgatggataaggtagatgctgttgattcccaatgcttagagctgggcgaaaaatacatgcatgattccttaagtaaaagagcaaatggctttcataaaacaaatttggcagcagtaaaagctaattttgattatctggatcctgctgtaacaactcaagatagtgatactgatagtgtcgtttcctctgttggtagttgcaatccctgcggtagcccctatggatcaacacatcctcaagagtatgattgtgcagatatttgtagtaggactgatgatgctgaagtttctgtatctggaagagaatcgtttagtaggactgatgatgctgaagcttctgtatcaggaagagaatcacctgctcctgttaatgatggtctgaaagagaaaacccatttgcttgagttacatgcttatcgtgcaacactgatggcattatatgcgtctgggtcaattagctgggagcaagaggctatgatgactaatctgaggcttacattgaacatctcaactgatgaacatttatctgagttaaggagtttggtttcctctgaagttcattctagatagtcatatgaaacagtaggtgtctgtcttggtggttatgtaggcatatcacttattttacaattgcagagtcatggccagtgttgaaaccacatccagttggagtacttgatgttctgtattaaccatggaaacaggttgtatgatagatttaccataacttctcaaatgctacctttgccccaattaactcaaggctttcttcttt

SEQ ID NO: 19673 - DNA, 1188 bp, Oryza sativa
  ref <308>: DATABASE ACCESSION NUMBER: AK070021
  ref <309>: DATABASE ENTRY DATE: 2001-12-06
gattgccatctatcacctcacctgagctgaaatcaagaactggatctaggagaaggtcatggttccaaggatactcatcgttctcctggttgtgctgcttggattggcattccaggcaattctccggccaccacctcaaaaattgtgtggctcacccggtggacctcctgtgacatctccaagaatcaagctcagagatggaagatatcttgcttacagagaagatggagttcagaaagacaaggccaagttcaagatcatcagtgtccatgcgtttgattccaccaaggacttccccttgcaggtttctaaggaactggtgcatgaactgggaatctacattgttggtttcgacagagcagggtatggggaaagtgatccgaatcctaagagggatgtgaagagtgaggctttggatattgaggagcttgctgaccagctcgagcttggacacaagttctatgtgttgggagtgtccatgggaggatactcaatttggggatgccttcagtacataccaaacaggcttgcaggagctgcccatggttgtgccaattatcaactactggtggccttcattcccagctgagctatccaggcaagccttcaagaggctcatcgtgccagagcagaggacactctggattgcacacaacatgccatctttgctctaccagtggatgacccaaaagtggctcccttcttctgcggcagccatgcgccaccctgaaatattcagcaagcatgatttggaggttcttcagaagatgatggcaatgcctctcattgagaataaatctaggcagcaaggcatttatgaatcaacacatcgtgatttgcttgttgcttttggaaagtgggagtttgatccaatgaatattaccaatccatttcctcaaaatgagggttctgtacacatctggcaaggttatgaagacaggttggtgctggttgagctgcaacggtacattgcccagaggcttccttggatccagtatcatgaattccctgaaggaggacacatgttcatgctggtagatggatggactgacaaaatcatcagagcgctcttggttggagaacagctctgaagtctcatcaaatcattctgtgcttgttagcttatcatcgatagccaaaagttaaaatttcaaacttattaattctagagttgattttacattttct

SEQ ID NO: 19674 - DNA, 3236 bp, Oryza sativa
  ref <308>: DATABASE ACCESSION NUMBER: AK070022
  ref <309>: DATABASE ENTRY DATE: 2001-12-06
ggtcgcggccatggcgtccaccattcatcatcaacccgggggggttgccaatcaaatttattactcctacaaggacaccgtcacagtccacacatgagtgagtagtagtggcagcaatcgcaatagcaatagcatcacgttcacaggaaggagattgctagtagtagtagtagcggaggagacgcaacgagacaagcaaagaaagagatagagatagaagactctgtgtagtgtagtgtgagagagagtgagagagagagagaaagaaaaagctctccctagtccctagtgcgtggaggagtagaggtagagcaaaccactgaaccacatcgccttctttctactggtttctaccgtgttcttgctgctgctgctgttcttcgtgagcctcctcgacgacctcgatctgcttgtttcttcccggctccatggcggcagcggccgggccgtagtggtgagttcttgctcggcttcttgcctattactaacgacgactactttttcttgtgcggttggttcaattgatcctgagctctaatcagtttgagttggttattggtggataatagtttgttctagctgaaattttttacgattaacggggagttctgtgggtttcttggaggtttagttgcatgttcgtggtgaatcaacagtaactgctgctaggcatggggcttgatatgcttcttgcttttggatctattctgcaaaagtagcttttttttgtgactgtaatatgtgatcgagttcagtgaattgggtaagttattacctcaagactattttttttctacttgaattttttggttttctacgcttcatgatagcgtgatttcattttaaaaggttggagggatgaggaaaaaacctttttttgtgggaaaatgaaagagttcaatactagtaatttcataaatagttgctaggtctttacactgttaaaaggtttgtgggttaaattcgttcttttgagtgattctaaccctataagcttgttcttgctctatgaaactcggtagctgacctcaagcaagttttttttaattgaaatggaataattagtcatatctaagttttgctttgacaaaaaatataaataaaagctcgtcctaggattatgtgtaccgtatacccgcaaagctctaagttttgcccatcttagtagctggagtaattgagattggataagtttccctggattattttgagcccacttgtttgtttgaaccacgagtccacgatgtacatattatgtaatgactctctgtagtgcaccggcaaccttatgcctctgggtttctctgcagaagacttgaggcattgtatttcaataaagtcccccaatcttaatgaaattaggtcacccaatcttttgtccgacccggcaatgtatttcaacgaagtacagctcgattgcttccatttttccttcaataaactccacctttttcacatattagaataaacttcacaagaacgcatacttatagtcagttacaaaaacatatgtactgtatatttaatatctatatgacttaggaagttccatataaacaggattttgtggatttcattatcaaaacgggaaatagactatggattccaacgagggctctcatcgtataacacgaagtgggattgttagggcaaaacctgctgtcacggccgatggtaagattgagcctgctggggaggggttacctcatggatggttgaaagaatacaggcctcggaagaaccaatctgggtctagagtcaagggtgatacgttctatattgatccaaccaatatgtatgaatttcgttctcaaaaggatgttcaacggtatcttgaatctggagatgttactaattgtgtaatgatacaaaataagaggaaaatggaagacctgcacactgcaagaaaccaatctcatcatacacgaagaccatctgatcacagacaacttgatgctggtgaaggggctactcaatgtgatctaccaatagcaagaggtaatagtgcacggagtgattttttggtaaatgcaaacagttcagacaattctgaagatatgtcatcatcagtgcccaagggtgtgtccgaagggaaacttacacggttaaagcttcagaaggcaagggttccgaatcaatccgtggagcatgaatcttccacaggagaagtagcaaatatggagcataagcccaaggaaaagaaacagaaaactaaacctgtcaaacagatctctacacctcttcgagcgtcacctcgtttagctgcgctgaagattaaccaagaaggcaataatgagcccaaagatgaagctctcagcacaaacacagacactgctaatcagtcacaaccaaagttgaccaaaagtcctaaagcaaaggctaattcctctgtacttcctgagaagagtgatggagcacatacttcaaatgcttctgaaattcctcaaaacaagtatccatcagctaccgagcaaatgcaaggatcatctgttcatcctcaacaggctggaacagctgatgctatgcctgggtccgccctttcatcgttattgcgaagtatctggtcagatccatgcctcaagtttgcgatcaagactcttgcaggtgacatccctgctctagacttcattccatcacaggacatgaacaaagggacgacaccgaattgttcctcttctgcttatgatggtagtagaaaccatgcgcaagtcgaccatgtcggcatgccaatgccaaggccatcagataagttctacggcagtggctggtttcctccccagtgagttccatctggggaatatgtggcaaatcttctcacctgcaaaagcaaatcagaagaaagccaaagactaaccagcctcacaggcttcttagaactcctcattaggtaccttgacaaggatgcatgttgcaagaaagactgtatcttgttggaactgtagtagatggttcgtcactaataagtaataataacctaataatatacccccatcttatgctaaactggacactattttctgtctgtctgaatttgtgtagtaacctgactactaattcatttgtttgtatcattagtgcagactagagatgctgattgtatgcagatgcctgtgccagattgtcatgctcagggtcactgctctgccagcacaaagacccttcatgtgtattactactacatgtaataatagcttagacatttgatatggcaatgtgcattggactaagttctacct

SEQ ID NO: 19675 - DNA, 1589 bp, Oryza sativa
  ref <308>: DATABASE ACCESSION NUMBER: AK070023
  ref <309>: DATABASE ENTRY DATE: 2001-12-06
gatggagaggagggaggacgcgctcctcctcctcctcgctatccccatctcctcctctccccaacctctcccctccccgtggcctgactgaccccctcctgaattcctgatcccctcacaccaccacgcggccctcggtcttccctcctcctcgccctcgcctcccccgtctggatctagcctagccccccctcccctctcgccctcgtcctcctcacgagatggactacggcgacggggaggtgcggctggtgaggaggaaggggaagaagaggctcgctccgcctccgcctccgcctccggcggcggagaggggcgagagggacaggttggacgagctccggcgggactaccgcgatgtgctcaaggtgaagggtttgccccctctggtttcccttgccctttgcggcgcggtttcgccgatgaatctccttgttcacctccttgtctgaactactaattcgctgcggttgcaattttgtattgcatatgatatctcctagtactctgctccgcttgattgcaggagtccaggggttgattgcatagctgatgtcagtgcgaaactagggttgattgcatagctgatgttagtgtgaaactaggattgattgcatagctgatgttagtgcgaaactagggctgtcaagaattggttatggttgtagcatgggatgatgacatggtcacattgatactgcatatatacacttgcactacattggacttgaatctgatagcggttcttgatgcaggataatgagatgaagaggaggaagctagagagcataaacaagcgaaagctcgtcctgctttctgaagtcaagttcttacaaaagaagttaaattctttcaagaagaatgattcgcagcaagtacggctgaagaagaaagctccgcgagtcccatctcatgtgggaatcaatgatgcttcagctttttatggggcgagtactgaagtgccatctaccagtaaaagaacagatttagatttaaatcaagattctgcaatgaatgatgagctttctgatttcccggggcaccataaccatttggaacttaaaaaggctgaacaggctggagtagatgaagttattatgactgccgatgtcaacctatcagcttgtagggataccggaaactctccggcaagcgatgataagaggagtgtttcatggcaagaccgtgtagcgttgaaggtctagtccttccatagatgtggctatgaaataacatccttctcagatgattaactgcactctgcttatttttttctgaaatattttgcagtgctttgtatatcacaagagtcttagttagacatgccttaatgcaagctcgatctgatgatgtgatgttatgaaatatccacccagattttgaactgacgcacattgactgcatttgtctggattgtgttctgctgcatcctttggaaacatggtgacaaatcaatgttttttgtttgttgttaccatttacttctgaaatggcaactgcagcagactggcatcctggcattttgacatgtatatcatattgtaacatgtgaaatgaattatgaatatcaagcaagttgtattgtaagc

SEQ ID NO: 19676 - DNA, 1796 bp, Oryza sativa
  ref <308>: DATABASE ACCESSION NUMBER: AK099122
  ref <309>: DATABASE ENTRY DATE: 2002-08-28
ggcacgcgcacgcacacgcacacctacgcatcgccgcctcctcctcttcctcccactccgcggaagcgcgtaaccaccacctcgttcgttcttatctccaaagccgaagacccaccgagccgatcccgacgcttcccccatggctcctccgctcctcccccgcggcgcggccctcctcctcctcctccgctccgccgcccgacggccggcggcggcgtcctcccgcggcttcctgtcgagcgctgcggcgggaggccgcgagggggcgctggccgccgccgcggtggcggtggtggggtccggcctgggtctgtggctggtgcccccctcgctcgcggactccggcgaggcggtggccgacgccccggcggtacagatctcggtaggctccggctccggcgcggtaggcgccgtggaggagcgaggccggaagaggaggttcctcctcggagactcgttccgcagaagggtgttcttcaattacgagaaacggatacggctgctcagccctcctgaaaagatctttgaatatttcgcgtctgtgcggaacccggaaggggaagtattcatgttgcctgctgacttgatgagagcagtagttcctgttttccctccatcggagtcgaacatagttcgggagggaagattaaggggggaacgcaatcctggagagttgcactgtgctccatcggagttcttcatgctgtttgacacaaacggtgataggctcatctcctttgccgagtacatcttttttgtgacattgctcagcatccctgagtcaagtttcagtgcggccttcaaaatgtttgacgttgaccacagcggggagatagacaaagaagagttcaagaaagtaatggcactgatgcgatcctataacagacaaggagccaaccatagagatggcttacgtactggactagaagttggtcagcctgtggaaaatggtggagtggttgaatacttctttggtaatgatgggaacgaacctctacactatgacaagtttacaaattttttgaaaggattgcatgacgagatcattcgtctggaattcagtcactatgacgtcaagtcatctaatactatcccagcaaaggatttcgcattatccatggttgcttctgctgacatgaatcacatcaacaagctacttgatagagttgataatttaggcaatgatcctgatctcaaaggagtgcgcatcaccttcgaggagtttaaatcctttgctgatttgcgacgaagattggagccactggcgatggctatctttacttatgggaaagtaaatgggctgttgacaaagcaggatctcaagcgtgcagcgcaccatgtttgtggtgttgacttaactgacagagtagttgacatcattttccatgtgtttgatacaaatcatgatgggaacttgagctcggaggaatttgtgagagcattacaaagacgagaaactgatgttcgtcagccagcgacaccaggctctatggggctgttgtcttactggctaaacttcaacaagtgttcttcgcttacacagatgctgctcaagtagattgttttgatccttgctagattcttcttggttggatttccgtcacggagatgccgaagcgattttgctgtaaatatcgtgtgggttgtcaaagggtgccctgtcacatagcagctgtaaatattttatagcgcctttcttgcaggggtagattaatcattcttgtaaattaaggcctatgcaaaatgtaactgatactctgataagacttttgaaaggttaaaaccaactttatcgc

SEQ ID NO: 19677 - DNA, 1440 bp, Oryza sativa
  ref <308>: DATABASE ACCESSION NUMBER: AK070024
  ref <309>: DATABASE ENTRY DATE: 2001-12-06
ggtgcgtgcgtgcgtgcttgcttgctgcaagaaatgagctgcttgggttggttcaagaagcggaggtcgtccaagagcaaggaatcgtcggggaggcggggctcgacgacgacgacggtgtcggcggtgagcacgagcaggtcggacgactccggggcggtgaggccggcgagcaagtcgacggggtcgacgtcgtcgcaccggagcatctcgtcgctgtacgaggagcgcggccacggccagctccgggacttcgactacgacgagctccaggccgccaccaacggcttcagccgcgcccagaagctcggcgagggcggcttcggcagcgtctacaagggcttcgtccgctcctcccccgccgacggcaaggccgccgatcgcctcgccgtcgccgtcaagtgcctgaaccagcggggtctccagggacataagcagtggttggcggaagtacagttccttggggttcttgagcacccaaaccttgtaaagcttcttggatattgtgccgttgatggtgaaagggggccacaaagattattggtgtatgagtatatgcctaataagagcctggaagatcacttattcgtccgagcttatcctcctctctcatggaatagaaggcttcaaataatcttgggtgctgcagaaggattagcttacctgcatgaagggcaagttcaggtaatctaccgggacttcaaagcatctaacattttgttggacaaagacttcagagcaaagctgtcggacttcgggctagcaagggagggaccaacaggagcaaacactcacgtctcaacagcggtggttgggacgcacgggtacgcggcgccggactacatagagacggggcacctgacggtgaagagcgacgtgtggagcttcggggtggtgctgtacgagatcctgacggggcggcggacgctggaccgccaccggccgcagggggagcagaagctgctggagtgggtcgcccagttcgcccccgacagccgcaacttccgcatgatcatggatcccaggctccgcggcgagtactccgtcaaggccgcccgcgacatcgccaagctcgccgagtcctgcctcctcaagaacgccaaggagcgccccaccatgtccgaggtcgtcgacgtcctccgccgcgccgtccagtcgcagcccgaccctcctcctccccccgccgccgccgccgccgcctccggcaaggggaagagggtcgacgtcgcgccgcagccggcgaggaggaggtgaggttgcactctgctgctatcatcgatcacggcatgaatgaagaaagaaaagtacagaaagagagacacagagacgagttggtggattcttggcgtttttgttttttgttttcctttctattttttaggcttatttaggatgaggatagtagtatgagaatacatttgatttgattggtagataact

SEQ ID NO: 19678 - DNA, 1880 bp, Oryza sativa
  ref <308>: DATABASE ACCESSION NUMBER: AK070025
  ref <309>: DATABASE ENTRY DATE: 2001-12-06
gagcgcgcagcgtctctctctctcgctctcgctatctatctctgtccttgtcactgtccgtccttgactcgctagcccaagaagaagaccaaccggagaggggaggggaggggaggcggagagatggctccgagctcgtcgtcctgccacgacgcggccgcgtcgatgctgctctgcgccgaggacaacagcagcatcctgtggctggaggatgaggagggggaggtgggggagaggaggagcggcggttgccggtcgatggtcggggacctcgccgccggcggcggcggcggcagcggcgggggtggagtggaggaggaggaggacatgttcccgcggcagtcggaggagtgcgtggcgagcttggtggagagggagcaggcgcacatgccgagggcggactacggcgagcggctccgcggcggcggcggcgacgtggatctccgcgtccgcagcgaggccatcggctggatttgggaggtttacacttactacaacttcagctctgtcactgcctatctggctgtaaactacctggaccgtttcctgtctcagtacgagctgccggaaggcagggattggatgacacagttgctctcggttgcgtgcttgtctatcgccgccaagatggaggagaccgtcgtcccgcaatgtttggatcttcagattggggaaccacggtttttgttcgaggtggagacgatccatagaatggagcttcttgttctcaccaacctcaattggaggatgcaagccgtgactccattctcctacatcgactacttcctacgagagctcaacagcggcaatgccgcgccgagaagctggctcctgaggtcgtcggagctcatcttgcgcatagcagcaggaactggattcctagagtttagaccctcggagatcgctgcagcggtggctgccacagtggccggagaagccaccggcgtggtagaagaagacatcgcagaggctttcacccatgtagataaggggagggtgttgcaatgccaggaagcgattcaggatcatcactactccatggccaccattaacactgtgcaacctaaacctgcaagcaccaggagaggctcagcctcagcctcctcctcctctgtgcctgagagccctgttgcggtgctggatgctggctgcctcagctacaaaagtgatgatactgatgcagcaactattgcctcacatggaggaggaagaaggaagagttgctttgatagctccccggtcactagcaagaagaggaggaagcttagcaggtgactgaccagtcaaagtgccaaatgatagatcactctctctgtagtctgtacaccactcatctcgacaaaggcaaagtcaattggtttcgattgcaacgactgttagaaagaaagaacactggaagggggccaaaagggagggaattttgacatgacgagagagagctagctagcaagaagttgctgatgaataaagaggtgaggttgacaacacctaattgctaagcttttgcaagccagcaagccatggtgatgagaggtgcccccaaagaacaaagaaaagctttgtagcaacataaaagcttgatgagtttcaaaaaaaaaagaagaaaaaaaacataaaagctacatgagatgatcaagacaaaggatggtgaggggctttaggcaacaagtccaagaactaggcatgcactgacctggctgtgtagtattcttttgttcactagctctagttgcattagttgcagtattgttttcttttttccatttcatttgtaaggagaaaattagaggcggcagcactcctttttgtgatcagcaatgatgatcatccacatgaataaaataacatggtgtaaccagaaaagaaaattaacaagaccc

SEQ ID NO: 19679 - DNA, 3106 bp, Oryza sativa
  ref <308>: DATABASE ACCESSION NUMBER: AK070026
  ref <309>: DATABASE ENTRY DATE: 2001-12-06
gcctctctctcttcctcttctccccgcgcaagccaaagccacagccagcgaaggcggcaagccaccaccaccacctcctcctcacgccaccgcggcctcctcctccggccaccgcgcgctcacctcgggcagcggccgcagtggcgcgcgctctccggtgtgggatctccgagttttttttttcgttttccctctgaattccgcggcggggaggccggatctgcggggaggggcatggggtgaccagatcgggacgcgcacctcgctctcctcctcctcctcctcctgaattcctctcgtcgggatggctggctccgtcgttgctgctgctgccgccgccggcggtggcacagggagctcttgcgatgcgttgtacagggagctatggcatgcttgcgctgggccgttggtcacagtgcctcgccaaggcgaattggtttactacttcccccagggccatatggaacagcttgaggcatctacagaccaacagcttgaccagcatctgcctttgtttaacctgccatctaagatcctctgcaaagtggtcaatgtagaacttagggctgaaaccgattcagatgaggtttatgctcaaattatgctgcaaccagaagcagatcaaaatgaactcaccagcccaaaacctgagccacatgaacctgaaaaatgcaatgtccattccttctgcaagactttgactgcttcagatacaagcacccatggtggattttcagttcttaggaggcatgcagaagaatgtcttcctcccctggacatgactcagaatccaccatggcaagagcttgtggctagagatctccatggaaacgagtggcatttccgtcacatctttcgaggacaacctaggaggcatctgcttacaactggctggagtgtttttgttagctcaaaaagattagttgccggtgacgcattcatctttctgagaggtgagaatggagagctacgagttggtgtcaggaggctcatgaggcaactaaataacatgccatcatcagtaatatcaagtcatagtatgcatcttggattcctagcaactgcatcacatgctatatccaccggaactctcttttctgttttctacaaaccaagaacaagtcagtctgagtttgttgtgagtgctaacaagtaccttgaagctaaaaacagcaagatatctgttggaatgaggtttaagatgagattcgagggcgatgaagctcctgaaagaaggtttagtggaacaattattggtgttgggagcatgtcaacgtctccatgggcaaattctgactggagatctttgaaggtccaatgggatgagccttctgtggttcctcgtccagatagagtttcaccatgggaactagagccacttgctgtgagtaattcacagccatcacctcagccaccggcaagaaataagcgggctcggcctcctgcttcgaattcaattgctccagaactacctccggtcttcggtttgtggaaatcttcagctgagtccacacaaggcttctcattttcgggactacagcgaacacaggaactatatccttcaagccccaatccgatcttctcaacatcattaaatgttggattcagtacaaagaatgagccatctgctctaagcaacaagcatttttactggccaatgagagagacaagagccaactcttactctgctagcatcagcaaagttccatctgaaaagaagcaagagcctagttcggctggctgcagattgtttggaatcgagataagctctgctgtggaagctacatctccactggctgctgtttctggtgttggtcaagaccaaccagctgcctcagtagatgctgagtctgatcagctctcacaaccatcacatgccaacaaatctgatgctccagcggcaagcagtgagccatctcctcatgagactcagagtcggcaagtgaggagctgcaccaaggtcatcatgcaaggaatggcagttggaagggcagtggacctgacaaggctccatggatatgatgatcttcgctgcaagttagaagagatgtttgatatccaaggagagctctctgctagcctaaagaaatggaaggttgtttacacagatgatgaggatgatatgatgctggttggggatgacccttggcctgaattttgcagcatggtgaaaaggatatacatctacacctacgaggaagccaagcaacttactcccaagtcgaagctgccgatcattggcgacgccatcaagccaaacccaaacaaacaatcgcccgagtctgacatgcctcacagtgacctggacagcaccgcccccgtcaccgataaggattgctgaatgctacctggccatatttcccttcagttttttttttccatcttgggatgttgagcatgggggccaatgcccatgatccttgggacttctaagagttatccgctggttggttcgtgggcccgaaggacaccgtctgcatctaccttggttcatgcatcatgcatagctgcccctggaccagtgtggatcccatgccaggaaggatggctggggaggcagcatttccatcacctggcattccctgcgtgattggcccatccgtgtttaattctgctgtgtgggggtagtaggagccatggcatcctttgtccagtgctcagttttggtaaagtggtgactggtggtagacctgcaagaacggggcccgggcctcgccatctctcgctgcaccagtaaatagagtgtcaagcattcatgttcctttcttcctgcaatgcatggggtatcatcatccgtagctaagcatcagttcttctccccccccccccccttgcatcctgttcgcagttccggtgccgccactggagctgttcgttttaacccaccggcattccttcttttctttttttttaccgggtggtgtttttgctttcggaagtcggagcatttgctaagtttttttttcctacgctgtgctttcctcctgctgaatgtacctgtgcttttcctcctcgtggaagccatccaaatctatgacaattttctgtactcacttacctgcatgtacataggaatggaaatggaactggactgaactgaacctgg

SEQ ID NO: 19680 - DNA, 2032 bp, Oryza sativa
  ref <308>: DATABASE ACCESSION NUMBER: AK070027
  ref <309>: DATABASE ENTRY DATE: 2001-12-06
ggtctgtactggtccgggctccggcgcggcggccggccgtcgccctccgaaatgccttcgcctctcccgtgcaacctcctcactcgccgccgcgcgctcaccgcctgcgctgccgtcgccgcactcacggccgcggcggcgctctttttgctggccacccctcccaccgaggaccccacccacccgtatctcctcgcctccctcctccacaacaacacaagcaaccagcccgactccgcggccgcctcccaaccgccgcttccttccacttccatcctccagctccagactaatttgccatctgggtttacaacagtcccctccatgtttttggtcccttcaccttctccagcagaaaacttagatgatggttctatggaggaaactgaccctccagatttaaaggaaaatccaccggcggaatcagctccttttctccaagagcccatttccagtggttctcctataaggaggtctgatatctataataagggacatgacatgaaggaccatgcaatgcttcctccaagaccagaggtgcctatacctctttggtcaacagcagctgatgaagagctaatctatgcaaagaaagagatcactattgcaccgctggtgtccaatgaccctgatctgcatgcaccactgttccgcaatgtgtctgtctttaggaggagctatgaactgatggaaagacttcttaaagtttttgtataccatgatggagcaaaacctattttccattcaccagagttgaaaggcatttatgcatctgaggggtggtttatgaaactgatggaagggaaccaacattttgttgtgagagatccaaacagagctcacctattctatctaccgtatagctctcgtcagctagagcacaatctttatgtgcctgggtcaaatacaattgagccattgtctatctttgtaaagaaatacatagattttatctccaccaagttcccctattggaataggacaaaaggagctgatcatttttttgtcgcttgtcatgactggggaccatacactaccaaattgcatgatgaattgagaaaaaacaccattaaagctctatgtaatgcagatctctcagaaggagttttcattcatggaagagatgtgtcccttcctgaaacatttcttagatcaccaagaagacccttaagaggcattggtggaaaacctgctgcagagagatctatcctagccttctttgcaggacagatgcatggacgagttcgacctgtcctcctccagtattggggaggaaaggatgcagacatgagaatatatgaccgtttgccacacagaatcactaggaggatgaattatattcagcatatgaaatcaagtaaatactgtatttgtcccatgggatacgaggtaaacagcccaagaatagttgaggcaatctattatgagtgtgttccggtgataattgcggacaattttgtgcttccatttgatgatgcacttaattggagtgcgttctctgtggtcataccggaaaaggatgtacccaaactgaagcagatcttattggcaattcctgatgatcaatacatggctatgcagtcgaatgttcaacgggtgcagaagcactttatttggcatccaaatcccatcaagtatgacatcttccacatgatattacattcaatttggtatagcagggtaaatcagatccaaatagagtagcacttgcatctgatcagcagcaaggagctattgtggtctgatttgaattctagtatgatcctgcagcttcttcatccgagaaggcgctgaattgtgttcctgacattattggtctaacagaagaaccctgacatagtggagcttagttgtgctttaggagctgtcattttcacatttgttgattttctaatctaacgggttgtaacagttaaacggagtgttttgggaccacagctgaagataaggtgtcccgtgaatttttatctttctttgtattttgttaaacaatttttcgttgtgttttggagtagtattgattgcaaatact

SEQ ID NO: 19681 - DNA, 1954 bp, Oryza sativa
  ref <308>: DATABASE ACCESSION NUMBER: AK070028
  ref <309>: DATABASE ENTRY DATE: 2001-12-06
gatcctgtcgccgccgtcccctggagggcggcaaaccctagatctcgccgtggcgaggcgacatggaagcgccgtcggcaaaacctagatctcgccgtgccacgcatggatatatggtcctggaccgcatagtccgttgctggagcggagttggaggggacgacgaccccacggcgtcggagatcgcctacacctgcagcggccaccccatccgcgtctccctccgcgtcgccgaccccccccgccgtctcccgcctctacgtccaccgccccggctggtcgcgcgtctacgacctgggcgacgccgaggtcatcgccgcccaccgcggctccatcctcctctcggcgcgcgtccctttcgccgacctcgacaccatcgcgccgggccaattccccctggactacttcgtctacacggccaggcccggcgaggggttgcggccgtcgctcacgcggctgcccccttgcttcatcggcggattctcctccccgaggtcgaccgccacttcaagccgcaccggtgccagcagcagcgggtcatggtagagcagaacgtcggcttcttctgccactccgatgacgccggcgatttcacggtggcggacatcaacatccataagggtaaggccgtcgagctctgcgtcctcaaccactatgctgattgcccccaacaaccccaatggaaggtccagatcctggagatgcagcagcaacccaaccaaaaccaccacctcagaggttggtggaccgacgccgttcttcccctgcacgacagctacctcgcctgcgtcgactgctaccatggcatcatcctcatcgacgtcaagacccagcgttacttcaactacataccgctgccggcagaggcgatgcgtggccgccgcgttgacaagtacaaccctgatccagctcgttctgtctccatcaacatcgctggcgatatcacgcttgtctgcatagatgacaatgccgcagcaggaggccgcaacaacagctctgctggctctgctttcatcaagtcatggtgtctggtcgacatccacgaaagtagatggattcgttatttcaccatggaagccggcaagttctgggatatttgctctgccgcaaaccagcccctccttccacatgcgccgcctactttccccctggtgagcatggctaatccatttgccatctccttcctcctctacgacaaggccaacaacttcctcctcgaggacaagggcaatggcctttactggatgattgaggtggacatgagaaaccaagccctgctgtcaccagccaccctctacatcagtgaagaagaagaagcggaattcctgctgccaccagccaccttcttcatcaatggaaaagaagaagatgatgagagatacctgcccatgaaatatttttatggccataacttcgtccccagctggttcccctcttatttgaaaggtggcgacaccacaagtcggatgcggagtttaatgatgcagcaggcaaaacaagaaagtgcaatcgaaaagattggacgtgaaatgatgcagaaggaaaaacaagagagagcaatgcaaaagaatggattggagatgggatcgaatagttgggaactaagcaaaatgaagggaaaacaacagatggcaacggaaagtagaggaatggaggctcacttgagcaggccgcttgctggattgaagattgcttaatgtcatcatgcttaaagggattggagggacaatcgaaggattcttctgctgtatttatgtccaccatgttaagtatgtgcatccatccttgggcatctactacttaactatatctaactaattatgggtatgtgctatgctgagacaatccttaggcatctactacttaactatatctaagtatctaagtagttatgggtatgtgctatgctgagacaatttactactcctttttctatatgtcttgtttataagcc

SEQ ID NO: 19682 - DNA, 3659 bp, Oryza sativa
  ref <308>: DATABASE ACCESSION NUMBER: AK070029
  ref <309>: DATABASE ENTRY DATE: 2001-12-06
gaatttcgatcagcggagggcaggtgaggtgaggtgcgtttgtgtgtgtgggtgatctttggcgcgcctcgtcggcgatattcgtaccaacaactccttagatccgcaaaagattatggcaaattattgatcggtttcatgggagtacgatcgagtagctgtttccaagagccttatcctttcgttggagaaagcatgatttttccatgcttttggtcccgtactagcccggaattgtgtcatgtacatgggctactgtgatgtccttccaggaggctagacaagtgggctggctttgggcccattcggctagggagaaggagactagaaaagaggcaaagcagccagcagccagggtcatcgatgaatcaattaccagaacgcctcagacgatagcttcttcctccttgctgctgcttcccctctcaattcctattctctagtcccaatctcctgcttcctcttgtctgatctctcttcctagactatacctctctttctcctcaattttgtatccctaaacacttatattcttgagtagattgtaatatatcggtggcatttatgtgagagatttggtgtgattgtgttggttcgtgacaatatggtatcagagcagtcaattcgtggggtttctggtgtggagatgaagtgggagagcgctggtggtcagaggaactgccaacaacttggtggtggtgtctttggaggagatgcccaccacctgttcgatgaaatgtcgacctgtccaagaggcgattcagctgctgtccttcgcgtcaccgtgagccagatcatatatccagtgacatctgaggtgttgcatcaagtgtacaatacctatggagcagtggcggtgcaggttcttgcagtgagcacatggcaagtcaaggctcttgtgtcatttatgtccagccatgacgcggagagggctcggtccgccacccacggtcgcgacatctacgacgggggctgcttaatggatgtgcagcacgtccagatgttccctggagatgacgccaccaccacgcacaccacctgtttgacaatggtaccaagtagcgccaccgccaggccagcggccaagagtactgctgctacaccagaacgcgtgttccctgctacaacagcttcatctataccctcaattacatcagcagccatggtgacatcggttcctttcaacgagaccaagaaggctgagactgacatggacaaggcggtagagaacttagacaagaccattcaagacctgtgcaccaagatcgatcggatgctggaggcatttcgccacaccaaggtggatttatccttgagcaaggattccactagagatgtggcagcgttgagcgccaacactgatccaacttccatcgcattggaggtcagtacagaggccggctcaactaaccatgttgacacagccaagcttggcatgggaacaaccatcgagtgttcaatgaagtgtgagaaccagttggctgatgatgatggtggcaaagacatggccaaggaggagtggatggagctcatggaagtagataccaagttcaccactatgtatttatgcttcagagatccattgttaatcatcaatgcaattcctcccaggaactggagttggtgcttgagccgtgactactttggagttgtcggcctctctttcgtttcattgaaattggaagtactctatggttgctttgaccggagctcagaatacacagctagccctccaccagtaccaccttggagagcagcaattccacggaacaaagctgagatgacctcaggttctcggccgttaccatggcttgatccacagctttgtcaaggcagcggaggcgtggtggtaaaactcttacaaccctggccgccacttattcaaacaagtgtttgagctgaaattgaaacactgaatttatatggtgagtctcatcaagtctccttgaactacagcgttgcccaattcatgagtagaacaattaattccactgagggcttgctgcaaaatctgattgttggatggtgtatttggtatgagatatgtctctctggtgcctttaggaaggcctatcagcacacacatcattcaacctatggttgggcatatggggatcatgaattgttcttgctgctgatgctgatttcccatctatcacccgatgcatggtgtgattgtttgttcagtggagctaatgttgatggtaattgcacttgcaagtcacatgagagacgtacccatcgccatgctcggttctatactattccaatttcatttcaggttcagagtaacaacaatgatgtactagatgatacttcttggactcaatttggatcaaacaatggtgaggcatttagggtttcaacaagaaagttggtcaacttgcaaccttggcctcctccttcgcaatggaggagtgaggtattcagtttgtgtgcagcaggagggcaagggctcaatttttcttggaagtgtatatctgaagggaaactaatgttatggacaaatgtgaaagttattagaagagaatatacaaacaaggtgttatggctgtcagttgccaattcttgggatttaatatgggcagtgctacaacagttgctatgtacatctgagcttattcttcaatggaataattaacatgggcagacacatgagctattgttacaaagggagcagctgaaacttggtgcagtccatctcagtttggaagctagcactttcagtaagaattctcgtggaatagaactggttaaatgttcagagagatgcctcatttgtttagtttgtgaggacagcatagtcttgcacacatgggcctatcgagtggttaaattagttgatgcaagattggttggtgatcaaggtaaaaccatacaatttttagcaatttgggagtttgcaaacaaagaagtagctctcattcagacaaagaagcatatgcatgtttctcagcccactgatctcaatatttgcatgttacatctgggctctcatggagtatatgctgatagtagtggtgaagaaggcgtgaaggcttggtggttgaggcagcaaaagcatggtagagagtgtggttgtaatgctcaggttttatgtatgttggataagtggattcaacagtgggcagggtctacatcagatggttcgaaggtcatcaagcaattgttctgggattctgcccaacaaggcatttccctgcaggtaccttgggatcttgggggcattaatctggcgagtcagttgcatcggcttggggacaagccgattcttaacgggggaagaatgtcatgtacatggcctgctgtgatgtctttccaggaggctagacaagtgggctggctttgggcccattcggctagggagaaggagactagaaaagaggcaaagcagccagcagccagcagccagggtcatcgatgaatcaattaccagaacgcctcagacgatagcttcttcctcctccttgctgctgcttcccctctcaattcctactctctagtcccaatctcctgcttcctcttgtctgatctctcttctcaaactatacctctctttctcctcaattttgtatccctaaacacttatattcttgagtggattgtaatatatcggtggcatttatgtgagagatttggtgtgattgtgttggttcgtg

SEQ ID NO: 19683 - DNA, 1504 bp, Oryza sativa
  ref <308>: DATABASE ACCESSION NUMBER: AK070030
  ref <309>: DATABASE ENTRY DATE: 2001-12-06
aagctctcgaattcctcgtcgtcggagattgacaagagaacaggaacggcatggacggcgacggcgcacatcataacggcggtgatcggctccggcgtgctgtcgctggcgtggagcgtggcgcactcggctgggtcggaggaccggcggccatggtgctcttcgccggagtgaccctagtccagtcctccctgctcgccgactgctacatttttcatgacccggacaacggcgtcgtcaggaacaggtcctacgtggacgctgtgaggttttacctaggtgagaagagccagtggttctgtggctttttcctcaacatcaactttttcgggagtggggtggtgtacacactcacctcggccaccagcatgagggcgattcagaaggcaaactgctaccaccgggaagggcacgacgcgccgtgctccgtcggcggagacggctactacatgctcatgttcgggctcgcgcaggtggtgctctcgcagataccgggcttccatgacatggcgtggctctccgtcctgtcggcggccatgtccttcacctactccctcatcggcttcggcctcggcgtcgccaaagtcataactaatggagtgatcaagggcggaatcggggggatcgccatggtgtccgcgacgcagaaggtgtggcgagtctcgcaggcgatcggggacatcgcgttcgcctaccccttcgcgtcggttctgctggaaatcgaggacacgctgagtcgccgccgccggagagcgagacgatgaggacggcgtcgagggcgagcatcgcggtgaccaccttcttctacctctgctgcgggtgcttcggctacgcggccttcggcgacgccacgcccggtaacctcctcaccggcttcggcttctacgagccctactggctcatcgacttcgccaacctctgcgtcgccgtccacctcctcggcggctatcaggtgtactcgcagccagtgttcgcggcggtggagcggcggatgggcggcgcgggggcgggcgtggtggaggtggcggtgccggcggcggtggcgtggccgtcgcggtggcggcgcagctgccgcgtgaacgtgtacaggctgtgcttccggacggcgtacgtggcggcgacgacggcgctggccgtgtggttcccctacttcaaccaggtggtcgggctgctcggcgccttcaccttctggccgctgtccatccacttccccgtcgagatgtacctcgtgcagaagaaggtggcgccgtggacgccgcggtggctcgccgtccgcgccttcagcgccgcctgcctcgccaccggcgccttcgcctccgtcggtccgccgtcggtgtgttctcctccaagaccagctaataattgaaatgcatcagctcgatcagcaaatgaatcgaagaaagatggtctgtaaatatcaaaggaagtgttaatttgttcttgtatggagagagcatttatgtacagatcggtaaaattaaatgcgcaaaatggcacttaaatc

SEQ ID NO: 19684 - DNA, 2124 bp, Oryza sativa; identical to SEQ ID NO: 19494
  ref <308>: DATABASE ACCESSION NUMBER: AK099123
  ref <309>: DATABASE ENTRY DATE: 2002-08-28

SEQ ID NO: 19685 - DNA, 1986 bp, Oryza sativa
  ref <308>: DATABASE ACCESSION NUMBER: AK070031
  ref <309>: DATABASE ENTRY DATE: 2001-12-06
gagttttattattattacttacttacacgcgcagcgaagcagcaagcgaacgaaagaggcgaagccttcgcgtcgccgctcgccgccacctcgtcttccgctgcgagatctcgcgcgagcgccgccatcggaggaggaggcgcgtcggcagggtttgtggcggcggcagcggcggccggggatccgggcggcgatggcgagcaggctcaaggaggacgagaggaacgagcggatcatacgcgggctgctcaagctgcccgccaacaagaggtgcatcaactgcaacaatttgggaccacaatatgtctgtacaaatttctggaccttcatttgtaccaattgcagtggagcacaccgagagttcacgcatcgagcgaagtcagtttctatggctaaatttactgcacaggaagttagtgcccttcaagaaggaggaaatgagcgtgctagagaaatattcttcaaggaatgggatgctcaccgcaattctttccctgacagcagtaatgcggataaattgaggaactttattaagcatgtttatgtggaacggagatacacaggagaaagaagtgcagatcggccaccgaggggaaaggatgataaggatgagtatagtgaaaacaggagatctgatggaaattggggtggttcaaggagtccgccatacaatgaaagctattctgatcgtcgcagttatagtggaaggagcgatgacagaaattccagatattcctatggagaacgaagtcctggctatgaacataatgattataagaaaagcccccgctactttgaagttgatgatagaaatcgtgaggatagatctggaaaaacaactccagttcaacggtttgaggaccgcaggccttctgaaccacagaggccagataatgggtctccaaattaccagaaggaaaccgatggatctagccctgttgtacggccagtgagggatatactgggtgataatgcacctcaactacgggttggtgagcctcctaagccaaatgtagcgagaacgattgatcctccgagaccaatcgatcctccaagaccgattgatcctccaagaccgattgatcctccaaggccaattgatcctccaagaccaaatggaaccagaaccatcgaacctccaccacagatgcagaggacatcaactgccagcagtattggttcttcagaggggacctccgaacagataaaagtggcaagtacgataagtttaattgatttcagtgctgatcctgagccttctgcatctgtgccacctccacaatctacacctacatcacaacagcagcctgctagtgcacagccagtgcaacctgttaatgcaccagcacaacagcctgctgtggaacaagggaaaaatgtgtcatcagtgagcagtggtggtggtgactgggcatcgtttgattctttcggccagcaacaaacaccacaaactggcaatagtgtagatccccttgagtctgcacttgctcaactatcattttctgaaacaccctctgcacccaattcatcagcttttccagcttcggtcatgcccacttcagttccaaatgatggagggtcatccatgatggggcagtcacattcttcatttttttggtgcaccccctggagtctcaggtcaccaggcctcaacaggaatgtctatccatggatcttcagttcaacaaactggtctagctgctccggcagctggacttccgttccaggtctctgcgaattcccgagcaactagtggcattcaagaagcagcacctaatactgacagtagatccattggccggaaagaacttccagcggatatctttacttcgttatatccaccaggacctcaaacaatagggggttggcagagaacaccccaatttggaatgggatatgccatgccatatcagactgcaatgggaatgcaagcatatcctcagatggcatttgctcaacctgcatatcaacaacctgtatatccgc

SEQ ID NO: 19686 - DNA, 1672 bp, Oryza sativa
  ref <308>: DATABASE ACCESSION NUMBER: AK070032
  ref <309>: DATABASE ENTRY DATE: 2001-12-06
gtgtcgccaccttccccttccccccctccgccgcctcctccgccgcgaaacgaaaggcgagctctctctctctctctctccgcggcgcggtcaaaaccctagcgcgcgaggaggccccccccatggcgcagcagctctccgcccccttccgcgccgccgcggccgccggatcccgcgcctccgccgccgccgccgatcccgccaaggtgttacgcttgagaagcgctggctcagctcagttcacctccatcgcagcttcctcttcatttgctaggaacattgagccgctgagagcgatagctactcaggcaccccctgccgtcccacaatattcgagtggcgagaagacaaaggttggcatcaatgggtttgggcgaattgggaggttggtcctgcgtattgcaaccagtagagatgatattgaagttgttgctgtcaatgatcctttcattgatgctaaatacatggcctacatgttcaagtatgactccactcatggtccatttaaaggctccattaaggttgtggatgattcaaccctggagatcaatggaaagaaagtcacaatcactagcaaaagagatccagcagatattccttggggtaactttggagctgagtatgttgttgaatcttcaggtgtttttacaacaactgaaaaggcatcggcacatttgaagggcggtgctaagaaagttgtgatatctgctccatcagcagatgctccaatgtttgtcgttggagtaaatgagaagagctatgatcctaaaatgaatgttgtttctaacgcaagttgtactaccaactgtcttgctcctcttgccaaggttgtccatgaggaatttggcattgttgagggtctcatgacaactgttcatgccacaacagccacccagaagactgtcgatggcccttcaatgaaagattggagaggagggcgtggtgctgctcaaaacataattcctagctccactggtgcagccaaggctgttgggaaagtcctccctgagctaaatggaaagctcactggtatggccttccgagttccaacaccaaatgtgtctgttgtcgacttgacctgccggattgaaaaaagtgcatcctatgacgatgtgaaagcagccatcaaggcagcatcagagggtgcactgaaaggtattctaggttacacagatgaggatgtggtttccaatgacttcgttggtgatgcaaggtcaagcatctttgatgccaaggctggtattggactgagctcttccttcatgaagcttgtgtcatggtatgacaacgagtggggctacagcaaccgtgtgttggatctgattgcccacatggctcttgtcaacgccaagcactgatttgttgaaaatcctcctccgatagtatctagctaggaaaggctgcaattttgacggtctctttctgttgtcttggaataagatgtaaacttggaaacaaagcaaaaaaagaatggacattgatgtccatgacattgtttgtagcaggcggtgaaatttactctgtatcgacctgggcaagcggaactgttgagtgaaccatatgtcggcaacctgattgattcattgagtccaatgctatgccattctatatttactttaaacatgcttgtttcatgccagaaatgttcaacagacaattggcaatttacctc

SEQ ID NO: 19687 - DNA, 1367 bp, Oryza sativa
  ref <308>: DATABASE ACCESSION NUMBER: AK070033
  ref <309>: DATABASE ENTRY DATE: 2001-12-06
tcttctcgatttggtgtgacgtgtttgtttcagcagggaaggactgcaaggagcaccccaacgtcaagcaggtatcttggtgacgtgtttgtgttcctctgctgcgttgcctgctacaatgtgtgttctgatttggttgatttggtggtgacaagttcaagtccatgcctgatgctgtgagttcctcacttcctgtgcccatgttccaaaccgttacatatgcatttctcacttgatgtcctattgtttgaaacttgctgccttttagaacctccttagttgtctcaatgcttttacttttattactgccatgttaatgatcttgtggctgagtccttctgttttcatggagtgcattgcattaaaaaagatcccgtagatttttcttcatttgttaattatattgccaaaacgtgccttgcacgcgcacgataacatagtcagcttagtagaaagactgcatttttttcaatatttgcaatctggtttattttgagacatggtttgggcttgattattatctcattcttttgctgtactgaaattggttttggatttaattgtggactatgtctgtgtcactacaacatcaggtattggttataattcagctagaggaaagtagagtactttgaagtgtttgaatggttttcacatgtatactctgctagctaccctttagtaagtatattcatgtaaaggggagtaatagatcattgcactaatgttcaaactctattgagattgtcccaggtgtcactttgttcactgaaaaaaaaagagaacatttataggttttttttgctgcttgggagaggatgctgccgaattgaattaagacagccttcagaatctggtatatctaatggtctgtaaaattttacacaagcaacaggagggaccatcaagggaatgtttcacatgtgatggattttgtatagaaaaaggagattcattgtttgctgaaggtgtattgaaagttgcttgccgataaataaagaccccatggatagatgcaatgatgcattaagctcttgaaggaggattaacggaaaactatgtcgagtttttagtagccttgtttgggctaacgacactcggtttattgttctagatctctgacctaagaatcctgttttagtttttttttagatctcttgctttgggtgttgtttgctctaggtgttctgttgtccgcagtttcaggtgctttgtagtgtagtttagtttgggggtgttctcaaggtgttgtacagtgaattggtttcggtgcttgccctttgttgcgttggtgttgtttatgttctctatatcgatgaaagatgttaaagcttttgcctttgtttcgaaaaagattgaaaccacat

SEQ ID NO: 19688 - DNA, 963 bp, Oryza sativa
  ref <308>: DATABASE ACCESSION NUMBER: AK070034
  ref <309>: DATABASE ENTRY DATE: 2001-12-06
gattcgcttccactcccacaccgatctagggtttctagggttttgggttgcggcggcggcggcggcgagagggcgagggcgaggtcgagatggcgtcggagagggtgaaggggacggtgaagtggttcgacgccaccaaggggttcggcttcatcacccccgacgacggcggcgaggatctcttcgtccaccaatcctcgctcaagtccgacggctaccgcagcctcaacgacggcgacgtcgtcgagttctccgtcggatccggcaacgacggccgcaccaaggccgtggacgtcaccgcgccggggggcggggcgctcaccggcggatcccgtcccagcggcggcggggaccgcggctacggcgggggcggaggcggcggccgctacggcggtgaccgcggctacggctgcggtggcggcggctacggcgggggcgaccgcggctacggaggcggcggcgggtacggcggcggcggcggcggaggcagccgcgcgtgctacaagtgcggcgaggagggccacatggccagggactgctcccagggaggaggcggcggtggtggctacggtggtggtggcggcggctaccgcggcggtggtggtggcggcggcggcggcgggtgctacaactgcggcgagaccggccacatcgctcgcgagtgccccagcaagacctactaggcgctgctcgcggcgtcagatccagctccctcccatgatgcgttttgctccccctccctcactgaatcaccgagcagcgggtgatcagttctatcttattagtagtcgtagatctcgttaggaaagctatggatctatcggttcgtcgtcgtcgtcgttctatgtaatgggatgggagtcttggagtggtttaatctttttgtttcgttgggtcggtttgagagacaagccatggatttgcactgtctgatctatctatgaatctatctattatgaaccg

SEQ ID NO: 19689 - DNA, 1526 bp, Oryza sativa
  ref <308>: DATABASE ACCESSION NUMBER: AK070035
  ref <309>: DATABASE ENTRY DATE: 2001-12-06
gaattcccaaattctagggttcgcctcttgcaccgccacgcatcaggagcacacgcccacatgaagatgagggcggcggtggccgacggcgacggcgacgacgacggcgccggcgcgcccgtccaagtcagcgtggaccccgccgcctaccgggactggtccgcgctcccggccgacctgctgctcacggtgatggagtcgctcgccatccccgacctcttccgcgccgggaccgcctgcgcctcctggtacgccgcctactccatcgcccgccgcgcccgtatccccatacgggattcggctccgtgcttgctctactccggcgaaggcgacgacgaccccagcaaggccaccctgtacagcccctcgagcggggactgcttccgcgtgcggctcccggacccgccgctccggagccgcaacctcgtcggctcagcgcacggctggctcgtcaccgccgacgagcaatccaacctccacctcgtgaacccgctcaacggcgcgcaggtcgcgctcccgcccgtcacggccctccaccatgtggagagcttcgtggacgaggaagggaacatagtgtatagtgttgatgagtctctggggcccgacgatccagaagccaatctccccgaattcgaggagctcgccgaccgggaagtccccgtggaataccctgcggagaagctgcgcctgttcatgtacaacagggtgattctatcctgcagcccatccgtggggagggaatgtgttgccctgctggtgcacagaccggatgggatgatctccttcgcccgaccgggcgacgagagatggacccatatcaaccggacaacgagcaatggatcgctcaaatgggataccggctataccgatgcgctttacaacaagaatgatggcttgttctacctgttgagctttgacggttctatatgcgcgttggatctaagtgggtcaagtccagttgcgaggaacattgtgaagaaaaatacacagtgggataatcctagcaaatacattgtgctggcaccatggggcgatctcttggaggtgtggaggttgagagactttgatgaacctgatgaaactcctgaatgttcttctgctgagtttgaggatcgatctgataagtggttaacagaagaaattatgctatataaagttgatatcgataagcagaaacttgttaagataagcagcatcggggattatgctctgttccttggtttcaattctgtggtgtgccttccaacagagaattttcctatgttaaaacctgattgtgcttatctttctgatgaattttatgaagaaatatgtgtcaagaggcataactggcgagaaataggcatttgggatttgaaaaattgcaaactgcagagccttggtgatgtggagtctcttcatgcttggcgtaattggccatcgcctatttggataacaccatctcttagttagaaagatgtgggagattttcatgtattaggagctccaatatggatatcattaatcgaaaagagagatttatgatg

SEQ ID NO: 19690 - DNA, 2307 bp, Oryza sativa
  ref <308>: DATABASE ACCESSION NUMBER: AK070036
  ref <309>: DATABASE ENTRY DATE: 2001-12-06
ggttttttgaccaaaactttgctgctcactgtcctagctggagagaatccagcgatacacgcatgtcttcttcttcagctcggtcttggttgccgacctcatttgcagatttctgcacatgaggcatctctctctcgaagtatcgtgttttgatttgggcaggtagccagccactgtgagagtgtgagctgaggtgagcatcgccatgggagaggttgcagaagacatctacacccaagatggcaccgtggacgtcaagggcaacccggccaccaagaagaacaccggcaactggcgtgcctgcccctacatcctcgctaacgagtgctgcgagaggctggcctactatggcatgagcaccaacctcgtgaactacatgaagacgcggctcgggcaggagagcgccattgcagccaacaatgtcaccaactggtcggggacttgctacatcaccccccttctcggtgccttcttggctgatgcctacatgggcaggttctggaccattgccagcttcatgatcatctacatcctgggtttggcgttgctgacaatggcgtcgtcggtgaaggggctggtgccggcgtgcgacggaggagcgtgtcacccgacggaggcgcagacgggggtggtgttcttggcgctgtacctgatagcgctgggcaccggcgggatcaagccgtgcgtgtcgtcgtttggcgcggaccagttcgacgagaacgacgagggggagaagcggagcaagagcagcttcttcaactggttctacttctccatcaacatcggcgcgctggtggcgtcgtcggtgctggtgtacgtgcagacgcacgtcgggtgggggtgggggttcggcatcccggccgtcgtcatggccgtcgccgtcgccagcttcttcgtcggcacgccgctgtacaggcaccagcggcccgggggcagcccgctgacgaggatcgcgcaggtgctcgtcgcgtcggcgaggaagtggggcgtcgaggtccccgccgacgggtcgcggctgcacgagacgctcgacagggagtccggcatcgagggcagccgcaagctggagcacaccgggcagttcgcgtgcctcgacagggcggcggtggagacgccggaggacaggtcggcggcgaacgcgtcggcgtggcggctgtgcacggtgacgcaggtggaggagctgaagagcgtggtgcggctgctgccgatctgggcgagcgggatcgtgttcgcgacggtgtacgggcagatgagcaccatgttcgtcctccaggggaacacgctcgacgccagcatggggccgcacttctccatcccggcggcgtcgctctccatcttcgacaccctcagcgtcatcgtctgggtgccggtgtacgaccgcctcatcgtgccggcggtgcgcgccgtgacggggcgcccacgcgggttcacccagctgcagcggatgggcatcggcctcgtcatctccgtcttctccatgctcgccgccggcgtgctcgacgtcgtcaggctgcgcgccatcgctcgccacgggctctacggcgacaaggacgtcgtgcccatctccatcttctggcaggtgccgcagtacttcatcatcggcgccgccgaggtgttcacgttcgtcgggcagctggagttcttctacgaccaggctcccgacgccatgcgcagcatgtgctcggcgctgtcgctcaccaccgtcgcgctaggcaactacctcagcacgctgctcgtgaccatcgttacccatgtcaccacccggaacggcgccgtcgggtggatcccggacaacctcaaccgcggccacctcgactacttcttctggctgctcgccgtgctcagcctcatcaacttcggcgtctacctcgtcatcgccagctggtacacctacaagaagacggcggattcaccggacgacaaggccgagcacgccggagcaaactgtgccacgaggtgaagctgattatgacatacaagggggaattgaactgaattgtggcgtgtgaatgtcagaatgtgtggggttctaaacaagttcttgggagataaaatggaaaggaaattagtgtcgtttgtgaccttcaaatatgttatagtgttcattgcattatgtctggtaggaaaaaatgaagaagaataggaggatatagtagtttaaaaatataaatgtgatgtttagttttctagaaatgcattggccaaagttgttcaagaaataaggtcttctgtggtggagtatctcataagttcattaggttgcagaaatgccattgttcagcagtcagaaagacagcgatttatggg

SEQ ID NO: 19691 - DNA, 977 bp, Oryza sativa
  ref <308>: DATABASE ACCESSION NUMBER: AK070037
  ref <309>: DATABASE ENTRY DATE: 2001-12-06
gatcatccatcatcacacagctcactgaccagcagctcagcctcatcactcacgagcaatcagctagctagcttagcttgatcactacacctccatagatcttagcttaattagcttagattatacaagtggtcaagtcaagaactgtaccaatggcatcatcaatggcgcctgcagcagcaatggcgatcctcctcctggcgcttctcatgcccgccacgctgtgctcccgctcagggccgccctcgtccaagcacggccacggcggccacgccaagcgcgcgcgccgccggcgtcgcccgtggtgccggtggcgcctcaggccgcggcgctggtgcgcgccacctgcaactccaccgcctactacgacgtgtgcgtgtcggcgctcgccgccgacccgtcgagcaccacggccgacgtgcgcgggctctccgccatcgccgtgtccgtggccgcggcgaacgcgtccggcgcggcgcaggcggcggcggcgctggccaacggcacggcgcccctcgccgccgctgccgccggcgacggcaccgtgcaggcgctgctccgcgcgtgcgccggcaagtacggcgacgcgcgcgacgcgctggcggcggcgaaggagtcgatggggcagcaggactacgacctggcgacggtgcacgtgagcgccggcgccgaatacccgcaggtgtgcaaggcgctgttccggcggcagaggcccggggcgtacccggcggagctggcggcgagggaggaggcgctcaacaagctctgttccgtcgcgctcgacatcatcgccctcctcacctcctctcctgcatccaacaacaacaacagctagagctagatacgtataaatacggtataatactactagtactgcatgcgtacgtgctaaatacgtgtaatgacatgtatttggtagtaactagttaatcctgtgtggtgctgagtgaggatatatatgttcttcttgtattact

SEQ ID NO: 19692 - DNA, 1275 bp, Oryza sativa
  ref <308>: DATABASE ACCESSION NUMBER: AK070038
  ref <309>: DATABASE ENTRY DATE: 2001-12-06
gaccattactacttcctctccttccttctcttcttgccaagctcaagctgatcaagccaagaagctagctagctatgtcgtcttcgccgccgacgagcgcgatggcggcgggaacgtcgtcgtcgtcgggaggcggatctgggccgttggtggtgagcaacggcgtgctgctcgccgcggtcatcttcctgttcatggtcgtcgtcttcgtcttcctcctctacctctacgccaagagatacctcggcgcgaacccgctgctcgcccccgtctcgccctcctcccgcttcctcttcctcgacgcctccccgttcccgcgccgcggcttgccggcggccgcgctgcgggcgctgcccgtcacggtctacgcgaagccgcggcggcgcgcggcgaggaggcgctcgagtgcgcggtgtgcttgtccgaggtggccgacggcgagaaggtgcggatgctgcccaagtgcgaccatggattccacgtcgagtgcatcgacatgtggttccattcccacgacacctgcccgctctgccgcgcgcccgtggggcccgacgccggcggcgaggggctgccgcgcgtgccgcgggaggagccggctgccatggacttccccatgttccccaccaacgtcctcttctggggcaccgcccacgacgacgtcgccaacgccggtgaccgccacccgttccaccccccgccgccgccgccgcctctcatggccgcgccctccacgagctcctcggcgtccgcgcgcaggaaggagagcctcgtcatcgacatcccgtcgcgctctgcgcgccgccgccgcggcggactccgtcacgtcgtcctccgcctcgacgccgctgccggcgagcaggatggcggacgacatgaggtcgccggtgtcggcgcggctgcggtcgctgcgccgcctcctcagcaggggcaagcaggccgtggtcggaccgtccttcagcccgcgcggcggcggcgacatcgagcaggggctcgccggcgtccgccgaagacgcccaagacgccccgccggcgaactgatccttctccccggagctccgagatgcattggctcgcctcgccgatcaccggagcgtacacatgtgttcattctttctttcctactattcttttctgatattttcttttacatttcaaaaaagaaaaaaaaagaagaaattttgatgagaaactctcatgtaaaaagaagatgacaacattactgtaagttgattcttggtgattgggggataaaattgatgaatttgttcaattgcc

SEQ ID NO: 19693 - DNA, 1278 bp, Oryza sativa
  ref <308>: DATABASE ACCESSION NUMBER: AK070039
  ref <309>: DATABASE ENTRY DATE: 2001-12-06
ggggagcccttccgccgccgccgccgccccgatgttgggacacctccggcgatcctcccaacgactgcccgtagccaacctcgccgtatactcgatccagagttcacatattgagttcatagccggctggtgtagaaaccattctaccaggaatttctctgtagatacaagtaataaagtttccaacgatcgggggtatcaatcaagggagttgaaaccaagccttgtgaaggatgatgttgcaatcatcaaacacatacaaaacagtacaaaggaattgaaacaagggccagttgggaaaaatctatcatcggcagagaaaaggaaatttcttgtcaacactctgcttgacctggaagattcaaaagaaggtgtttacagcactctggatgcttgggttgcctttgaacaggagtttcctgtggcctcgttaaagcaagcacttgtagctcttgaaaaggaggaacagtggcatagaatcgtccaggtgataaaatggatgctgagtaaaggacaagggaagactatcagaacatatgagcaattagtgtgtgcgcttgagaaggacaacagagcagatgaagcttgcagaatctgggagttgaagatagcccatgatctacaatcagttccatggcggttttgccgtcttatgttgggtatttactacagaaataataggctagatacgcttgtcaagctcttcaagaatcttgaagcatgtggtcgtaaacctccaagcaaagatattgtacggaaagttgaagacacatatgaaatgcttggtctagtagaggagaaaaaggaattgcttgagaaatacaaggaattgtttgacaagccatcaagtaatgatagaaagaaagggcggcagttcaaaaaggctgagaagaacacgaaaaccggctagacatgtagtgatgcctgcacctctaaaatctacagcatcgagcttccaggatggcataagcttagagcttcacagtgcaggttggaaacatctgaatatctgccagtctcttgcccttgagtttcacaatgcaagtatgtatccccgggaaaaaaaaaatagagtatgtacggtagtacagttgttggaatataaagctgtgatcaaaaattcctacaactgtcgcttcaagcattgttgtcattccttttgcctccgtccagatttgtttctgacagtgtatccatactcagatcagagcctgatgtgatgcagcaagcaatggtatttgctatgccctctgaatgttaatacatcccgtatttttt

SEQ ID NO: 19694 - DNA, 2057 bp, Oryza sativa
  ref <308>: DATABASE ACCESSION NUMBER: AK070040
  ref <309>: DATABASE ENTRY DATE: 2001-12-06
gtctctcatcgccaccaccacctcccactccaagacgctagctgcattgtagtgagagagagaggcggccatggcgctggcgtcgctgccgaaggtggtgatggggtcggtggcgttcggtgtgttctggatgctggcggtgttcccgtcggtgccgttcctgccgatcgggcggacggcgggggcgctgctgggcgcggtgctgatgatcgtgttccacgtgatcagcgccgacgacgcctacgcctccatcgacctccccatcctgggcctcctcttcgccaccatggtcgtcggcggctacctcaagaacgccggcatgttcaggcacctgggccggctgctggcgtggcggagccagggcgggcgcgacctcatgtgccgcgtctgcgtcgtcaccgcgctcgccagcgcgctcttcaccaacgacacctgctgcgtcgtcctcaccgagttcgtgctcgagctcgccgccgagcgcaacctcccggcgaagccgttcctgctcgcgctcgccaccagcgccaacatcggctccagcgcgacgcccatcggcaacccgcagaacctggtcatcgccttcaacagcaagatctcctttatttccttcctcctcggcatcctccccgccatgctcgccggcatggggatcaacatgctcatgctgctctgcatgtactggaaggagctcgacggcggcgcctgcagccccgacgaggtcgccgccggcaagcagatggaggccatcgaggagggccgccgcacggcgctcaacaacaacaagaaagacgacggcgacgccgccacccccgcatcgccggaggacgacgacggcggcgacgccgagtcgatgatgtcggagaacatctcgacgaagcaccggtggttcatgcagtgctcggagcaccggcggaagctgttcctcaagagcttcgcgtacgtggtcaccgtcggcatgctcgtcgcctacatgctcggcctcaacatgtcgtggaccgccatcacgaccgccatcgccctcgtcgtcgtcgacttccgcgacgccgagccatgcctcgacaaggtgtcgtactcgctgctggtgttcttctcggggatgttcgtgacggtgagcgggttcaacaagacggggctacccggggccatctggaacgtgatggcgccctactcaaagatcaaccacgtcaccggcgtcaccgtcctctccgtcatcatcctcctcctctccaacctcgcctccaacgtccccaccgtgttgttgatgggggatgaggtggcggcggcggcggcgacgatatcaccggcggcggtgacgcggtcgtggctgctgctggcgtgggtgagcacggtggcggggaacctgtcgctgctggggtcggcggcgaacctgatcgtgtgcgagcaggcgaggcgggcgacgcgcaacgcctacgacctcaccttctggaaccacgtcatcttcggactcccatccaccctcgtcgtcaccgccatcggcatccctctcatcggcaagatcaacatctagtattcattaaattaattaattaatataatccggctagctactatctacaacgatcagaagaaggcagaatgatcgagcatgcaagaattcatgcaaattacaagggatgtgatatgatcatattaatccaaggaagctagtatgatgattaagtttgtgatcaagccgtactatgtgcatgccaatgcatgcatgtgttcaagtgtacactatgcttggtctcaagtggatcaattatattggtgccatgctctgggataattagttaattagtacttatgataagctagagaggaggatgcattatattggtgcatggtaataaggcaaatgaacagcagaatgcatgtatatatgtactgtatccctgttgccagctggtctctgtttgaatgaagttgatagcaacaaagctagcactagcgaatgagctagtgactcaagtacgcatgccggattacctcattgctccaaacttgcaatcagttttgaacttttaataaagttaatttggctttgtgcacttgtc

SEQ ID NO: 19695 - DNA, 1543 bp, Oryza sativa
  ref <308>: DATABASE ACCESSION NUMBER: AK070041
  ref <309>: DATABASE ENTRY DATE: 2001-12-06
gacatcgcaatccaaaccttcgtcttcgtcttcctctcgccgctgattcgattcgatccgatccgatccaaggggaggggaagcaatggcgacgaagaggagcgtggggacgctgggggaggcggatctgagggggaagaaggtgttcgtgcgggccgacctcaacgtgccgctcgacgacgcccagaagatcaccgacgacacccgcatccgcgcgtccgtgcccactgtcaagttcctcctcgagaagggcgccaaggtcatcctcgccagccatctgggccgtccgaagggtgtcacccccaagtacagcttgaagcctcttgttccacgcttgtctgagctacttggagtcgatgttgtgatggccaatgattgcattggtgaggaagttgagaaattggctgctgctttgccggaaggtggtgttctactcctagagaatgttagattctacaaggaggaagaaaagaatgatcctgagtttgccaagaagcttgcagctgtcgctgacctctatgtaaatgatgcttttggcactgcacacagagctcatgcttcaactgagggagtgaccaaatttttgaagcctgctgttgctggcttcctgatgcagaaggaacttgactatcttgttggagctgttgcaaacccaaagaagccatttgcggccatcgttggtggatccaaggtctcaactaagattggggtgattgagtctctgttggcaaaggttgatgtcctcatccttggtggtggtatgatcttcacattctacaaagcccagggatatgctgttggaaaatctcttgtggaggaagacaaacttgagcttgcaacttcacttattgagaaggcgaaggcgaagggtgtttctctcttacttcctaccgatgttgtagtggctgacaagtttgccgcagatgctgaaagcaagactgttgctgcctccgctatccccgatggttggataggtcttgatgttggcccagatgccatcaagacttccagcgaagcattggacacctgcaacactatcatttggaacggacctatgggagtctttgagtttgagaagtttgcagcaggcactgatgcaattgccaagaagttggctgatcttactaccacaaagggcgccacgaccatcatcggtggtggtgactccgttgctgcggtcgagaaggctgggctggccgacaagatgagccacatctccaccggcggtggtgctagcttggagttgctggaaggcaagaccctcccaggtgttcttgcccttgatgaagcgtaagctaattcggcttgtctccatcagcagtctgcacttttgtttcagacctctcggtgtaactttgcaatgtcaatgcttgtatgaagaacttgagataggcttatcgtcaagttttgctagatgagtcgtgaataagcttttcgacttcctcgctgccgcgagtgaagtggttcgaactgacatacatactctcatggatcgatattttgatatgcggttatcacatccctatgatggcatcatctgttg

SEQ ID NO: 19696 - DNA, 1765 bp, Oryza sativa
  ref <308>: DATABASE ACCESSION NUMBER: AK070042
  ref <309>: DATABASE ENTRY DATE: 2001-12-06
gtggcgcctcttcgacctcgtgggtgggtgtgcgggtgcgggactcggtgggatgcgccacctgctgctcctgcgctgcggcatggctcctctctacggctcctcctcctccgccgccgcgaccaaagccctcctcttaaaccccgccgccgcgcacgccttcgtcccttcttcccccggaccccgcgcgctccgccgcggcggcgcctccctccgctgctatgccgccgccgccgcggcggtggccgagcagcaccgcatcaaggtccacaaccccatcgtcgagatggacggtgacgagatgacgcgggtcatttggaagatgataaaggataagctcatcttcccttacctggagctggatgtcaagtatttcgaccttgggctgctcaaccgggatgccaccgatgataaggtcactgttgagagtgccgaggctacgttggagtataatgttgctgttaagtgtgctaccattacacctgatgaaacaagagttaaagagttcaaactcaagtcaatgtggaggagcccaaatggcaccatcaggaatattctaaatggaactgttttccgggagcccatcttgtgtaaaaatgtaccacggatactttctggctggaagaagcccatttgcattggaaggcatgcatttggagaccagtatcgagctactgatacaataattaatggtccaggaaagcttaaaatggtttttgtcccagatggtgctgaacctgtggagttaaatgtttataattttaaagggcctggtgtggctttatcaatgtataatgtggatgagtctattagagcttttgctgagtcatcaatggcaatggcactttccaaaaaatggcctctttatctcagcaccaagaacacaatattgaagaaatatgatggcaggttcaaggacatcttccaggaggtatatgaagagaaatggaaggagaagttcgaggaaaactcgatatggtatgagcaccggttgattgatgacatggtggcatatgctgtgaaaagtgaaggtggatatgtttgggcttgcaaaaactatgatggagatgttcagagtgacttccttgcccaaggttttggttccttgggtttgatgtcatctgttttgttatcttctgatgggaaaacgttagaagctgaggcagctcatgggactgtcactagacatttcaggctacatcagaagggacaggagacaagtacaaatagcattgcttctatatttgcttggactcgtggactagaacatagagcaaagctggataaaaatgataggctgctggatttcacaaagaaacttgaatctgcatgtattgaaacagttgaatcggggaagatgacaaaggatcttgcactccttatccatggccccaaggtaacaagggagttctaccttaacaccgaagaattcattgacgctgtggctcagcaactgcgagaaaagattcaaataccagctgtggtttaatcctcaatatgcaaattctatgtctggttggaagcctatcattgggtgcagcaggttcactcgctgtgcattcgcgcgcattttgattggggtgatgagacggatgatcccatttaatagtttgcctcgaagcgatttttgtttcagcctaccattttatcatgttaaactgttaataatctgctagtgctaagtgaattggtgatttcgctactcaattcacaacctcgcatggttgggtaaattaccttgaggtcaatacataagcgtagtctc

SEQ ID NO: 19697 - DNA, 1106 bp, Oryza sativa
  ref <308>: DATABASE ACCESSION NUMBER: AK070043
  ref <309>: DATABASE ENTRY DATE: 2001-12-06
gagcaaccgaacatcccctcctgacctccttcctcctctctccccgattccccccacccacccaccaagcgcgtcggaagcgatggcgtcggcggcggagatgcagccgctggccccggcgggctaccgccggcgccggagatgaaggagaaggtggacgcctccgcggtggacctggaggccggcaccggggagacgctgtacccggggatctcgcgcggggagagcgccctccggtgggggttcgtccgcaaggtgtacggcatcctcgccgcgcagctgctcctcaccaccgccgtctccgcgctcaccgtcctccaccccaccctcaacgccacgctctcctcctccccgaccctcgccctcgtgctcgccgtcctccccttcgtcctgatggtcccattgtatcattatcagcacaaacacccacacaactttgtttacctgggtctgttcacgttgtgcttgagtttcagtattggtgtggcatgtgctaacactcaagggaaaattgtgcttgaggcattaatattgacctcagctgtggttgcctctttgactgcgtatactttctgggcttcaaagaaggggaaagaatttggttatcttggaccaattctgttttctgctcttgttttacttgttgtgataagctttattcaggtgttcttcccattgggctctggaccagttgcattgtttggtggccttggagctttagttttctcaggtttcatcatctacgacacagagaacttgataaagcgccacacttatgacgactacatttgggcctctgttgagctctaccttgacatcctcaacttgttcctttatatcctgaacatgatcaggagcatgcaaagtgataactagccagtccatcagcaccaaccagacgtattgtcaacttgctcagtgacgtcagtgtgtcttcctctattaagtactattttgaacagcgatctatataaccgtgaaaacctcgtgatgtattttgctgtcgtctgactcagaggatgagaccgaagtacaatatatgtatagttttggttgtgttgagtatgactgtcggaaatgtgatcccatgattgtgacgtggtgcc

SEQ ID NO: 19698 - DNA, 1003 bp, Oryza sativa
  ref <308>: DATABASE ACCESSION NUMBER: AK070044
  ref <309>: DATABASE ENTRY DATE: 2001-12-06
gattcccatcccaagtccaaccaagagtggagcagagactcactggagaccaaaccctagctgccatggcaatggcgacgtcgatctccgccggcttcggcggcgagctcggcgcggtgctcgccccgtccgcctccgtcctccccgccccgcgccggcgcaaccccgccaccagctccaaggcacagtttagttcatttcctcgtggacgatcttgcaacatcatgcttactcctaagcatctaggcattgagcaccaaagctgttcaaagagctccattcagacttttgctctttcaaggaatgacttctctcctattgctcaagaggtggaaggctttcttcacaacattgttaacatggggtttcttgatcgtctgaaattagcatggaagataatcttcccagcaccaagcattaaggagaactctaatgcaaacatcgcaaagcagaggcttaagatgatactgttctccgacaggtgtgaagtgagtgacgaggcaaagaagaagattgttgagaacatcgttgaggcactctctgaattcgtggagatagaatcacgagacaacgtccaggtggatatctcaactgatgctggccttggcacagtatattctgtgaccgttcctgttcgccgtgtcaagcctgagtaccaggaatctgaagagcagtacagagggaagatcgtaggtgttgacttcaaggacactggagaaacatcaggcagcgtcgacgttacgttcgatttcttcgtgcccaacaagaactactgaccgttgtattccccttttgcttccgagtatcccagaactccttggttagaatgttcaatttgttgaaggctttcttcgcaatcttggttagtctaatgtacatatctaggcttttgtttgtctctgcgtttcatgtaattttattttgaatttttgttctgaaggtggcaaatatcagtaccgtggggttagtccaacttggattttccgaagaaatgtttatttat

SEQ ID NO: 19699 - DNA, 961 bp, Oryza sativa
  ref <308>: DATABASE ACCESSION NUMBER: AK070045
  ref <309>: DATABASE ENTRY DATE: 2001-12-06
gatacatatctctcccttgcttgctttgctcctggatatatagctagcttctttctttcttcctctctccctgtgtggcacgcgcctccaatcgatctcttcggtgagtagacgcatcgagatcggggggaaatgtcggtccagtttacatcggagcatgtttgctatgtcaactgcaactattgcaacactatccttgtggtgaatgtgccaaacaattgttcctacaacattgtgactgttagatgtgggcattgcacaatggtgctctccatggatcttgctccttttcaccaagcacgcactgttcaagatcaccaggtacagaacagaggatttcaaggtaataactttggaagctatgacatagcttccagaaatcagaggacatcgacagccatgtacccaatgccaaccagtcagcagcaagtgtcacctatacgtccccctgagaaaagacagcgtgtcccatctgcatacaacagattcatcaaggaggagatacagaggattaaaaccagcaatcctgagattagccacagggaggcattcagtgctgctgcaaagaactgggctcatcttccccggctccattttggcctcagcgtcgccgacggcggcggcggcggcggcagcaactaactcgcggcggcgcggcctgccggccggccactcgatcgccggcgtgcactgccggcgcgcggcggcggccggtcgagaatgcgcgcgcaggagggacgacgacgatatattattatcgcgtgtgcccctctctcttcgccgcgtaattaattaatcagttaattaattacgtacgacctactgtgttatgctatcgatccgtgttaattaattacctacgtatcttgattaattagtctcgtattatacgtactattatacgtacgtgctgtgctatgtacgtagacaacaaaaaaaaatgtgcgtgatgagttctacc

SEQ ID NO: 19700 - DNA, 4353 bp, Oryza sativa
  ref <308>: DATABASE ACCESSION NUMBER: AK070046
  ref <309>: DATABASE ENTRY DATE: 2001-12-06
tttcagatattcctttttacatgttagatgctgggttgccacctgaaacttctgctccggtttttggcgagcgtgttgtaagtactgctcccccacctttgattgatttctctcttggtatggaatctctccgaattaggcggggccttggagataatttatggactgatgatggtcaacctcaggcaggtaatcatgcagctgctgttgcccaggctttggagcatcattttattacagagttgaatgtgtctacttttctaaataatgcaattccatacactggcaatcgtgtgcttgatatgcaacctgaccaaactggcgatgatgtagatgacgatttaccatcacaggatgatgacatatcagaacatgtgacaactgattcccctgctttgcctactagtagccctcaacaatttggaactaccaaccaagcaaacggtaatgtctgtcctatgaatgatctaatttgtcaacagtcagctgatgttgcagatgttcgtactgaagaagagatgcatcaaatagctgatgacatgaatgttatacctcagagtaatgaggatactgctgacagacagcatgttgctcatcctgatagggactcactgtctggtaatctgcaaagttatgatcatgttatgcaggatgaggtagaaatacctcaacgtggccagattggtaatgatattagggacccatctgatctggagtcaagttgtcatgctcttctcacttccacaagtgcagctcctgagctgagcgatgctcatgttgattccaccactatgaatacagatgttgacatgaatagcattgatatttctgagaaccaagtagaaaactcagctcctggtttgtatggcaatgttgtttctgttaggctagacgaaggagctcctcaagagactatgcagcctgatcaattgaatgctaacaatgaggcatctagtacaaatgaaatcgatccaacatttcttgaagcattgcctgaggatctccgtgcggaagtccttgcttctcaacagaatcgcgctgcaccaactgcttcctatactccaccagctgcagtagaaatagatcctgaatttttggctgctctccccccagaaatacaagctgaggttttggctcagcagcgagcacagcggatcgctcattctcaacccattgggcagccagttgacatggataatgcttcgattatagcaactttcccccctgatctacgcgaagaggtgcttttgacctcgtcagaggcagttttgtctgccttaccttcagctttacttgctgaagctcaaatgcttcgcgacagagagttgagtcgttaccgtgctaggggaagcctttttggaggaagttacaggcttggagcgaggaggttaccaacagacaatcagactgctgttatggacaggggtgttggtgtgactgttggtaggcgggttatttctactgtgtcggcaggcgctaagggtaaagatgtggaagggaccccacttttggattctagcgctctaaaagcacttattcgtcttctgcagctagctccgccactcagcaaaggccttcttcaaaggcttatgttcaatctttgcgcgcacagtgttacgcgtgctacattgattggccatttactcaacattattaaacctgaagctgaggggcttaatggatgggactgcatgactacatataggttacatggatgtcagtggaacattgtttatgcacaaccacaatctgcaaatggtctacctccgctggtgacaagacgacttcttgaagtgcttacataccttgcttcaaaccatccatctgttgcaggtctcttggtctactttgacccttcaacaagttcaaactgtatgatcctaaagcatggtaaagaattatctcaagaagggctacaatcggatatgatgaaaacgtcatctgagggttatacccctatcctgctattccttaagctcttaaacaagccgttgtttctacgaagtcgagtatatcttgagcaggtgatgtgtttgcttgaagtagtggtcagcaatgctgcttccaaagtcgattatccacctcattcagggcaaatggttagcacttctgtggatgaaaacagggcaccgattgaaacacatggagaaccatctactatggagcaagttcctatccaagaaaatagtcaaaataaagatgtggtggtgccagcatcaggtccccaacagtctattaatgtgcatgacattcttactcaacttccagactctgaattacataatctgtgcaatattcttgcacttgagggtcttccggataaagtctatacgcttgctgcggaggtggtaaaaaaattggctagtgtggcggtatcccaccggaaattcttctctatggagctagccagtgctgctcagagcttaagttcttcagcagtagaggagcttgtaacattgaagaacacacaaatgcttgggctcaattcttgttctatggctggggctgccatcctgcgggtcttacaggtcctatctacattgacctcagatatgagtggtaatagccaggatcaggctgtgggacaggaagaacagtctattttgtgggatttgaatatatcacttgagcctttgtggcaagaactaagtgactgtataagcactacagaggcaaaacttgttcataattcaagtttcaatccccaggttcctttgatggatgcaatagaagttggtgcctcatcctctacttccccacctcttcctccaggcacacaacgccttttgccatttatagaatccttttttgttctgtgtgagaagcttcaaacaagccaagcagttgtgccatctgattccaatgtgactgctacagaagtgaaagaacttgctgggggttcatcgtccccatcactaaagactggtggagtatgcaatattacttttgtaagggtggcagaaaaacatcggcgcctcctcaatgtgttcattcgacagaatccaagtttgctagaaaagtcactttctatgatgttgaaagtaccaaggctgatagactttgacaacaagcgtgcttactttagatcacgcattaggcagcaacatgatcagcatctttctgctcctttgcggattagcgttcgtcgggcatatgttttggaggattcatacaatcagttgaggttacgtcgtagccaggatcttaagggccgcttgactgtgcaattccaaggagaggaggggattgatgctggtggactaactagggagtggtatcaacttctatctagagttatttttgacaaaggagctctgctcttcaccactgttgggaacaatgcaactttccagcctaaccccaactcagtttatcaaacagagcacctttcctatttcaagtttgttggtcgagtggttgccaaagccttatttgatggccaattattggatgttcactttacccgttcattttacaaacacatacttggtgttaaagtgacttatcatgatatagaggctgttgatcctgattactacaaaaatttgaagtggatgctagagaatgatgtaagtgatattcctgacctgacattcagcatggaccctgatgaagaaaaacatattctttatgagaaaaatgaggttactgattatgagctcaaacctggtgggagaaacatcagggtcactgaagaaacaaaacatgagtatgtcgatcttgtggctgaacatatattgaccacagcaattcgccctcaaattaatgctttccttgaaggattcacagaattagttccaagggagctcatttccctatttcatgataaagaacttgaactcttgatcagtggacttcctgaaatcgactttgatgacctgaaagcaaatgcggagtatattgggtattcgcctgcatctccggtcatcctgtggttctgggaagtagttaatggtttcagcaaggaggacatggcaagatttctacaatttgtgacaggaacatcaaaagtaccattagaaggtttcaaagcgctacaaggtatttctggtcctcagagattccagattcacaaggcttatggagctccagagaggcttccatctgcccatacttgctttaatcaactggatttaccagagtattcctcaaaggagctctatcctttgccgtacatgtaaataaagaaaaaaaaagaaggggcaatagtagtttacatatttgtcgaaagaaggattgattcgttggtgaaaccctttgctgtgtatctggaatgttattactttgctattattatgttgttaaccatcatgtgtacatgtgtgatcgataatatcgtactgtttttgtact

SEQ ID NO: 19701 - DNA, 3913 bp, Oryza sativa
  ref <308>: DATABASE ACCESSION NUMBER: AK070047
  ref <309>: DATABASE ENTRY DATE: 2001-12-06
gggcagcaacagatcgctcgcctccccgtctcctcgcccgccgccttcgccgatctccatccggcgagcatccctcccgccgccgtcctgctgctgcttccgccgccggaggggagggatatgtgcctgtgaaaaatcggaggaaagggggtataaatctttgaccataatggctgtagcttctgccagtgcactgttttccgccaagaatcttccgcataaaccctgggaggacccgtcattctttaggtggagaaagcgggaggctcatgtgccgttgcgctcacatgacacacctgaaggagccctcaagtattggcatgaacggaggaatgtgaactatcttaattctgactctgctgtttggaatgatgacgcggttcgtggtgccctggaaagtgctgcgttttggtccaagggcttgccatatgtccagactctaagtggatactggaagttccttttggcttcctcgccagaatctgttccagagaaattctatgatgcctacttcaatgattcagattgggaggctttgccagttccctcaaactggcaaatgcatgggtttgaccgtccaatctacacaaatgtcacttatcctttcaccatgaacccgccatttgtgccaaatgataatcctactggctgttataggacggtttttcgcatcccaaaagagtggaaaggtcgaagaatcttgttgcactttgaagctgttgattcagcgttttttgcttgggtaaacggcgttcctgttggatatagccaggacagcaggcttcctgctgagtttgagatcacagatttctgccatccttgtgactcagaaaaggaaaatgttcttgctgttcaagtgatgaggtggagtgacggttcctatcttgaagaccaggaccattggtggctatctggtattcacagggatgttctactagtatcaaagccacagatctttattacagattattttttcaaagcaaccttggatgaaggcttccgtgtagctgatattgaggttgaggtggaaattgactcacaaaagcaggatcgggagcatgtctcaactttgtctattgaagcaacattgtatgacaattatggacctgctgatgttttaacttctgatatgtctgctgctagtgtggccaatttgaagttgaagccagcttcaagaccaaaacactgttatggttttcatggttatgttcttggtggaaaagtagaaaatccaaaactttggtctagtgaacatcccaacttatacactcttgttgttgtccttaaagattccaacgggaagctcattgagtgtgaatcatgccaagtaggaatccgtaatgtcgtcctggcacacaagcagatgcttgtcaatggatgtcctgttgtaataagaggtgtcaacagacatgagcatcatccacgtgttggaaagacaaatttagaagcttgcatgattaaggatctggttttgatgagacaaaacaacattaatgctgttagaaacagccattatccccaacatccaaggtggtatgagctgtgtgacatttttggactttatgtaattgatgaagccaacatcgagacgcatggctttgatgaatctagccatttcaaacatcctacacttgaacccttctgggcaagtgctatgcttgatcgtgttgttggtatggtggagagagacaagaatcatgcatgcattatagtatggtccttgggaaatgaatcttcgtatggaccaaatcactcagccatgtctggctggattcgtggaaaggacccgacaaggcccatccattatgaaggaggtggttctagaacatcctccactgatattgtatgcccaatgtacatgcgtgtctgggatattcttaagatcgcacaagacccttctgaaaataggcccctcattctttgcgaatattcacatgctatgggaaacagtaatggaaatattgatgcatattggatggccatagacaacactgttggactccaaggtggttttatatgggactgggtcgatcagggtttactaaaggaagatgctgatggatctaaaaactgggcatatggtggcgactttggagacactccaaatgacttgaatttttgtcttaatggcattgtatggcctgatcggacaattcacccagctgtgcatgaagttaaatatttataccagcctatcaaaataacaatgatggataacatgcttaagattgaaaacgtacatttttttgagacaacagaagctttggacttcagttggctacttcaaggagatggctgtgctttgggctctggttcacttaatgtcccatccatagcaccacagagtactcatctgatcaatatgaagtcatcaccttggtttactatttggagtacttgtgtcgtaaaagaaatatttttgtccattaacgtgaaattgaggtaccaaacacaatgggccaaagatggccatatcttggcttcagcacaaatttgtttacctccgaaaaaaggctttgtccctcatgcgatagcactgcccaggagctctttggttccgaacgtgttggtgatcatgtactcatcagcaaaagtaatgcctggcaaatcaaagtaaacagtatttcaggaacaatcgatagttggaaggtcaacaacattgagcttatgagcaagggaatacacccatgcttttggcgaacaccaactgaccacgacaagggaggcttctacaccaagccctatgtttcaagatggagagaagcttctctcgacaacatctcgttctacagcagccagttttctctgaaggaattgccagaccaaaccgtcgagatctccaccatctactacggtcttcctgggaatcaaccaaagcctgatgaaacctctctctcagacgaatccgagtccgtcctcttccgggtgcagatgcgcggccggatctacgactccggcgacgtgatcctggactacgaggtgagccccaagaacgacctgcctcctcttcctcgcgtcggcgtcgtgttcaacgccgacaagtccctgagccgtgcaaaatggtacgggagggggccattcgagtgctacccggaccggaaggccgccgcgcacgtcggcgtgtacgagagcggcgtcgacgagctgcacgtgccgtacattgtccccggcgagtgcggcggccgggctgacgtccggtgggtggcgctccaggacgccgacgggttcggcctcttcgcgtcggcctacggcgagtcgccgccgatgcaggtgagcgccagctactatggcgccgcggagctcgaccgcgcgacgcataaccacaagctcgtcaagggagacgacatcgaggtgcatcttgatcacaagcacatggggctgggaggggacgacagctggtcgccgtgcgtgcacgagcagtacttgctgccgccggcgagatacgccttctcggtgaggctgtgcccgttgctgccgtcgtcgtcgtgccatgacatctaccactctcagctaccctgttgatccgtctgagatgggcaagtgaggcaataaagcagagacgtatatatgctcctgtaaactaccggctgcaatgaccaggttgtttgtcgactgtgaaataagcgagcgagcttgatgctattcctcaatcttgactacagtgtcaatttctcctataaatggcaatggggacccatgaccctgatacccgatgggtttttactctattagaagctaattatgttctaactcttatacttatgggtctattgataggcgaaaattcttacccattgggtacgtgggtatggttatattctttacccacccatacccacaaacctgtgggtgaaaaatcccgtagattgagcctaaaactatgaataagataaatctcaactactattaaatc

SEQ ID NO: 19702 - DNA, 877 bp, Oryza sativa
  ref <308>: DATABASE ACCESSION NUMBER: AK070048
  ref <309>: DATABASE ENTRY DATE: 2001-12-06
gggcaaatcaccgccccctccacccggatccctcgcctccgcgtcgccggtctgcactcgcgccgcccccggtcagcccgcgtcgccggtccccatcatcggcggcgccgcccccgatccccctcgatctgcactgcgcccgacgagtttaacccttgcacggctctgctggagtgtgagtgcaagaacggcgccgccgccgagaacacgctgctccgggcgggctacggcgggtggctgctctactcggcggcgtcggcgggggacatggcgttcgtacaggagctcatggacagggaccccttgctggtgtttggcgagggcgagtacggcgtgacggacatgttctacgccgccgcgaggggtgggaacgccgaggtgttcaagctgctgctggaccacgccatgtcgccgaggtgctcgacgaattgtcccaacagggaaggcgcagcagcggtggtggctgctcctcggtgttctggctggaaatgatgagtagggcagtccacgccgccgcgaggggcggcaacgtggagatgctgagggagctcatcgagcgtcgctccgacgtgtcggagtatctcgacttccgtggatccaccgtgctgcatgctgttgcaggtagagggcagctagagtcgaggcatctacttcttggccattgcttacttctgtaaaatgcttgatacagtaaaatttttctttgtgccaatatggatgacaaaggtagatcctcatttcatcagaatgtttgggtgaaatgtttccatacccaatatcttttgacgttatgaaacccattttgcctttagatgcgctgcaggttattatctggtaatcgatttcaacatgaatattaaagttgctcttgatcatg

SEQ ID NO: 19703 - DNA, 1477 bp, Oryza sativa
  ref <308>: DATABASE ACCESSION NUMBER: AK070049
  ref <309>: DATABASE ENTRY DATE: 2001-12-06
gtgaaaccgatccacagcagtgtgttccttccgctgcattcggttctgatagtctcaagaatgatttggaacataaaactcaaaagcagctatatcctggtagccgtgctgaagtcctatcacaggacagcggtataaggggctgctggtttagatgctttgtattaaagaggcgcggagacaaaatcaaggtgcgatatgaagatcttcaggatgctgatgagacaggaaatctggaggagtgggttttgctaacaaggattgctaaacctgatcagttgggtatacgcatccctgaaagaccaatggtgcggccatatcatgtacatagcaaggatccatgctctttcgatgctggttccattgttgatgcatggtggaatagtgggtggtgggaggggattgtattgcagcagggaaatgacagacgccttcaagtttattttcctggagaaaagcagattgctgatttttgtgaagatgatttgaggcattcacgtgagtgggctggtggcaaatggaattccttgggggaaagaaaagatatcacacacctgttgccccccacttcagttcatgaagagggaggtttgcttagcaaacctgtttcacaagaaggcaatccctcttcaaaattagaatctgacaagaggtgtgatgacaaatcattgggcaccaagatttcacatgatcagaagcatcagaagcgtgttctggctgatctcacaaatgctctgaaattcgataacctgaaatggggccaagaaagcggagcagaagatctggttccaaaaggcagtcagacactagcagtggcagtggcagcagcagccagggcgacatggaggagtccagcccctgcggaagttttgcagtgcttaattcagcgcccgatgaagaagtatgcaagagcagtggagaacctcttttcatgagggtttccaacctggtgatgtccagatgaagtcactccacgactgacatgttttagccttttctttccggatttcaacagccttggcgagatgtgagtttgatgcatccccaggttatttagtcacaactcacaactggtatcctgatcatcttgagagctctgaatgcttattcgctcggatgtccaggatgcaagcatggaggagcacactgttgtatttatgactgatctagatgagttttaccattttgtctcactttagggtcttgtagggtgttttaaccgtcttgttgtttagttggtgttacaaagatagctggctcattccacctcggcagtttccagagtcccttttttgtctttgtttcagcagtccaatatccaatttaatttgttcatcagctgttatagatgttcttatagtatactctctgaaatgataatatttacatcgtcatacgagttttttgttcttctgcctatgtggtgttatttgtgtgaatttattggtctataattgaaattgagtgtattgtcttc

SEQ ID NO: 19704 - DNA, 1583 bp, Oryza sativa
  ref <308>: DATABASE ACCESSION NUMBER: AK070050
  ref <309>: DATABASE ENTRY DATE: 2001-12-06
ggtgtacgccgtgcgttattctccttctctcctccctgtacctcctccgtctcttcgtcgacgcccgccgcaacctgccgccgggtccccgcccgcagccgctcatcggcaacatcctcgacctcggctcccagccgcaccgctccctcgcgcgcctcgcggggcgctatggcccgctcatgacgctccgcctcggcaccgtcaccaccgtcgtcgcctcctccccgggcgccgcccgcgacatcctccagcgccacgacgccgccttctccgcgcgctccgtgccggacgccgcccgcgcgtgcgggcacgacggcttctccatgggcatgctcccgcccagcagcgccctgtggcgcgcgctccgcagggtgtgcgccgcggagctcttcgcgccgcgcagcctcgacgcgcaccagcgcctccgccgggacaaggtgcgccagctcgtgtcccacgtcgcgcgcctggcgcgcgacggcgcggccgtcgacgtcggccgcgccgcgttcacggcttccctgaacctgctctccagcaccatcttctccgccgacctcgcggatttcggcgacgcccgagctgagtcgtcggtgggggacttaagggacttgatctcggagttcaccatcgtcgtcggggtgccgaacgtgtcggacttcttcccggccgtcgcgccgctcgacccgcagcggctgcggaggcgggtggcgagggtgttcgagcggctgcaggccgtgttcgacgggcacatcgaacggcgcctgcgggaccgcgctgccggggagccgcccaagaacgatttcctggacgctttgctcgactaccgcagcccggaggatggccggggttttgatcggccaacgctacagtttctgtttacggatttgtttagcgcgggaagtgatacaagcgcagtaactgtagaatgggcaatggctcagctgctacagaacccaccagcaatggcgaaagctcgtgaggagcttgctcgagtgattggctccaaacaagaaattgaggaatccgacattagccagctcaagtacctcgaagccgtcgtgaaggagacattacggcttcatcctccggcgccatttctgcttcctcaccaagccgaaacgaccacacaggttggtggctacacggtgcccaagggcacccgtgttctggtgaatgtttgggcgattggtcgggacagcaaggtgtggtctgaccctgacaagttcatgccggagaggttcctgcagagcgaggtggacctgcgtggccgtgacttcgaactgattccatttggctctggtcgaaggatctgtccggggttgccgctggctgttcgcatggtgtacctgatgctcgcgtcgttgctgcaccggtttgagtggaggcttctaccggaggtcgagaagaacggggtggacatggcggagaagttcgggatgatactagagttggctacgccactccgggctgttgctataccagtttaataagctgatcatcaccatatgctaccttgctacatacaatccgttatctttaggaatggaacacttcactggtaaataaaatcatatactagt

SEQ ID NO: 19705 - DNA, 1646 bp, Oryza sativa
  ref <308>: DATABASE ACCESSION NUMBER: AK070051
  ref <309>: DATABASE ENTRY DATE: 2001-12-06
gacacgcgcacacgacacgacgcaccaatggcgctcgtctccgcctcctcctccaccaccgccgtcgcggcgctccccggcgccgccagggcctcctccttcctcggcggcgccggcaggagcggcaggctgctgctgaggcaggccgagtcgtcgtccgcgcgggcgtcgttcgccgtgcgcgccgcggcgcccgacaggccaatctggttccccggcagcaccccgccgccgtggctcgacggcaggtcggtatatccatcttacctctcttgctcgacgcgttcacacacactctcgctctctactgacatcgtatacttgccattgatcttggcgcagcctccccggcgacttcggcttcgaccccctgggtctcggtgagccctcatcttcttcctagctcgtcgccggcgacgccgccgccgcctctggacatgcgtactgacatatgtgtacatgcacacacgcaggatcggacccggagagcttgcggtggaacgtgcaggcggagctggtgcactgccggtgggcgatgctgggcgcggcgggcatcttcatcccggagttcctgaccaagatcggcatcctcaacacgccgtcgtggtacaccgccggcgagcagcaatacttcaccgacaccaccaccctcttcatcatcgagctcatcctcatcggctgggccgagggccgccggtgggctgacatcatcaagcccggctgcgtcaacaccgaccccatcttccccaacaacaagctcaccggcaccgacgtcgggtaacacacaccgactcactgacaccatggaagtgtgtcacgagcttgttcgaagacgtaattcaagtggctgaaatacgtgttcgtgtgttggaaacgtaatgttcaggtaccctggtggtctgtggtttgacccgctcggctggggcaccggctcgccggagaagatcaaggagctgcgcaccaaggagatcaagaacgggcggctcgccatgctcgccgtcatgggagcttggttccaggcagagtacaccggcaccggccccatcgacaacctcttcgcccatctcgccgaccccggccacgccaccatcttccaggtccgtagtccataaacactattgcatattagtttatcttgttaaaattttttataaccatttagttgacgtgtaataaacgagtggacgttcacccgagtgattaaaagagtttcagtttcctatacgcacctctcctgcaacctgaatatctcatcagagataccacattgattcagtcactaatttggtgatgtttgtgtgtgaatttcaggccttcacccccaaatgaggagttcttcaggtgttggagtgttagcaatggctgccaatggaggaagatgaaaagactgttcgtcgacgcgacttacctctcttttttgggatcggagtaggctgtgaatggtggtggtgtattgggatgtaattgtggatggagcactgcatgccttgttgattgtgtacctgtactatgatgtaaccgatgtaaaaaacaagttgatactcttttagaagtgaaattctcttcatcactgaatcagagttgtgatttatgtagcagagtagtaccgtagtagtaggctcagtaatgttgatgagatcatgatt

SEQ ID NO: 19706 - DNA, 1007 bp, Oryza sativa
  ref <308>: DATABASE ACCESSION NUMBER: AK099124
  ref <309>: DATABASE ENTRY DATE: 2002-08-28
ggtctccgcctccgtcgcctccatctcgccgcgatccctctccccggcgatggccgccgccctccgctcctcctgcgccgccgcgcgccgtctgctccggatctccccggcagcgctgtccaccctcaccgccgcctcctcccgccccgccgcggtggcgcccctcgcgcgcccgatcgccgccgccgccgtctcaggtggcaacaatgccttttcatggaacttgaggcgcttgttcagctcaaatgaaaagcatctgccggcgatatctgacccagaagttgaatctgcgtttaaggatttgatggctgctagctggactggacttccagattctcttgtaattgaagcaaagaaagctgcatccaaagctacggatgataaggctgggaaagaggctttgctaaatgtatttcgtgcagctgaggcatgtgaagaatttggtggagttctagtcaccctaagaatggctctagatgatctttgtggtataactggtgagaatgtgggccccttgcctggttatatagaagatgctgttaaatctgcatataagcgttacatgaaatatctggaatcatttggcccggaggaaaattatctacgtaagaaagtggagaatgagttggggactaaaatgatacacctgaaaatgcggtgcagtggtgtagggtccgagtggggaaagatcaccctgattggcacctcaggcatctcaggatcctatgtcgagctaagggcatgaggaaagtctgcagatcataaccatggcagaacatcgttttctgagggaaggatgcatatcagaacaaggtgttccgtttctcttttttcttcttactgtgtagctaccttgccaataacaaggagatcatcaaacagatgtgcacttaaagtaattcagtgtgctccagaccttcctgctgtaataagaacgtgtttctggggttcacgtcgatttgtttttgctccagtcatggtggtgcgtgaagcatgtagattcagtt

SEQ ID NO: 19707 - DNA, 1888 bp, Oryza sativa
  ref <308>: DATABASE ACCESSION NUMBER: AK070052
  ref <309>: DATABASE ENTRY DATE: 2001-12-06
gtccgatccggcggcgatggcgtcgacggcggcgaggcggctacgggagctgcaggggcaggcggggaacaagacgtgcgtggactgcgcgcagcggaacccgcagtgggcgagcgtctcgtacggggtgttcatgtgcctcgagtgctcgggcaagcaccgggggctcggcgtgcacatcagcttcgtccgctccgtcaccatggactcgtggaccgaggcgcagctccgcaagatggaggccggcggcaacgaccgcctcaacgccttcctcgccgcgcggggcgtgcccaaggagaccccccacgtcgccaagtacaactccaacgccgccgccgcgtaccgcgaccgcatcgtcgccgtcgccgagggccgcccgtggaccgacccgcccgtcgtgaaggagacccccggatctggcgcgcccgcccccaccaggaagccacccttgcccgccggaggcggcggcggcggcggcggcggatgggatgactgggacgacgatttccggcccgacatgaggaggaaccagtcggtggggtcgttcggtgagtcgggggcggaatcagggaggcagccgccgaggtccaaatcgacgcaggacatgtacacgaggcagcagctggaggcgtcggcggccaacaaggacagcttcttcgccaggaggatggcggagaacgagtcgaagcccgaggggatcccgccctcgcagggtgggaaatacgtcgggttcggctccagcccggcgccgtcggcgaatcggaacggcgctgctgctcagggtgatgtcatgcaggtcgtctcccagggaattggacggctttcactagttgcagcatctgctgcccagtctgctgccagtgttgtccaagttggcacaaaagagttccaatcaaagatgagggaagggggctatgatcagaaggtgaatgaaactgtaaatgttgttgccaataaaaccgcagagattggaagtagaacatggggaattatgaaaggggtaatggcgttagcgtcacagaaggttgaggagtatgccaaggaaggtgggaatggctggggggatgattggcaacgcagggagcagggcagtgagccttaccataggtttgagcgtgagaccaatggtaatgggtggaattcttcttctcatgatggttcatcaaagaattacaattccaattcctgggatgattgggatgagccagtcaagaaggatgagcctgcgaaagaacgccaaagcagtgactcctgggccggctgggatgatgggaaggatgacaattttgatagttacaatcacagcacccccagcaaggggagcaatcagaacggaaccaccggtggctcctattggacggaaggcggcttccgctgaggttgatttctttctagagatatattatacttggagaagttatatatgccagaaagtgtgagcgtccgatggtccgtatcattcaggatactaaaagggtcaagtaaaagagtttgtgtttttgtacgttgtttacaactatgtctagtggtatgttccggggtcaatggggctcatctgaaactgtcatcacaattactaagaaatgtcaaattgaaactgtaatctacacaaacttcctctcatattctttattgtttcaactgcttttttttttcttttttccttttttcttttttgtcttggacctcctacagctgtatcagctcttccattatttgctctagttgatagtctgtccaaaaggccagtgtgtaacatgttccatatcggttggctgtgttgttatagtgcttttctttgtttggcgccaatccacccaacttgatgaggcactgataggctttacgtcctttgttattgcctactttctcgacatcttttgatgcc

SEQ ID NO: 19708 - DNA, 3061 bp, Oryza sativa
  ref <308>: DATABASE ACCESSION NUMBER: AK070053
  ref <309>: DATABASE ENTRY DATE: 2001-12-06
gtctattttattttgtatgtgatggaggaaaaatcattaggagtagacttggaggtctggacataagggtaatcaagactcttcttgagataagtgtggagcattcgtgggcaaaagtagtgcacagcaaacttatttgcatgctgacaaatatgttgtatcaagtatctgatggagctccaaacggtgccattgatacacattttcttcctgaccagatagatcgcgttggtggagttgactatatctgtctcgagtattcacgagccaactcaagggaggagaagcgggatttgttctttgttctatttgactatgtattgcatcaaataaatgaaacattcttggctggcggcctttcgacctacacttatgatgatgctcagccccttgcttcccttcttgcatgtgctgatgctccagaggccttctatatttctgtgaagcacggtgttgaaggcgttggagacatgctgagaaaagctatatcatcagctttgtcacagtcaacagaatatgagcagttgaatgtggtattatgcttttgacttgtgtgttactaatatatgttgcacgcttaagaagctaagagtagacattacaacacttttgttgagtttctatttcatgtcactaaaccacaaatatgcacaattgtgtgtaatgggaaactgtatccacaatcttcatagcttctaaaatcaactctattatgtgatttcaacaaataatgatccatatacatgcacaattgcacctaaaaagcaacagttgttgccaacaaataaaatccccatgctatttgtattacctggtattgcagattgctgctatgcacgtttcttctgtttgttggacttcatttgtgtaattgacacgacaatgcaatatacttctcttctgtatattaatattgtagtatgttaatgttttcttctgtataaagtaaggatgttttattctgtataaagtaaggactagggacagtgttggcgacgaacttgaagcagcacattatttttttaaaaaaaaaatctatttatgtgtttattcagattgattctcaatatttgtagcttctggacaaggttatcaggaaacttgatggaacagtcagcacattttctaggattgacactgagtttgcttatatgatccaagtaacaaaatcttacaagtgtttcagcagcattagagatggacatgaagatgctgatgttgcacttagagcaaggctttgctgggctactttgcactcacttcttaactcgcagatttcatcatataggcatcatggatatatttggttagttgaattgctcctttcagaaatcagtgaggaaacagatggttctatatggtctaaaatccaaaagctccaagacgaaattgaagttgccggaagccaagatttgtcatcctcagaagtttcattgcctgtttgtctgctatgtgggcttctgaagtcaaaacataacttcattagatggggatttctatatgttctggacaaatttttgatgcgttgcaaattattattagatgacaatgacatgcaagagcacacagttgctgatcatagcaaacatcgcctggacaaagcttttgcggttatagatattatgaacagtgctttgttgcttgtggtccaaaataatgagacagaccatattaacatcttaaagatgtgtgatatgttgttttctcaattatgtctgagactgccatcttcaaatgtgatgcatatgggtgggcttcaatcccttggtcaactttttggttgtacaactaagaacatcgagagccatctggaaactcttgcgtcgcatcaaaatgttggaaacaagaacttttgcaggagtgagacattgcaagacataagcgtaaatcaaactgctcaaaccactttactctccgagacatcaatggcagcactacttctgagaggccttgcgatagctcctatgcagcttgtagcacgcgtaccaacttcattgtttttctggccattgatgcaacttgaaggggcagctagcgatgatattgcattgggtattgctgttggtagcacaggtagaggcaatctccctggtgctacgtcagatattcgagcagcgcttcttttactcttgattggtaaatgcacagctgaccaggaagctcttaaggaagtagaaggcaatgaattcttcaggggtcttctagatgatacagactcaagggtagcatattattctgctgcttttctcttgaagagaatgatgacagaagagccagatacctaccaacggatgcttcaaagtctcatctcaaaagctcaacagtgtaacaatgaaaaactgctggagaacccataccttcaaatgcgtgggatactgcagttgtcaaacgatctaggagttcaataatcactcgaatgtgctatttctgtggatagaagcatgggctagaattggtactttcaactatgctcattgcagtataataatctgtggctgtgttcctctgctccaaactatgaaaaggatctgaatcacctgtcacctgcaagctgattacaggatctaagcgttgtggctacctcaatgaagtatgactaagtttgggcgaggtgcgcataaatgcgactctgcaattttgtagccaaccattaagattgagccagcgcaagtttttgagagggatgctgggatcaataatagtatgtgtgtttatttgcagcgttgttccaacgaaagtaacaagggtgtacatgtttgcatgctagtgttatttgctacctggaagaaaccaaaccttgcagatatcagtgaacttccagacaacttattattgttttcttctttttttttggaaaaattaacttgtgattcttagattcgtattgagagttaacattgtaaatgcgtagggtgaaacagaaaaattttgcttatggtaattgaatagtacatctcctgtacaatatggagtgtaaaatttactgctaccattttgttagttgctagtattatgcacacgtgtcgcactttttgagatatatttgatcattcgtctaatt

SEQ ID NO: 19709 - DNA, 1246 bp, Oryza sativa
  ref <308>: DATABASE ACCESSION NUMBER: AK070054
  ref <309>: DATABASE ENTRY DATE: 2001-12-06
ctctctgctcctgctcatcatcttcttcttctccgctctccctaatccaaaaaaaggcggctgctttggtcgctcgctcgctcgcgcggacgttggaggagaagcagctaccgggatggacgccatggccgtgctcgcgaggacctcccgccccgccccgaccctcctcgccgcgacctcccccgcggtgtcccggcgcccggcggccgtctccttcgccgccgccgcctccccggggtcccgcggccgcgtcgcgctgagcgccgcgtggggcgggagggcggccagggggcgcgtctccgccgccggccgcatcgtcgcgtcgtcggttgagcaatcctatattatgatcaagcctgatggtgttcagcgaggcctggttggcgagattatttcccgtttcgagaagaaaggctttgtgttgaagggcttaaagctttttcagtgccccaaggacttggcacaggagcactacaaggatttgaaggaaaaacctttctttcccggtctgatcgagtacataacttctggccctgttgtttgcatggcttgggaggggaatggtgttgttgcatcagctcgcaagttaataggagctactaatccccttcaagctgaaccagggaccatacggggcgatcttgcagttcaaacaggaaggaatgttgtccatggaagtgacagtcctgataacggcaagcgtgaaatcgctctatggttcaaagaaggcgaactctgcgaatgggaatctgttctgacaccatggcttgtagagtaatgctcccagatcagtgcaagaactggatgcagtgcttgttcttgatttgaggggttatgtatgagttcagatcagcagagtaaagtagcttataccaaagctcggccttctcatgactgtacaccctgacattccccttttttgtaatacccaacattcccttttttgcgtttgaccgattactctctgttgtcaaatctcctggcatgtctgtaattggttcagaacaataccagcaaagctccaacttccaagtcattatgcagatgaatgcgttcaaaattatctcaggcagttgaccgatgactgattgtcactgttgtactatagctcccagcagaggtgaactcgtgcagagttgcagagttcatttggctgatgagccatatcttgatcagcagttatgaaattgtcaccgtattggtgttcaacccacaaatgaggaggctaagggatactcgtttgacc

SEQ ID NO: 19710 - DNA, 962 bp, Oryza sativa
  ref <308>: DATABASE ACCESSION NUMBER: AK070055
  ref <309>: DATABASE ENTRY DATE: 2001-12-06
ggcgctcgtcgccacatcgcttgcttccccgtcactcccactatttcccactcgtcgccggcggcgagcgagcgagcgatgatctccgcgtcccggacgcaaaccccgctcccatctccatgactcccgcgaaccccaccccgctcctctcctccccacgccccaacccttccctccccctcccccgccgcgcccggcgcccccacccgccgccggcggccaacaccaccggcgcggcctccacgccggactggttccggcctagggcgccgcccgacgcggacccgtcgacatccggcggccgcgtcgccgcccgggatcccggggtgcgcgtcagggccagggagggcgcggaggaggagaagaaggggaggggaagggggaggaggagatggtgggactggtggtccggggacagggagagctacctcgtcgacgacgtggagccgctgccgctgccgttgaccgttccggacaccgagccgatgtcccgcgaggagctcgaccgccgcctcagctgcgacgtggagatcgaggattgcaagactgtctcctacgagtggacgggcaagtgccggagttgccaggggacagggctggtgagctatttcaggaagaaggggagggagaccatctgcaaatgcgtgccatgcgctggcattggttatgttcggaaaatcacatttcgccaggacattgaaaacatggatgagttagacaatgggaaaccaccatagtttgatggccctgttcgcttggcagctgtcatttattaactgctgctggatagattgtgttcacaacttggacgatttaaccagtgattctttctgttacagtcaggcacggtacatgatgaggtgccatttttaagtgttgtaaaccattatctgctaataattgtactcctttgttcttatcattatagttgataaagaaaaggaaagaaattatttcaagtc

SEQ ID NO: 19711 - DNA, 1290 bp, Oryza sativa
  ref <308>: DATABASE ACCESSION NUMBER: AK070056
  ref <309>: DATABASE ENTRY DATE: 2001-12-06
gatgcataacattcaggttcaggagcagcagttgggagtagctagctgggacaacaatggccaggagacagggagttgcttctatgcttacaattgctctgatcattggagcatttgcttctgctccaacaactgtgcaatccatcggcgtgtgctatggcgttctcggcaacaacctcccgtcgcggagcgaggtggtgcagctgtacaagtccaagggcatcaacggcatgcgcatctactaccccgacaaggaggcgctcaacgccctgcgcaactccggcatcgccctcatcctcgacgtcggcgaccagttgtccaacctcgccgccagctcctccaacgcggccgcgtgggtccgcgacaacgtcaggccctactacccggccgtcaacatcaagtacatcgccgtcggcaacgaggtggaaggcggcgccacgagtagcatcctcccggccatccgcaacgtcaactccgccctggcctcgtcgggcctcggcgccatcaaggcgtccaccgcggtgaagttcgacgtcatctccaactcctacccaccctccgccggcgtcttcagggacgcctacatgaaggacatcgcgcgctacctggcgagcaccggcgcgccgctgctcgccaacgtgtacccgtacttcgcctacagggggaacccgcgcgacatcagcctcaactacgccacgttccggccgggcaccacggtgagggacccaaacaacgggctcacctacaccaacctgttcgacgccatgatggacgccgtgtacgccgcgctggagaaggccggcgccgggaacgtgagggtggtggtgtcggagagcgggtggccgtcggcgggagggttcggggcgagcgtggacaatgcgagggcgtacaaccaggggctgatcgaccatgtcgggcgtggcacgcccaagaggccgggggcactggaggcgtacatattcgccatgttcaatgagaaccagaagaacggggatcccaccgagagaaactttgggctcttctaccctaacaagtcgcccgtgtatcccatccggttctaagtcagatgctgcatcggatcgacatagcagctactgaaagctcttgctcgtatgcatccttaaaattaactgtaaactaaaaataagctagcttcaagcagagcagtagaaataatcaatcagtaataaagtgtgcagcacgtatggtgtgcctgcgattctcaaattccagaattaatagtgtattatgccatgagtaaagtgaagaaaatgtttttttccctaatcg

SEQ ID NO: 19712 - DNA, 3467 bp, Oryza sativa
  ref <308>: DATABASE ACCESSION NUMBER: AK070057
  ref <309>: DATABASE ENTRY DATE: 2001-12-06
gacactctccctccgctctctcgccgccgtcgccgccacgcgctgccacctccgtctccccctcgcgccaccgcgtctactgccgccgccgccgccgcgtccaccgcagccgcctcgggcgggtccacctctcctccaccgccgcgtccacttccgccgccgtcgccgcgtccaccgcagccgccttcgccgcgtccacctccgccgccgccgcgtccaccgcagccgcctcggtcgcgtccacctctgctgccgccgcatccatttccgccgccgctgccgcgacgctgtctccgagcgccgtcgccatcatcgaggcgagcagccatctcgagcgccgccgctgccaagtgcctcctccggccgccggcgtccggatccggactccatgtggtcgggagacgtcgatctgaccggcggatgtgacgaggagctcggccgcgccacacggagctcaacctcggcggattgggcgacggcgtcggcctcggcggtgaaaagtctctgttgctgctgccgccgtcgggcagtcaaggtttttcctgccggtagagtatggaaaaagaatcttccatgtgctagggcaaggaagccttttgtagtcagctctctagacttgcttatgcttctgcagtgagcacccagcaataggtaaatctgctctcttggttctctgaattaaaaggacatacaactatagcatgatgatcttgcaggaaattatcatgtcttttcagcaagattgctctatatgaatcgagttgtcgaaaaaggtgccatttagtccacgggcttcacgaaaatcagtgtttcaaagaaacaaaccttgaaacattccatggggttctcagatcgcggatggcggcggccaccaggcggatgtggtcaagggaggactggcagcgctgagcaacgacgtctaggaatagcatctcaggaactgctcctgcacccactccccaatcgcaacgcgctggcccacttccactcctctgcgcatccctctgctgccaacggacgctagcaacatgtcaaaccccaaggccatcccccagctgtgcaagtcactgactttacggtattggagttcgagtagaagatcagctgctccgtcatcgacgatggcctgatccacagatgaattttggtgctgatacttccagggagttgggtgctcgaagttcagaaaaagctgctaggtggatcaggacaatggaatctgccttaaagcccccaagaaaggatgaacttgttagctgttcacatacaagatggcaagcttttaggctaagccgctgcagtaaccgcatgcactcaataggttggactgtattttcttctgtccataacgatcctatggcatctgatgttattgcaccttctccatggacaatatttgactgtaaaaatggcaaaagatggtggttcagaggggaaggtaattcttgtatgaaacaaaggttgcatatccttcttatgacgattctagcaaggtcggtattgccatgggtgccttggagcttaatcatttgcctgattctcagcatgcttgtctgaaaagcagattgacctgagtttgtgtgctatagctgatgatggaattttttttaaaagtaatatgattttaatggaaaatcgcaaaactataggtcagttaggcgaaatcgcaagtttagcaccctatcgaacaaccgtggttcgacaaggtacctatcgaacaaccacagttcgatagggtacctgtcgaactgcggtagttcgacaggtgattaaaaaaatcaaaaaaagagaaaaatcactgttgcacactgttcacaataccctatcgaactaaggcagttcgatatgtgtctgcgagcactgtagcatcactgttcacgcaaccctatcgaactttggctgttcgatatgtccctgcctagcattgtagtgatactgttcatgtaattttttatttgtttttggaccacctaccctgtcgaactgacgcagttcgacatgtacctgtcgaactgtggttgttcgataggtatccctgtcgaaccgcggttgttcgacagggtgctaaacttgcgatttcgcctaactgatctatagttttgcgattttccattaaaatcatattgtttttaaaaaaaattcctgatgaacttcctgaccccactctccgtggacgaccaccgtgcctccttgcggtcttctcatcgctctctggtggaggtgatccagcacgcttgaacggcagtgatgtcaacaatgaccgtgtgtggacatctgatccccctccctatacacaggtagaaccaatttttcctttttctcttcctgctgcctttttatgttaactgaatttatgaagcaggaatttgtttgaatacatttgttgtcataattccaatttgataaatacataaatggattctacaattgacataaatatgtgaaaatatgaacagggagttggggcttcagacaaatgatgaaatgagtgtgtgtgtgtgtgtgtgtgtatttatgataatgaaaccagtttgctgcagttgtcagataaggtgtagattttggatattctctctttgcaactgctttcgatttctgtataattttttttgtctgataagaaaaactgaaaaaacaagcctctaggttcagtttcagaactgcatggtacaactgttccacagggttgcaaaatgcttagatgattttgacttacaaataagttctttccaaattcacaattctaatttgaagtgggcatcgagtaatagttgttcataaattgtttctcctctgtgtatcatgttcagctttaatatttgcaactatctgttcctaaaaatgcttgtagtacatgatttaaaaaattaacatgttttttctagataagggggatggcataagatttccttcatgaagtacttgcagagctatttatttatcagttgaatttgctaaaaaagaaacaggttaaattcagactgttaatagatacaggatttattgatatatgttgttgtactctacgggctcagttacccacataaacattgtagtattctgctgaacctattacttgaattctgaggttgcaacttctcaattgattctctgaagcctctgactatactatgactaacttaaaataatcttacttggattgtctctgtgttgctaggataaggacaccaatgaggcaatgaaaggtgaggttgatgttctttgtgttggttacatgatgagatgcttgagactgaaaatcatcatctcctattttgcaatttttgtagttattttcaggtattctcttctgccctataggctgataggttaatgtttccagctgtcagaacaaacaaatcagtagttcttgatgtatttcaattagaaccttaattttccattttaccatgaggatcccatgtgtttcttttccttgatttgtaccattatttccagaattgtgc

SEQ ID NO: 19713 - DNA, 1619 bp, Oryza sativa
  ref <308>: DATABASE ACCESSION NUMBER: AK070058
  ref <309>: DATABASE ENTRY DATE: 2001-12-06
gagttgcgtggttctactggaggtaccggagcttcaacaattctaagctaagtgccgaccgttcgaaatggtcattgacatcattccacaagctctcattcagcgagtatgagatcctggattgtcttgatgaggataatgtgattggtagtggcgcatccgggaaagtgtataaggcagtgctcagcaatggtgaggtggttgccgttaagaagctttgggggttaaagaaggggacggatgttgagaacgggggtgaaggatccacagctgacaacagctttgaggcggaggtgaagactcttggcaagattcgccacaagaacattgtcaagctctggtgtagctgcacgcacaatgacaccaagttgctggtgtacgagtacatgcccaatggtagcctaggagatgtgctacacagcagcaaggctggtttgctggattggtcgacgcggtacaagattgctctggatgcagcggaggggttatcctatcttcaccatgactacgtccctgcgatcgtccatagggatgtcaagtcgaacaacatcctcttggatgctgaattcggtgcccgtgttgcagactttggggttgccaaagtggtagaagccactgtccggggccccaagtcgatgtcagtgatcgcgggttcatgtggttacattgcacctgagtatgcatacacactccgcgtcaatgagaagagcgacatatacagcttcggagtggttcttcttgagctcgtgacagggaaaccgccagtcgatccagagttcggcgagaaggacctggtgaagtgggtgtgcagcacaattgatcagaagggggtagaacatgtcctcgacagcaaactcgacatgaccttcaaggatgagatcaacagggtgctgaacatcgccctcctctgctcgagctccctaccgatcaaccgcccggcgatgcgcagggtggtcaagatgctgcaagaagtgcgcgccgaggccacaaggccaaggctggagaaggacggcaagctgtcgccatactactacgaggacacctccgatcaagggagcagcgtgtaaaggtaaaaacccccaaaagagaagaagatgacaataggccaatagctgcttccatgaatcttctcccatggcttgtagagctgtagctaggtaggaaagctgcaatcataacccagtcgtgtccaaaattctatagttgctgattttgagcgctgaatttgctcgccgccgacgccggcctccgacagcacggttaactctggagctgtgcactccagtccggcaatggaggacagtaagctggtgggtgcccggtgttcttggttgtccttgctgtatgtggaccgtgccattgatgccggtagggcagatcgctcgtctgctgtccatcgagagaagaaaagtctgtgacggaatcaaatgtaggtgtgtactgtaattagtactgctactttgccttttctcctgagataagctaggagtattgttcaaggctcatggtgatggcccatggggtggttggatcaagtatttcctgctcttcaactcagcaggagagatggaaatactaatgcaaacgagtgaatgaatgaatctgacctctttattacg

SEQ ID NO: 19714 - DNA, 1896 bp, Oryza sativa
  ref <308>: DATABASE ACCESSION NUMBER: AK070059
  ref <309>: DATABASE ENTRY DATE: 2001-12-06
gggtgaaacttcggcaccagtcctctcaactatcccatctcctttgcagatgaggaaggagacgcgagcgagcaccggagcagaagccagaaggagagatggcaacggaacagaagcccgtcgcaccttgacgtacggcgggcggcggagcgcagtcgcatgcgagctgctcatcgccgatggccggaaacgaaggccgccgcagccagccatccatccatccatcttttggtcatatagcaacactgcacaccaaccggcggtggtgcgttggttcgattcttcaccgccgctcctcgctgagtgacgcggtgttgaaaggttcggtttcctcaatcgagagaattccagatgttgaggttaattattccctttccgtttgattctcaaagctcccaatttgaaaatttctgtatgcaaaatatgtacgtatatatatacctgatctggtagttgagctaggagatcttgtgcttgtctcagttagataattggatggaaattttgattttgcaggtataggtcttaccctgtaggttttttcgctcctacagggtaggtcttgagtctggtatgagacaaaattcaggaacagggacgcgcaagtagcgagaagttgttaatgcagagggacatggattttctaaccttagatcatgcctcatccattcgttttggatcggtgttcccaaattgatcactgcagcctgcgagggaaaatgccgagaatttatttcccttagactgcagtgtaagttaaagtaacaagtaatttaattatcaaacgggtggactacacgacgcgaaaagacttctttattagattagtgaagtcaatgcctcaatggtcaagagccttggggaagacgtatatatggatgatgcttccttgcttcgtaagatcgcaagagtgtacgtacgcggtacgtgtctaggctgtttgtatatagtattaagctaaacaaattaattaagtttgattcgctactttgaaaacataaataaacggatagtcatataatacaagtcaaaagatttgagtcggtaatatatgactgctcgaggcttgaacaataagcattaattaggcgacatatataatatggccgggagacgcgacctgcggagctagctgccttaacagaccatcgatcatctgttgcggctggcaatggcttcatggctggcctacgtatggtttggcttcttgacgctcaactcgctactagccatctacaggtcgcacggagatatcgccggcatagccttcgtcgccacgtcgtacctcagcctcctgctgctgttctggtgcttgcagcaatacgagagggcgccggcgaactcaccggcgaaatctcgctccaaggccggcgtctggttctcctcgtctctcctcacggttgtcttctcatggcgagtttcagcgttgatgccgtggcctgtggcagccgccgtttggttgatggctgcgtccacggtggttggaggattctacacactgttcctttggtctggtcggcagtagatggaagaatatatatatcacgtcagataaaacttccaaacggtgtttgattatttgtagcttcaaaagctccatacgtacgtgctgtttggcggcaaaaggtttacgttacccaacctaacaaacagcagtgtttatttgtgataccttaattcatattgttggaaagtaccaaaaaaacatagatagttgaactgtaccttgacaaatgatgtaaaaacatggtgttgtaaacctctagattattactattgttttttgtgtttttcttttacagtatagtctattagatgtgatcatgtcctatactttatatgggaaataatgtatctattatgtaaagactacaatgaatatatgttttagtttgc

SEQ ID NO: 19715 - DNA, 1882 bp, Oryza sativa
  ref <308>: DATABASE ACCESSION NUMBER: AK070060
  ref <309>: DATABASE ENTRY DATE: 2001-12-06
gcgtcgaccagaagtggaatattgaacggtggaacgcgtacttacccacaagttaggtgcatgccatggcaccattcatggcgtgcgcctcgccaccggtactcacgctggccctgctcgcgtcgtgcggtgcccttctcgccacctccatgctcccggcgcgtgcgacggcgggcagttgcttggacgtcggcgacatggtgatgatggacaggttccgcgcttggcagggagctcacaaccggtcgtacccgagcgcagaagaggcgctgcagcggttcgatgtgtaccgccgcaacgcggagttcatcgacgccgtcaacctgcgcggcgacctcacttaccagctcgccgagaacgagttcgcagacctcaccgaggaggagttcctggccacgtacaccgggtactacgccggcgatggccccgtggacgactccgttatcacgacgggtgccggagacgtcgacgccagcttctcctaccgcgtggacgttccggccagtgtcgactggagggcccaaggcgccgttgtgcctcccaagtcccaaacgtcaacatgcagtagctgctgggcgttcgtgacagcggcgaccatcgagagcctgaacatgatcaagacggggaagctggtctctctgtcggagcagcagctggtggaatgcgacagctatgacggcggctgcaacttagggtcgtacgggcgggcgtacaaatgggttgtcgagaacggtggcctcaccacggaggcggactacccgtacacggcgcggcggggcccctgcaaccgcgccaagtccgcgcaccatgccgccaagatcaccggcttcgggaaggtgccgccgcggaacgaggcggcgttgcaggccgccgtcgctcggcagcccgtggctgtggccatcgaggtcggtagcgggatgcagttctacaagggtggcgtttacacgggcccgtgcggcacgcgcctagcgcacgccgtcaccgtcgtcgggtacggcaccgacgcgtcttccggcgccaagtactggaccatcaagaactcatggggccagtcatggggcgagcgcggctacatccggattctccgcgacgtcggtggccccggcctgtgtggcgtcacactcgatatcgcctacccgaccctgaccctgtgaacgaagtcaacgaacggcatgaaaagacgcgcagatatgactatatcactgtacacacgactaccctactataccgtgagtgtctgccgacgagacgtatccactatacatgtatgaattgtggaccgtgcctaaataaaatgcatgctgcgcgcgtacaactatgtgaactagaggctggggcgcgccaatggcgcgccgcctgtagacaggtcgatggaaaggtgcgatgcacacgttctcttaactaagaaaagctaaaaagcatatggtaaaaagaaacaacaaatagtaccatagtaacctgtagtataacaagccagctgtttgtacataaagtggttaattgttcactcagcttatgaataacaaaaggagctgaggacaatgataagcagttataggtcacgtgcttactgagcaagtgaagttagatagaccgcaagcaaaggataatagagagaattatagtagctgttccagggtagataatagcagcgactactgaagatgcaggtaactttcacagagcatctatggtgagcatgaggtgacttgtgtcctataaaagtggaagatgcagattgtgtaagttgatgctgttggctgctgcaaagctaaccaccctgatgttaagttgttgagggtcgacctgcaatctgcactctaatgtttgctgtcttgcctcgaaccaagttcacaatgtatttctttgaaaactcagtcgc

SEQ ID NO: 19716 - DNA, 2505 bp, Oryza sativa
  ref <308>: DATABASE ACCESSION NUMBER: AK070061
  ref <309>: DATABASE ENTRY DATE: 2001-12-06
gagtgatgtgatgatggtgaaatggaagaagttggcgtttgggaaaaaaggtcgctttcgaggtcgagcagagaaaaaagggaggcctttgcgaggcgaggagagcgagacccctgtgatcccaattaaccacccgccaccgccacgccgccggcgaccccctcctcggcgagatcgagatcgagatgccgcccacgccgccgcctgagctggacctcctcgacaccgagccggagttcgccgaggttgaccccaccgcccgctacggaaggtacacggaggtcctcggcaagggcgccttcaagacggtctataaggcttttgatcaactggaaggtctggaagttgcttggaaccagatcaaagtgggtgatatacttcggaataatgatgacttggagagacttagatcagaagtccggttgctgaagaccctcaagcataagaatataatcaagttctacaattcttggctcgacaagaaaaacaacaacataaatttcatcacagaagtcttcacatcagggacactgcgccagtaccgtattaagcacaagaaggtagatgttagagcattaaagaaatggtcaaggcaaatcttgagtggccttgtctacctccacagtcatgatccaccagtaattcatagagatcttaaatgtgacaacatatttgtgaacggaaaccagggtgaagtaaagattggagaccttggattagcaaccatcctagataatgcacgctcagctcacagtatcattggcacaccggaatttatggctccagaactctatgatgaagaatacaatgagcttgtagacatctatgcatttgggatgtgtttattggagcttgttacatttgagtacccatattgtgaatgttccaatgcagcgcagatatacaagaaagtatctgatggtgaaaagcctagttctctggctaagattgaagatcctgaggttagattttttatcgagaagtgcatcgctaaagcttcacaaagactatcagcacaagagctattgatggacccatttctccgagatgatggtgaaaaaatattctatccattgctgtcaaatacgaaggcatcagatggtgctggcagttcaaactcaagcatgggttacaaatatgacagagatgcatcatctatggcaattcgggagcacacaggtagttttgcagaagaacacccaagtgataggtacatacacagcaccatggatccacaagcagccgctggtcgaataattacagtcgagagtcaaatgaaagatctgaatacgatatttttgaaactgagaattgctgattcaacaggtcatgctcaaaacatccatttcccatttgacattgaagcagacacttccattagtgttgcaactgagatggtcgtgcagctagatctcactgaccaggatgttacagcgattgcagaaatgatagatgcagaaatacgggctcatattcctgattgggcattagaagaatcggttgaaaaccaaggagatgaaagagctcattctgagaccgacagttcagaagcagatgatgaaacttctgagttgcgtaatgagcctaatgctacacataatggttttgtccaagaacaccttccctccggacataagtattggtcggactcgcccagaagaaacattgaaatgtctcactccgcagtcgaaccacatattggtggtaatatgcctaatgggatattgaagaagaatgacactgatgacacagtcagcaatcttggcacttctgtggacttgccaaacccatctatgattaacaggaaatctggagtagcttctgtcagcaccagtcctcagtcttttgatgatgagcatattgaagcagatgttagcgagaggttagtgaatttgctagctcagcagcaagaggagctcaacgtgctgcgaaggaagcacaaggctgacatagaagtcatcttgaaaggtgtgcctgaagagcatcgcgaagaaaccttaactaggtgccggctgaaggcagatgagagaaacagatcagacaaaccttagctgcaacacattatcttcaccgtgtgatttttttgtaccggtgccatggagctgtttagaactattgttgtgcaaaaggtggtctcagctgttcactgttctttttttttcatggaatggaggagctgcaagtgtttgtggaatctgtgaccaagcggtgcaatacatatacgatactgatgtagctgtctggatttttgtttttgttttttgtttcttgaaggcaagacaaaaggtttctgctcaccaaacaaaatctgcagataccattgtgttactgtattcctgaattgttcatgagaagtgcacctccttgtttttctccctctctttttttccttgtaatttgatgatttttggaactaagaattaatgttaatgatgtaatacatcagtgtttgagctgtttcatactactacttgcaatgaaaaaacataagttccaattacttcc

SEQ ID NO: 19717 - DNA, 1981 bp, Oryza sativa
  ref <308>: DATABASE ACCESSION NUMBER: AK070062
  ref <309>: DATABASE ENTRY DATE: 2001-12-06
ggcctattcttttttaccagaaaaggaaaagtttggaaggagaagagcagctgccctccactacctcactccactctccccccctacctaacctacttgctccacaccagagagagccccaaaccatctcatctcatcctcttccgattccctgctcgcccataattattccaagagcactggagcctgttgatctgcttgctccaagaatttttctttcatctctgtgggattttggctccagctgttgctgaagtgatgctggaggaaacggcattgcaatggcgggctgatcttctgcaagcaatggagtgaatactggtctgtttttcttgtcctgacctggggaatctcgggtagtgggggatggcctattctggactaaggcatggcggcgttgggagctcctctcggccgggacatggattcaagggcccggctagttcggttgaatgtctaggaagggagatgctggaaatgcaattgagggattccaaaccagatgttggtgatgaaaagaacactgaacgagatgtagtcgacggctctagcgctgaagctggtcacataatagctactacgatccgtggccgaaatggtctacctaaacagtctgtcacttatattgctgagcatgtggtcggaactggttcttttggggttgtatatcaggccaaatgtcgagaaacaggagaaattgttgccattaaaaaggttcttcaagataaacgttacaagaacagggaattgcaaattatgcatatgctggatcatcctaatattgttggtcttaagcattacttcttctcaaccactgaaagggatgaactttacctcaatcttgtccttgagtatgttccagagacagtaaaccgaattgcgagacagtacagcagaatgaatcaacgggtgcccctcatttatgtcaaattatacacttatcagatatgccgagcacttgcttacatacataactgtgttggcatctgccaccgtgatataaaaccacagaatgttcttgttaacccacatacacaccagctcaaaatatgtgattttggcagtgcaaaagttttggtcaaaggagagccaaatatctcctacatatgctcaagatattacagggcaccagagctcatatttggtgcaactgaatatactactgccattgatttgtggtctacaggctgtgtcatggcagagcttctgcttggacagcctctgttccctggggaaagtggagttgatcagctggtcgagattatcaaggttttgggtactccaacaagggaagagatcaagtgcatgaatccgaactacacggagttcaaattccctcaaattaaggctcatccatggcacaaggttttccaaaaaaggcttccacctgaagcagtggaccttgtaagcaggtttctgcaatactcaccaaatcttcggtgcaccgctatggaagcctgcatgcaccctttctttgatgagttgagagatccaaacactcgtctacctaatgggcgtcctcttcctcctctcttcaacttcagaacacaagagctaaatggcatccctccagaagccatcgaacgtctggttcccgagcatgcgagaaggcagagtttgttcatggcgctgcgcacctagttctctagctcttcttttttcgcagtttttcttcctgagggaagctctgtaaaggtgtagtggcttctatgtgcccatctcagtgtggataaggtctttggctagagttgttgttgttgttgttcatggcaggatgtgatgtgagtgaggttggagaagaagaggcttgtgctttggtgtgcttgtgcagttggtttgaggttggaatctatgcttcagggttccaggctgtgtaactcctccagttctctttggactttggtttgaagattgtatgcagtaacagtgcttggttcaacttcagttcagagtggtctggtgatgataaagaaaatcattc

SEQ ID NO: 19718 - DNA, 1797 bp, Oryza sativa
  ref <308>: DATABASE ACCESSION NUMBER: AK070063
  ref <309>: DATABASE ENTRY DATE: 2001-12-06
ggcctttccttttactttctctatcgacagctctatcccaggaagccacaaagccagctagcaccaccatggttttgcctccctctcgaacagctccacagcgaggatttctggtgcttggtgaacagtgtgtccccttgttggcgacgttggatctggaagtgaggggtcagaggaggagcatgctgcccatctccaccggatctggctggactcccctctccggtgacctctctccccaggcggcagcgttcagatcagcccctcagcagacgtgaggcgcgagccatcggcggagggctccatggaggcggcgtcctggcctcctgggggtcggcggagtggcctcggcgacggcgtatcttgtgccgctggcactcacctctccctcgccatcttcctccgccaccactgcccctcctcatcggacgacgagcttgatggtggcggcgcaagagcaagccagggtcagtcgttccttacaccccttgcctttgccccccactctcgccagatggcgagctagatggtgccggcgcccctgctctcctttcctggccggccatgaggtggggtggcagattggaagaagggggcgacaacctcgacgacggctgcccacatcagcggtggagcggatctagagtggccacgggacagtatagcaatattggaaccaaggactatacatctaaattatcagtgtgctgaggttcgtgatagtgctctgctgaagaatgtggagattattgcaaaaagactcactaatgcatccgtgatttaaggtacttctggtagcattggagtctataaaatttccctacacatctttgatttaaaatattttgctttatgcatgtgtatagaattggatcctttctcaacaataatataagcttatgaacatgaaattctgaaaaatcatcaagatatatctttcttaatctaaagagttatgatgatcaggtcaatttttttttcagaattaagttcggttgcatggctaaattggaacctattgtacttgctatgctccgttgtaatgctttggaatttttaagagctccatacggatatctgctgatgtggattggtataagtgttggctatgacattgttttcaggcaattggcaatgtcatgctgcattgcgaaccttcttattaccctttgatgggttggaggtatagaatcgagatgattgccaaaaatattcaggtaattactgccaataaataagaataaaagcagagcagacataaggtaaaaagaaagcagaaagacattcatctagtcgtgttgtatttacttgctagcagtgtggtttttagagcatgattaaaaattgcaataattaaacgatggttcatctgtctgcacagttaatgtttttctgcataaaattgctcttgctgcaattaccaatactttttctttcttctagtaatatataaagccacttaaaaaagagattttcatgtttgggtttgcaactcctagattttgtggtggtatgtcatgaaaatagccgctgaacaactaaaaaatatgcctgttgctaacttgttagttttattcaatattaatcttataaatctaatgaaattgaaattgcattcagggttgagttcattgataacctggaatcgacattgattggaggtggcttgacatcctagaggaagagccttgtgatctatattttcttgtgtgcttctattatttgtattgcctgtgatcatatttgtgtattttgtcctgcgagaaaaatctataaaatcacgttagtgggagtgct

SEQ ID NO: 19719 - DNA, 3785 bp, Oryza sativa
  ref <308>: DATABASE ACCESSION NUMBER: AK070064
  ref <309>: DATABASE ENTRY DATE: 2001-12-06
gaagtttagagttttgatcctgtccaactaatcgccgggttaatcgggtctacacgcgtgacatgcgccgcaacgagattaccaaaaaccaaaacaagcaaagggcgggcggttcattcattcacagaagaagagggccatcactaggaaaaaatcatcatggtcgtcatggaggggagagacagtatagcctaatctaatcccagattgctagtgattagcacgtagatacatagaagcgatcgatcgaggacacatcgagaaaaaggtaaaagggagatcaattaatcgaagaagagagtttttgaaatatcgatcgatctagctatcatcatgtcgttcatccggaagaagtcgatggagttcttgaagagcttcgaggtgccggcgaagaacccgtcggaggaggcgcagcgccggtggcgggatgccgtcggcacgctcgtcaagaaccgccgccgccgcttccggatggtacccgacctcgacaagcgctcgcaggccgagacccagcgccgcaagatccaggagaagcttcgtgttgcactcttcgttcagaaagctgcacttcagttcatcgatgccgtccgcaagacggagcacccgttgccggagctcgcccggcaatgcggcttctccgtcagcgccgaggagctcgcctccatcgtgcgcggccacgacaccaagagcctgagattccacaatggcgtcgacggcatcgcccggaaggtggccgtgtccctcgccgacggcgtcaagtccgacgacgccggcctccgcgccgaggtctacggcgccaaccagtacacggagaagccgccaagaacgttctggatgtttctgtgggacgccagccaggacatgacgctgttgctgctcgccttctgcgccgccgtctccgtcgccatcggccttgccaccgaggggtggccgagcggcatgtacgacggcgtcggcatcatgctcaccatcctcctcgtcgtcatgatcaccgcggcgagcgactacaagcagtcgctgcagttcagggacctggacaaggagaagaagaagatcgacgtgcaggtcacccgcgacggctaccggcagaaggtgtccatctacgacatcgtcgtcggcgacatcgtgcatctgtccatcggcgaccaggtccccgccgacgggttgttcattgatggatactcgttcgtcgtcgacgagtcgaacctctccggcgagagcgagccggtgcacgtgtcgacggcgaaccggttcttgctcggagggaccaaggtgcaggacgggtcggcgaggatgctggtgacggcggtggggatgcggacggagtgggggaacctgatggagacgctgagccagggcggcgaggacgagacgccgctgcaggtgaagctcaacggcgtggccaccatcatcggcaagatcgggctggcgttcgcggtgctcacgttcacggtgctcatggcgaggttcctgctcggcaaggcgggcgcgccgggcgggctgctgcggtggcggatggtggacgcgctcgcggtgctcaacttcttcgccgtcgccgtcaccatcatcgtcgtggccgtgccggaggggctcccgctcgccgtcacgctcagcctcgcgttcgccatgaagaagctgatgcaggagcgcgcgctcgtgcgccacctctcagcgtgcgagacgatggggtcggcgagctgcatctgcacggacaagaccggcacgctcaccaccaaccacatggtcgtcgagaagatctgggcgtccggcgccgcgcagacgatgagcaacgccaagggattcgaccagctcacctcgtcgatgtccgagaccttcgccaaggtgctcctcgagggcgtcttccattgctccggctccgaggtcgtccgtggcaaggacggcaggcacaccatcatgggcacgcccaccgagacggccatcctcgagttcgggctcgcggtggagaagcgcgccaggatcgagcacaccggcgccgggaagctcaaggtggagccgttcaactcggtgaagaagacgatggccgtggtgatcgcgtccccgagcgccggcggccgcccccgcgcgttcctcaagggcgcctccgaggtcgtcctgagccggtgcagcctcgtcctcgacggcaccgggaacgtcgagaagctcacggacgccaaggcgaagcgggtggcgagcgccatcgacgcgttcgcgtgcgaggcgctgcgcacgctctgcctcgcctaccaggacgtcgacggcggcggcggcgacatccccggcgaagggtacacgctcatcgccgtgttcggcatcaaggacccgctccgccccggcgtccgggaggccgtggcgacgtgccacgccgccggcatcaacgtgcgcatggtcaccggcgacaacatcaacacagcgaaggcgatcgccagggagtgcggcatcctgaccgacgacggcatcgccatcgaagggcccgagttccggaacaaggatcccgaccagatgagagagatcatacccaaaatccaggtgatggcgaggtcgctgccgttggacaagcacacgctggtgacgaacctgaggggcatgttcaacgaggtggtggcggtgaccggcgacggcaccaacgacgcgccggcgctgcacgaggccgacatcggcctcgccatgggcatcgctggaacagaggttgccaaggagaacgccgatgtgatcatcatggacgacaacttctcgaccatcatcaacgttgccaaatggggtcgctccgtctacatcaacatccagaagttcgtccagttccagctcaccgtcaatgtggtcgccctgatggtgaacttcatctctgcgtccttcacagggagtgcgccgctgacgattgtgcagctgctgtgggtgaacctgatcatggacacactgggggcgctggcgctggcgacagagccgccgaacgacgcgatgatgaagaggccgccggtgggtcgcggcgacaacttcatcaccaaggtgatgtggaggaacatcgtcgggcagagcatctaccagctggtcgtgctcggcgtcctcctcctcagagggaagagcctcctccagatcaatggccctcaagctgacagcctactcaacaccttcgtcttcaacacctttgtcttctgccaggttttcaacgaggtgaacagcagggagatggagaagatcaacgttttcagcggcatcttcagcagctggatcttctcggcggtggtcggcgtcacggcggggttccaggtgatcatggtggagctccttgggactttcgccaacacggtgcatctcagcgggaagctgtggctgacgagcgtgctgatcgggtcggtcggcttggtcatcggcgccatcttgaagtgcatcccggtcgaatccggcagcgacgcttctgatcgtcacgacggataccggccgatccccaccggcccgagtgcggtttgatttttgcaggcattttgatcatcgttttcttcataaagaaggagatgagtttgcatgcaaacttcgtagtttaactcagtttttttttcctcccgaacggaagacattcagtttttcacacaaacatcgtagttttaactcctccaaagagtaggttttgtcattgcgtcttcttttttcccctcagatttggtagtgataataagttgtcattgttttgatccaagggatagaattcagttagacaaaattgaactataacaagagcatgtacttgccatttcgttttttttttcaattgagggcatgcatgcaccctt

SEQ ID NO: 19720 - DNA, 1671 bp, Oryza sativa
  ref <308>: DATABASE ACCESSION NUMBER: AK070065
  ref <309>: DATABASE ENTRY DATE: 2001-12-06
ggagggtgaatcgtagcgatagcggatcagattggaggaaaactcgctagtacgcttgttacttgcaactctttctctaatcttgcttcggaaagatatccaaatcgaagaaaaagaaaaaaaaattagaaagcgtgattagccattcctcttctcatctctagccacttcgcttcagcttttcttctttcttgatcgcgagcaaaaagggagagagaaaaaaaaacggtaaaaggacgtgattagcaaggatggtggcgatcgagaaccagagccagggccagcgggcggcggaggcggcggcgcagccacggatccccagggaggcgcggcggctactgcacgagatggcggcgtcgtgggcggacgttgccgactgccgggcgctgcaggtgattccgctcaagggcgccatgaccaacgaggtgtaccaggtgcgctggctcaacggcgccccggccaccgccgacggcggcgaggtggaggcggaggcggccgcaagggagagggaggtgaggaaggtcctcgtgcggatatacggcgacggcgtggagctcttcttcgaccgcgaggacgaggtgcgcaccttcgagtgcatgtctcgccatggccaaggcccccgcctcctcggccggttcaccaacggccgcgtcgaggagttcatccacgcaagggtaggtgcacatgaatatgatatgattccgcgctgctgtagccaaactgtctagccttcctcgcgccacggattgtgttttctcctcccgttttttccctttagttttcctctgtttatcttcgactctcttgaactattaaattgggtagggatttttaggggattttggtggtaccttttgtgctttggacgaataaatctttgttgattttaccgcgttagtgaaaagttattttcctaagtttattagcaccaaaattaggcagattttggagtttgttcttgcatactgataatttttttagctgaactcgtagcaatttgggctttaacgttcttcttgatactttaaagattctacaggcactattccgacttatttattgcagtctggttatcgttttctaaaaggttctgccgtgggaatctgcaattccttagacctttcttatctatcagttcataaaatctctcttcatgccctagtcaaatatctctcctacttaacaggaattgtttatgcccacaccaattatctcccaaaattatttgcctctgtggcatgaggcgtacaatcttatttttaagggtattgtcaacagctggaatttagttttctttgcactctttcctgtattgtcagtaaaattgtgatacaaagtcaatagtcggtgaagctattaataactcgtttgaaagatttttttttctttcgtttgaattagtcagctagaattgataattgtccattcgacaacaggagatgtctctttcagagaagctgttgattgaaaacaatttattggacttgagaaaagcaagatagctgactaaactggtgtaaagtaaggactgaatggagtaaatctagaccatacatggtctatttctcttgcggaatctcttttagaaagtgaattaggctatagctgttaaattgcgagtcgaagcactttctggattcttcattttgctttaatacatgtgtcactctc

SEQ ID NO: 19721 - DNA, 938 bp, Oryza sativa
  ref <308>: DATABASE ACCESSION NUMBER: AK070066
  ref <309>: DATABASE ENTRY DATE: 2001-12-06
gagttcccacccccggccaaattgaaactcttgtcgtcctcacctggaaggaaccccccgaacacacgcagccatggcgaagcctagcggcggcggcctcctcgacctggagcaccacttcgccttctacggcgcgtaccacagcaacgccgtcaacgtcttcatccacacgctcttcgtctggcccatcttcctcaccgcgctcctcctcctccacctcgccgccccctccgcgcacgccgcggccgccggcgccgccgtctacggggccttctacctcctcctcgaccgccgcgccggcgccctcgccgcgctcctctgcttcctctgctgggccgccagcgccgccctcgccgcccgcctcggcttctccgccggatggaaggtggtattggtagctcagctgttctgttggactatgcagttcattggccatggtgtttttgagaagcgagcgcctgccctccttgacaatcttgtccaagctttcttgatggctccattcttcgtgctactagaggctcttcacaagtttgttgggtacgaaccgtatcctggctttcacgccaaagtgcagaagctgattgacgaggcccgcaaggaatgggaggacaagaaagcgaagaagatgacgtgaagtgtgatttggaagttggcaacccccatactgcagaggcgtcttaatcacgtggccatttgatattttgattagacggaactgtgttaacatgtcgctgccaacatattgccttatttatgttgtaatatataaagagttttatgcactctcttgtctgatgtgtatacgttactggagaatatagaattctgatgatgattgtgaactgtattagaaaataaatacaggaaagtctttttacggtggtctcttctgtactggtactctactataagctggaaaaatatatatgtagtgc

SEQ ID NO: 19722 - DNA, 1073 bp, Oryza sativa
  ref <308>: DATABASE ACCESSION NUMBER: AK070067
  ref <309>: DATABASE ENTRY DATE: 2001-12-06
gaagcaactgcaagtgaagcggcgacatgacgacgacgacgacgaggtttgttcagcttgccgcgtgcgcggcggcgtcgctgctcgccgtggcggcgagtggcgcggcggcgcagggcgtcgggtcggtcatcacgcaggcggtgttcaacagcatgctgcccaaccgcgacaactcgcagtgcccggcgaggggcttctacacgtacgacgccttcatcgccgccgccaactccttcccggcgttcggcacctccggcggcagcgccgagctcatccggcgggagctcgccgccttcttcggccagacctcccacgagaccaccggtggaacgaggggtagttctgaccagttccagtggggttactgcttcaaagaggagataaacaaggcgacttctccaccctactatggacgtggcccaattcaattgacagggcaatcgaactaccaagcagccgggaacgcgctggggctggacctggtgggcaacccagacctggtgtccaccgacgccgtggtctccttcaagacggccatctggttctggatgacggcgcaggggaacaagccgtcgtgccacgacgtcatcctcggccggtggacgccgtcggcggcggacaccgccgccggccgcgtccccgggtatggcgtcatcaccaacatcatcaacggcggcatcgagtgcggcgtcggccagaacgacgccaacgtcgaccgcatcggctactacaagcgctactgcgacatgctcggcgcaggctacggcagcaacctcgactgctacaaccagcgcaacttcgccagctagctagctgagtgatcgatcgatccatcggattgttatcctattgcatgatcgttcgatcagttagtactaccaataaaaactggcatgtagtgatgtagtatcccaacatgaataaaggtctttaatcaaataaaggcaaatatcaattgctttaactgctacaggcacgacgatactgatctcaccccaaaaatttacaccatgtcacatggaacgtttgaacacatgcatgaagtattaaatatatactacaaaataact

SEQ ID NO: 19723 - DNA, 2159 bp, Oryza sativa
  ref <308>: DATABASE ACCESSION NUMBER: AK070068
  ref <309>: DATABASE ENTRY DATE: 2001-12-06
gtctacgtctccggcggcgccgtcagggcggcggaccccgccggcaacctgttcaccgccttcgccaccaacccgttcgccgagttcaacatctttggagaccccttcgctgcttatcaggtcatacattccgggattccaatcacgatgattcctcttgatgcgaccaacacaatttcggtcaccgaggaattcgtttctgaattccaacagcatcagcaaacttacgaggcacagtactgtttccagtcacttgataaggtcttgatgaggctgaggggacgatccaacggccatggcaacacgagctactacatgtgggattcctttgctgctggtgtggctctctctagcatgcgcaatggcgaggttgatggtgaaaatgaattttctgagcttgaatatatgaacattacagtgataacttcaaacaaaccgtatggtaaacgtgacggctcgaacccctttttcgatggccgtgctactcctaaacttggcctgaaagagggtggagttcacagtggccatgttcagactggaataagagatagcttctgcctggtaccgggaagcaacagagggagatgcgaggatggatacactagagaagtgtctggtccagaaggagttcgggttcgtgttgcaacaagagcaaagcctaacacggataaaaatagttcactagaaaaggaattttccaagagcttcttagaggtcttaaatcgtcccgaacaaactgggcttttcaacatcaatacgcagttcccatattatagagaagttctttacaagccggttttcagaaatgtgagcagggggaagccagtcatttttgacatggacatgagccctggagattttgtttccctaatatacctcttgaagacaccaatagaagtaatagatctaaaggctgttttggtcaatggcaatggctgggcaaatattgcgagcatcgatatcgtttacgacattctacatatgatgggccgcgacgacattccagtaggcctaggcaataccactgcattgggaattccaacccttggctgcaacaattcttatgctatcccccatggaagtggtggttttattgattcagatacactgtatggactagccaggtcactgccaagaagtcctagaagatatgctcctgaaagtttagatcacccagaagatcggcagcctttggctcttgaagtttggcaatctgtcaggaagcagcttgatccaggcgaaaagatcactgttcttactaatggacctctcaccaatatggccaacatttcactctctgacagggatgcaagttctgtaatagagagagtctatgttgttggtggactcatcaaagatggaggcgatgagaatggaaatttgttcacggttccaaaacaaacatgcagagtttaacatatttcttgatccactagctgcaaaaacagtcctggaatctgatctgaaaatcgcactcattcctcttacggcgcaacgaaaggctgcatcatttcgggctgtccttgcggctttggaagacatccagcatacccatgaatcaaaatttgtccatgaattgttgtcgttgctgcaagaacttcagatcaaacagaagctgtatcatcatttggacatatttctgggagaaattcttggagcagtttacatggttgaaggatcaggactgaaaccttcagtggaactcaagccagtaagtgttattgccaacacaaacaaaagcacggacgggcagattgtcatcagcaagaatagtgcaaagctggtaagggtattgagcgatttcgatggtgaaatatatagcaaacaattggcaaattctttagcaaacaagagacagtctgccgttattgggagttttgaagaacaaaaggcaatttggagcaggccggtaaatagttcagggaatataaaaaaacaaaagtgaacttttgtagtagcattagcgtgctaaaaaaatatattaaagattacatagcacaggtaataagaaagctgacatgataatgcttgaagtggctgaagaacgggtgtcactgggtgctgaagaatcgctccatgagtcgcgaagtaacctggagaattaatcatttatcttttttcttttgattacacaaaaaggaaaattatgtttctttctg

SEQ ID NO: 19724 - DNA, 826 bp, Oryza sativa
  ref <308>: DATABASE ACCESSION NUMBER: AK070069
  ref <309>: DATABASE ENTRY DATE: 2001-12-06
gctctctggagtctagtctcctctcctcactcctcactcgccccactccgccgcttcactcgcgagctcgtcgttggcgccggcggcaatggcgtccccccgcgcgctctccctcctcctcatcctcctgggcatggccctcgcgtcgttcccctccgccgcctccgcctcccgcgacctccgcccccgccgcgcgggcttcgtcgtccgcggccgcgtctggtgcgacacctgcctcgccggcttcgagacccccgcctccacctacatcgccggagcgaaggtaaaggttgagtgcagatcgaaatccactggcgccaagacatgcagcttcgagggccagactgaccacactggcacctacaacatccctgtcaacgatgagcatgagcacgagctctgcgagtctgtccttgtgagcagcccggacgcaaagtgtggcaagattgttgctggacgggagagggctcctgtcttcctcaccaacaacaatggtgtgacatctaatgttcggttggcgaacgctctgggcttccagaaggatgctcctcttgctgcgtgcgcacaaatcctcaagatgtacgaggaagtggacgaccgcgtttgaaggatgtgagttatgtatcaatattcgtacgttgttgaaatactctaagaagacttctatataccttttactgagagcaaaactatcagcatcagatgttgcgtgcttgataagttgtgatatagcttagcacttgagtatgttatatgtatgttcgtctgcagctgaactgcaaaactcatcagttactaaatcgacatgttgtgctttctatcaggc

SEQ ID NO: 19725 - DNA, 2690 bp, Oryza sativa
  ref <308>: DATABASE ACCESSION NUMBER: AK070070
  ref <309>: DATABASE ENTRY DATE: 2001-12-06
gagccatttttctcctcggtttctcctctcctcaactcaagcctccgcgccacgctgcgcggccggctaaaatcctccgccgctcgccgctcgccgtcgtcctccgcctccgccgccatggacaccatggagcagttaaatcggttggtgaggatggtggcgcgaggattctatgaggacgtctcgcttgaggaagaccagtccaaacccaacggcagcggcagctgtgggattgtcgtcgtcgtcctcgatgccctcaccaggcaacagtgggtccgggaggaagatttagcaagaagtctgatgattccattcaaccgattgcgtcagattacccattttctcgaacagcagaaattagtgagaagatactatcggaaggaagcaatacatgatgcaagcatttcaactgcctcaccctcccatgtttcgcatgatgcccatcttgttcctaccaatgtagctgggaaattgaagatgatcatgcagccctactgttgcttacactatgggcaggtgtatgatgtcacactgtataggatccacgagatgaagaagaaattaaaggatgaattagatggaaactacatgattcagaactatgtgtgccctaactgtgagaggaggtagtaaagcttaattttgattgttatatggacatatagtaccacctaaaagattttagcacagctgtcatttctgtgttgagctgtaggtattcatccctcaatgcactggatcttgtaagccatattgataacaattttcactgcaagcattgcaatgaagaattgagtcaagactttggagatcttgcttggggaggaagggggggtgatggtgataatgccagaagagacaggcatgcaaaactgaaagattttctgcaaagaatggaggttgctcccttttttgcaagaaacaaacatttgattttctgcacatcaaatgttaatgatgtaatgccaaaattgttcaacttgtagtaaaaaatataaattgtaattacttgaatagcaaatgaacttgtttttcaatggtttgtttccttgtaatgaaagggccttctcttttcagagagtgactaaattattatgtctgcattcagcaataatcattctgttatgcaggaaattgtgcataaactttcaataaatgtttttaatacatgaatatatgagaaaggacaacactagtggggcatctctatacctattaagaaattttgaagatattggctcggtattatttttgcctgaaggtgcagactgaaaggaagttctattcttactcttggatgtccaagtttatacttgttccaatcttgatcatcttgtgttttgcacttcatttgtattacatatttctattctttaatattatttgaatctgtactgatgcagcatcagatggagcgcctaatatcacaattgaacaaggtaaaagatctagattttccagagtttctggctttggaaacatgggagcgcaatatgagagaacctgcaggtggtgatgatgtcagcagaccaatgctcttccttggagagtcacatgaacatcaaaaaggcagtgcatcatgcattgatgccgatgaagagatttttgaatttcgtgtgcaagatgcaagaccgataccttcatttgtcattaggaaagatatcaaccatacggaagataaggaagagcagctatgacaaatacaggtaatgcatgttaaaaagatagcacagtttgttaaaaggatagcacaaatgatgacaccagttaggctagaattaatcaatgtcagtctcccctaattgagtgaactttccataccaacatctcaaggtctgtttttccatttttactctccactagtttccattaagcattcttcatttcaaggctagaattaattcaggcatgtttctctgaccaaccatttacttctcaagcacagcatgagcggcaatttggtgccaagtggaaacgggatgataatgatgcatgtatgctttgatgagagtgacctagtgtagcacttacaagtatttcaactgagcttaaatacttgagttcagccaaaagctttgttccgacctgtgtctggagatgagtccattaataaatacaccatacaaattaaatctacttccacatttaacgttgtagctgtagtctccttctttcttgatgtttctaaactcctagttatctaattgcatgtccttttgtcttagtataatagaaaaagaaacatggtctggtacttttcctgtcttgtaaatgatattaccaccatatttacttgcagttcagttagccactgaaatgatctgatctgtatgaattccatgatgagttatagaacgtttgtaactgaaatttaatagatgggggtatatcttatgttcttaacatgttgcctttgactgatgtatcataaatgtgttgggcatggatctaacatatttaaactaatacagggaacaagcttgagagatgtgctatatatgcgaacaagcagactagaattttgagacccaagcgtgatcagatggtgatgaagactttatagatggtgatgatatagatatgtaaatcatgtaaatacgaattttgccctttctgcctttctttttttttcgagacaaagccatttctgcgttttcgccttatgtgtctataaaagaacttacattcgt

SEQ ID NO: 19726 - DNA, 1518 bp, Oryza sativa
  ref <308>: DATABASE ACCESSION NUMBER: AK070071
  ref <309>: DATABASE ENTRY DATE: 2001-12-06
gaatcaaaactcagaccaccaccaagcctcgcggtttctcgccgtccgagcggccaagcggagagcgcctcgatccgcccgccgccgcgcatgaggatcctcgcgctcgtcgtggcggccgcggccctcctcgccgccgccgccaccgcgcacgagcaccacggcgaggcgcccacctgcgccggcggcggcagcgggcgcgtgctcgcggagttccgtccaggggaggtgaccctggacgggcacccggcagactgggacggcgtggaggcgtcggagttcgcgctgcttccggctcttgaccccgacgaggacaaggcctacgccggcggcaaggtcttcgtcaaggctgtgcatgatggcgtcaacattttcttcatgctgaaagttgatggggattacacctacactaaaggcgaaaataagaagtgcccttctgttgctctgatgttccaaattggagagaaagcaacgtactataatatgggagggtgtaaagatatgcctggttcatgcacaagcaaaagttgcagaggtcaagaggttgacattatgcacttttctgttggaaatgctatccctggacgtctttatggtggaaatcacatagataatgcagacggaaatggcggtgatagattcggtcatcttgttgatttatattcatggaatccgcattgccgataccttgatgggataggccctaaagagaataattcaaatgctcagaatgattggcatggggcatggtggcatagctctctgacctttcactcaggctttgtggatgatgacagtccttacggaaaacaagatgagaagggcacatattattttgagttttcaaggcccctaagaacaatggatcgattacagcaggatgcacagttcacgataggtgggcccaacagtatggctgtggctttctggtacccaaacgatggcaaaccatggagcaagtccgagcattattcggccagctgcgactggttggttcttgatattcaaccatccatggaagctgcacattaccgcccagctccaaatcgttcatgggatgctgcaactgcctttgccttgcttctttcggtagtagcaatctgtatatccgtttttgtgggctacggggcttctaagaacaggagcagcgtccaatttacaccacttgagcagatctagttcgtttgctggagaaaagaatttgatggtctcgagtttcattatttgtgatgcgacaagggacgctatttcatctgttgctgatgcactttcatgatcctacataacacttctacgtcgagggattgctgtgttgcatctttgtaatctagtgtaggacactgaaaatacatacgattcagaatttcagactagattttggttttatacctgtacggttcattttctgtaaatgatgtatgtcggctacatgcacatctagaacttacacttttacgttcttaaatttgagcacagatgattttcatacaaatgttgaagtgcttcatgtgatggctg

SEQ ID NO: 19727 - DNA, 2796 bp, Oryza sativa
  ref <308>: DATABASE ACCESSION NUMBER: AK070072
  ref <309>: DATABASE ENTRY DATE: 2001-12-06
gtcttttcctccctgcgcgttctccgttccccagtcagcgccgccatcgctctccctcctgactcccacccgtcgcccttctttccccaacctcatcgccaaacctaacctcccctctctccccgccgcacgccgtcgacccccgctgcgcatatccccatcgcacagcgccgccgctcgggcgccgcactttctcaatcggaggacagcacgatgaggaaggttgcgggagaggcgccgtcaggcgccgctgatctggtccctcgcaaccagatcaccgtcgcataccctagagtcgacgtcgccggtgcatagccccgtcgatcccgctttcccagttcgctgtcatcgcctccgatcccgcgggttgcgcctctatcccctggtacagcagcgtcgccaccgccgacgggagcagcatgtcagtccgcaactctgcattatcagcgcacaaccagtttattggattggagatgttatttgctttgggtaatttgtttttttgcctagccacaagaaagaatgctcatgtgccatagaggaacagcaagctaacacaccttcttgagattctttaggcaatcaattatttacttgttggtaaattatgcatgtagggttagatttgtggttttcgtaattacattacatcacccgaattaatcaaaagatttgagcattttgtgcgtatgcaagtagttgaagaatttcaccaacgaagatcccgagccctttcagccagtacagcagcaccgccaccgccgacgagaacgggcgtcctgtctggatcgtcagaaggtggccaggtcattggattggttttcattttttctttttggattggattctgaaattggaacaaaagcagtagcattctccgttctttgatttggttgttttcacaaatgagaaatgggcagtacatcataaatctgagtactttgatctatataagtcgatttttattgctccgtacacaacacagttcacctcctgagtcatgaaatgcaactatagaagaactgaacttggttcaaatttaggggatatatgctaataaaattacaagggaatggtgtgcattcagtttgatatagttcatatgaatgtcactttcttgaaaatattgacgtttggtattagttgtaaaaccttcatcaaaatgcagaaaacacgggatcaaactaatctaaattcaacatctctccttcaagttttctgaagtcgggtaatagctgacttgagttaatttattaattggtggattactcatgcaacacctgccagtttattgaaaaaaaaaaggaattttcttacttctgtcaataaatataatactatggacaagcacttttgtttgattgtattaaaagaaatactaaaaaatgttaatgagatataaacggaccgatgatgttaatgaaatacttttgtttggtgctatttgattgtgacttaaacggaccgatgatgtaaattcatttttcatacacttactctactctgcacgataggtctctgtttaaatgccgctgagggagggtttgttctggttgatgaattttcaagcaaatctgttcatgatctttacaaggtttctatgtgttttctgtgagatctttacaaggttttggtttgggggtacaaattcacattcaatctgaatttcgttttggttttcaagtgaagcaaacaagccaacatagggccctgccaggtatgagtttgctgctccgactgtatgtgcatgtagcagagggcaataatgaagacagaaaaaagtagagcaagaaaatatttaacattgaaattgggaggtgttagtatggaattgtgatcaaccttaatgttgtgcactgctttagctgaaaccatctgagtgacaggagaggaactggaagtcgtgcattgatacaaacgatatttttgtgatttgtagcctgagatcaaataaatttagcaactcagccatatttcagagcctgcttcacttaggcaatgtaaaattataaaggccttcacctagccaatactatttattttttttattctcacaatagaaatgatattgttttcatgctcctaggcggctcacaccagtctctgccattgccagttcgggtgcctaatgaggccggtgcccttgaatgacagccatatttccaaggtgagtattggaaaccttctctcagaaattaattgtctgagtttcctaccaacaaattgatttgttcacagatttaggtggtcacgggccataataaatcattgagaataggtcatataacattcagttatgtcatcacaaacaatctgattttgacaaaattaggcaacacagaatttaatgtatgcaagcatccagatacctaacacggctaacactattgactgctttttgtttcgagggggctcactgcttatattttattgagcttagctatattgtatttctctaaactgcataaccatctcactgcatagcccatatctttatagcattgtgacaataacagctacatctctacaatattactaccggtaagaaatgaaggattagcggtacataaagtgcctcaagttgattggaacaagcaaccatttgtataacatatatatctttcagactcaaggtggagtttgatctctacgtaaaaaaaaaagcaatcggtgttttctgtactcgaatatgtaaataagctgtagtgtgtcagatattataatggtgttctttatagagcacacgtgccgacaacattttgcagtgggcttatctatgaatatttttttttatcc

SEQ ID NO: 19728 - DNA, 3156 bp, Oryza sativa
  ref <308>: DATABASE ACCESSION NUMBER: AK070073
  ref <309>: DATABASE ENTRY DATE: 2001-12-06
gaatgtatcatcattcatcagcaaaacagacgaacaggttgaggagtgtcatattctggtgatggaagcggaagcagccgacggcttggggcgccgccttgtcaagcatcatccaccgccgggggaggaagcggccgtccatggcgccgctctgcgagcagcggggatccaccgagcacagccgccacggccggcacacggcgcggaagcggatgtagtcggcgacgtcgttggcgaggacgcgctcggcgatcaacccggcggcccctccccaccaagcaaatgctggagcaatgatgctggacagctggaggcctggagcaaatggatgttgataaccagattgctaagctgatggtggagctctcccgcatcaagattgtgaaattggggatggtaccactgcgatggtggtcatgtttggatcacttctagaccaagctgagaaactgttagaatatggaaacgaaatgattattgaggagaccaagtgaagtattcatgatgctctgtgtggctaggaatctgattcgcaagaactctattgtttatggtggtggctcagctcagatatcatgctcaatctattatattattaaaggaatagaaaaaggagtctccacgttcgctctcatggcctagaaattctcacattaatcggagaaaaagaaaaagcagagtccatatagaaatacaatttagaaagagctgaaattcggaattaaaaaaataagaaatattagaagaggagactagagtccatatagaaatacaatttagaaataattgaaattcggaattaaaaatataagaaatattagaagaagagactagagtccatatagaaatacaattaggaaataactgaaattcaaaattaaaaataaggaatattagaagtagagtatagagtccatatagaaatacaattaggaaacaatagaaattcggaattaaaaataaggaatattagaagtagagtatagagtccatataaaaatacaattaatacaattaagaaaaaaaatagaaatacggaattaaaaaataagaaatattagaagtagagtatagagtccatataagaatttaaaactaactaaaattcggaataaacatagtaaaattaaaagtaaagttttgagtccgtataaaaatacaatttacaaataactaaaattcgaaattaagaaaaacatgggaagaagagtttaaagtcaatataggaatacaatttagaagtaactgaaattcgaaattaaaaattaaataatattgagagatgagtttagagtccacatagaaacacaattaaaaataataaaaattcagaaataaaaataaataatattagaagaagagcctaaagtctatatagaaatacaatttacagaaaattcggaattaaaaaaagaaatattaaaagacaagtctagagtccatataggaatatatataatttacaaataactaaaatttgatattaaaaataattactaaccaacacgtatataaaatacaatatgaatattactcatttgtagtttcgtaaagttattgcaaaatttaaaattatgatatcattttaatatatttgaataatataatgagaaaacatatatgctattatatgagagaaaatataatgatgctagccgagcaatctgcgcgggtcaccatgctagttgctgttaaaactgcagcagatcaacagcctggagttgaccaaatctccctgagacgtctctcccacacatcgctcatgccatttgaggtgcattggatgggatcccactagccctagctgaaaacagtggtttgcccccttttgatacgtcgactgcagtaaatcctcagcaagtgaagttttttttttttttgcctcctgaactacctttgcaagatagcaatcctcatcatggtattgactgcaattgcattcgaacaaacggcatcagagaacaaaacaagcagcagcagatcgtgctgacaactcaggtggtgaaaatgattctcaagattgatgacattatcacacagtctgactgctgaatgctgatgacaacctgcccagctggggtgatgcaacatggtaagaaaagcaaggcaatttttcctggctctaattaatcagcatttggtgtgcttgagctttcgaccggacagcatgctctcgatggaagccttccagaccttgcagtgcatctggttgtccagcagcagctgcaccgtccctgctgccgtgctcagcgccacggggaagaacttccgacaatccaccaccgcctcgccaccgccagagactgccaacacctcatctggaccaagcacaaacaacagggttcaggcatcatcaccgacaagcagaacgaagatcaatacactagtggcaagcagttcagctggttcatgcaggtaaatttttttaattattacagtgctggtatgttgtgaatgctccatgcaggcgcttcttccccagcctcagagccaccgtgccgcactccgggaagacggccaccgtcctcagccgcaaccttcctgcaaaccctgagaattgtgcctttctgaatgctagctgtattggtgctcatcatcatcatggagttgctggtgctgctgctgatccctctgctgacgtctgctctcagcttcagcacagctgctcctctcagacctggaaaaagcatacaagaagctcagcatcatagcatcacggtggcggtgagggtgagcagctcggcgggggagcggctgtcgaggccggccttcacggcggaggtgacccgggacctgtcggcaccggcagactccgcgaactcggcacagacggtggccaccagcgcggcagccgaggcaagcaccgtgctcagcttcctgtcagccccagcacccccagagctgctcctcagctcgcaagctgacacgacgccggcgatcgcagctgcgagctgggccaccgagacggcggcgtgggcctgcgccgtgtgcagccggagctcgtcgcgcctcttcctccgactcccggcgatggggatgctgtccatcaagtatcctctcagaattgccctcatgtgtcccatgttcagctgctcattttcagtggaaaccaaaagctttcgtcaattcacttcactgtgccagatccgacaaagc

SEQ ID NO: 19729 - DNA, 2590 bp, Oryza sativa
  ref <308>: DATABASE ACCESSION NUMBER: AK070074
  ref <309>: DATABASE ENTRY DATE: 2001-12-06
tccttgccttgactgatgatgcaagtgagagcagaatgcctgagcccagaaaaacgccattgctgctcactgcttctgcggacgaatcaaataaaaagagttctctgcagacaaaatccaaagagaaaaggaaagttctacttgtagaacatccaaatcggaaagctgctggcaagaatgttaaccctgtcagaagcacatctacgaacaatagtagaccgttatctgcagatgatatccaaaaagcaaagatgcgtgccatgttcatgcaggagaaatatggcaaggttgacacaagcaaagtgattgaaaaacctcatatgatggaaattcaaaaaccgtctggcttagttgattcaaatgtaccgcttgtgcccagaacccctcttacttcaatcattaaacaacctgttgaccctagcccatcaacctctaaacaaagtacactatctccacctgataagccagaaattgcagttagcttgaagctgaacgtaacagccaaagaaaactttatagagaaattggattccaagagagttatttggcagataccaccagaggtttggatagaccctgcttggagtttaggtgctggagagaacagcaaagaatttgaggtccaaacccagagaaacaggcgtgagaaggaaaccttttatgctagtctaaaggacataccgttgaatccaaagggcccatgggatgtggaaatggactttgatgacagccttacaccggaaattccaattgagcagccaccagatgctgacgctatggaaacggatagcgtgagcacagcccctccaaacattgtggttcctgttgtggacaagcaaataggatcaacctcatcagtatctccagcagttgctgctggtgcgaacggtgcaacttctgaaccagatcttgagctgcttgcggtgctgctcaagaatccacaacttgtctttgctctaacttctaatcagggtgggaccctgccaagtgagcagaccgttgcacttctggacatgttgaagcagactggccttggactatcagagctggtaaatagcctggccaacaattctggggtccaaaaagagcccgaatctggtcctgaagctatccctgcttcgcttccatcgccaactcctccaaaagacctgatagccagggatggctggagttcagagttcccatcacaagtgaggacccaaaacttgcagcacgcccatttgccaaacagagcaaatgcacctcctgttgcaagcagcgtgcagcaaagtttctcaaatgttgtcagttcgttgccttcacaaccttatgcttcagcttctgctttgccggcacagactcgaactaatatgacatctctcccccagtcgatgatctccgtaaatccgtcaactcaacatgttgctcctatgaataatcttctgagcagagccacggtacaccagcacacccaatcatatgctttaacgtctgatcctgttgcagtggcggtccatcatcagccagcggtgaacaaactagcccatgaggttcagagcatctcacaccctgctgtatcacattcttcggtggctgaatcacatgcctcttacacatcatacacctggcaatctagtgttgctaccattgccgccactgggcgaaatgctacacctgatcgatgggctgcacctgcacgcactactaattcctttaacgctgccccatcaaattcaaaccatgtgacgtatcctaaccagaatgcttacagtaaccacagcacacaagctactacatacaattcttatggttcagctccagtctcgtcccactccctccacccagggcagggactggaccgaaatggctacactcacgcagcggagtaccagacgacaatggcgcgagacgccctatggcggaactcgcggtctcctgagcttggtgctggtgctgtgtatggtagtagctcacaaggctatgttcccgagccctcaaggcagtggaactacgggcagcagagctacaatcctgagccttattctaggcagtggagttctgggcaacaaagctacaacactgtcactgctgagccttccaggcagtggagctccgggcagcagagctacagcaacccagctgagccttcaaggcagtggagttcatcagcacatgcacgaccaagctacaaccctgagccttcaagaccctggaattcaggtcatcagagtcaaaaccctgaggcatcgaggcaatggagtcatcatcatggaaagcaagaacgttataatccgacagatggtagaaattcttatgatcaacattggaggagatgatgagggtcaccattgtatattagctgattcttgaggtggttctccgggcttttttttcccttttttttttttttctttttgatgggaagctttgtgattcgtttactttgggccttgtgattggcacagaggccattgagaaagctatacatcatgtaccaaatgtagtaggagtgggggaaacaaaaaacgagaaaactaaaaaaaaaaaagagaggatgcatcagctgaattgctgaatccattgatggataaaaagtttcacttcatatttc

SEQ ID NO: 19730 - DNA, 650 bp, Oryza sativa
  ref <308>: DATABASE ACCESSION NUMBER: AK070075
  ref <309>: DATABASE ENTRY DATE: 2001-12-06
gatagcttcgccatttcaaatctttgcttaggagtagcgatcgagagaggcaatggaggtggagatggggcacggagaggaggtggcggcggcgatggaggaggaggagctgcaggggtgggagacgccgaggagggaggagtgccgcatcccggtggtgccgccgcagtgcccggcgccgccgaggaagaggccggtggcgctgccggagctggggaaggagcggcgggagccgcccaagggcgggtacttccagccgccggacctcgagtcgctcttcgtgctcgcgccgccgcggaggcaggcgtccagctgcgcgtagtgctgctgcgcccagtctccgtgcagcagcacgcacagtgtgttggttgctgctactcctacattatagtagtgttactagtacagctttagccttttgtgtagggattgctgctaactctgcagttgcatcttgtttggtggttttttttgtggagcaagatggatgtgcatttgctgttctgcttttgtgatgggaagtagctgtatctatctaccgccctgcgtgtgaaatcctgttaatttagcagggggaaaaaaaccctatgtatctatgtacatgttattccaagttcagaaaatgggaaaaaaatgttcctgaacttctg

SEQ ID NO: 19731 - DNA, 1098 bp, Oryza sativa
  ref <308>: DATABASE ACCESSION NUMBER: AK070076
  ref <309>: DATABASE ENTRY DATE: 2001-12-06
gcattggtgtgggtttcgtggcagatatacgccgtatgaatgttgctcttactagagctaggagagctctatgggttgttggtaatgccggtgctcttatgcagtctgaggactgggctttactgatagcagatgcaaaggccaggaaatgttttatggatcttgataccattcccaaggacttccttgccatgaagatctctaacactccaggaaggaacacttcaaataacataaggaacatgaggactggtggaccaagaccgaggcatttggaaatgcttccagattccagggttagcatgaggcctgatgaggatgaacgttctaactctgttccgagaaatggcagttacagaaatttggatgatctgggacgtcctggtgataggtctagagataatttgccttttggaatgcctaggaggccgaattcgtcgaatggttcaagaagagaagtgtaaagaatgcactgctgtaactgtacatttgcttggtctgtgcagccctggacagtcttggatggacaaggtggcgtctattcagaagatgtgcacttggctctaccggtggatgggatggtgatgggaaggtgttggtattcacaacaccagacgattgattatgaaaccaagcctctagtgacaatgggttgtaagcctcaggtgcctgtacctagagatggcattttgttggatgggtgcctcatggaacaaagttgcttcatgtcgtcagtgtttcgaaacatcacaggatttccatatctagtgaccagaattgagcaaggtgtcagctggacagattatgcctgacattgcaatgcttgctttttagcatgctttaacagaacctatcatctcatagatatacatgcatgggcattttcattttgaaaacatgccgggagaaaaacaactctcactggctctagagcaggttaggtttcaagcttttgttgcaagattgctgctgcagcgaacattcatgcttgatatgtcctgtaggatttatgctaacataggcagggcttttgtaacatatgacataagctccctctgtatacaaaatccgcatctagaaaagttgattatttgatcc

SEQ ID NO: 19732 - DNA, 1991 bp, Oryza sativa
  ref <308>: DATABASE ACCESSION NUMBER: AK070077
  ref <309>: DATABASE ENTRY DATE: 2001-12-06
ggtcgtcaccaacttcatgggcacctccttcatgctctgcctcctcggcggcttcgtcgccgactccttcctcggccgctacctcaccatcgccatcttcaccgccgtccaagcctcgggggtgacgatcctgacgatctcgacggcggcgccggggctgaggccggcggcgtgcgcggcggggtcggcggcgtgcgagcgcgcgacgggggcgcagatgggggtgctgtacctggcgctctacctgacggcgctgggcaccggcgggctcaagtcgagcgtctccggcttcggctccgaccagttcgacgagtcggactccggcgagaagtcgcagatgatgcggttcttcaactggttcttcttcttcatcagcctcggctcgctgctcgccgtcaccgtgctcgtctacgtccaggacaacctcggccggccgtgggggtacggcgcgtgcgccgccgccatcgcggcggggctcgtcgtgttcctcgccgggacgcggaggtacaggttcaagaagctggtggggagccccctgacgcagatcgccgccgtcgtcgtcgccgcgtggcggaagcgccgcctcgagctcccctccgaccccgccatgctctacgacatcgacgtcggcaagctcgccgccgccgaggtcgagctggccgcctcctccaagaagagcaagctcaagcagcgactcccccacaccaagcaattcaggttcttggaccatgcggcgatcaacgacgcgccggacggcgagcagagcaagtggacgctggcgacgctgacggacgtggaggaggtgaagacggtggcgaggatgctgccgatctgggcgacgacgatcatgttctggacggtgtacgcccagatgaccaccttctccgtgtcccaggcgaccaccatggaccgccacatcggcgcctccttccagatcccggcgggctccctcaccgtcttcttcgtcggctccatcctcctcaccgtgcccatctacgaccgcctcgtcgtgcccgtggcgcggcgcgccaccggcaacccgcacgggctcaccccgctccagcgcatcggcgtcgggctggtgctgtccatcgtcgccatggtgtgcgccgcgctgacggaggtgaggcggctccgcgtggcgagggacgcgcgcgtcggcggcggcgagcccgtgcccatgaccgtgttctggctgatcccgcagttcctgttcgtcggcgccggcgaggcgttcacctacatcggccagctcgacttcttcctccgcgagtgccccaaggggatgaagacgatgagcacggggctgttcctgagcacgctctcgctggggttcttcgtcagctcggcgctcgtcgccgccgtccacaagctcaccggcgaccgccacccctggctcgccgacgacctcaacaagggccagctccacaagttctactggctcctcgccggcgtctgcctcgccaacctcctcgtatacctcgtcgccgccaggtggtacaagtacaaggccggccgcgccgccgccgccggcgacggcggcgtcgagatggccgacgccgagccatgcctccactgatccacaccgtccatccatccatccatcagacggctacgatttcttcttcgcatcttgtactatatatatactagtatactactagtacgtacgtacgtacgtgtgtaccaagcgaggcgtgtatgcgtatacgtatacgtgtacgtgtgcctgcgtgtagtataatggaattaataacttgttagaggggggaaacagtaaaaaaaatgacgaaattaatggtggggattagggagagatttttaagggtggtggtggtggggtcggggtgtcagtgactcgaggttggtgcattttgtgtcgtgtgggagagtcttcgtggtgtggtaaaaaaaaagagaacaccacggcttcatcagtgtacaatcatccgatcgaaaggaaaagatgaaaaaattgcgtgcttttcatt

SEQ ID NO: 19733 - DNA, 2115 bp, Oryza sativa
  ref <308>: DATABASE ACCESSION NUMBER: AK070078
  ref <309>: DATABASE ENTRY DATE: 2001-12-06
gagttttatgttcccattccattccaccatgcggtccacgccccctcgattctctctgctttccgcgctgctgctgaccgacgacggccgcgcccctgtcccggtctcctcctcgtccctcctccccgcctctccagtcttccagaacatcgccaccgccaccgccgccgccgccgccgctcgccggccacgaccgcccccggcccatctacacctccgccggatctcgcagccgcgctccccccattggagggagatccgttccagcgcgtgggatttaatttcaacacatgactggtgaaatgtttgcttgatgatgtccggacatgatttcagtattgttcataatgcagttggcatctcatgccactcaagcggatgaagcaacagagcttgcttccagctgtgattgtgcagaagtgccagcttcacagcagatagtttctgaatcaagtacagcaggaagctccacagagcatctagtttcatgtgaaatcaagccactgggtgttgatgaagacattgaaactattgatgctaacgaagaaacccaccttgtcattcaagactgtccacaatgccggatttgccttgataatgaaggtgatgacttgattgcaccttgtcattgcaagggcacacagaaatacgtgcatcgatcctgtcttgataactggagatcaacaaaggaaggttttgccttttcacattgcactgagtgtcgggctgccttcttacttcgtgcaaatgttcctccagatcgatggtggttgagattgaagtttcaacttctggttgttagagatcacacgttgattttttttattgtacaactggttgttgctttattgggtatgctagtatacagattttatggagatgaactacgagaaatgtttggttatgaagagcatccatatgctttttatgcaatggcaatattggctattgttttggttggtttgctgtatggattcttcatagctataatatgtgggcagaggatcacagaacggcattaccatgttcttgcaaagcaagagttaaccaaggagtatattgtagaggatcttgaaggaactgatggagttcctgaccttgatcctaatcatgttacagagctgaggattctggggctatattgagtactggagatatcatcaattcatcaggtaggaaatttagcacttgtgctataaaatgtctgtttagatctttttatgtggttgctacttcctcagagatctctctttgcatcctacaaatgtagcagagctcttgattaacaatagccacttaaaatgataaaatgtggcatcaagcatctcacacatccatattttgccccagacatatgtttttggtcattttctacagttttgttttgtactaatgtgcaatgcatgtgatgccaaagtatttctggataatattttatgatcactgaggttttgctactgcgtatggtcagttgaatgccacaaatagttctttcactgtgataagatgaagaaacttgtacagaagagccccgttttttaatcttttttttttaacctaggagtgcttatagctgacttatatactagtgatccaagatgaatcattgtaactcagttagatcttccacattttctgaaaacagttggattcagtccttgagagttgataaaccatgcttgatgtggcttctgatgaacagattcagacacacctcaaaatcttagtttttttttttgtttcatgggaacaacacttggctaattcaagttacaatacaaagatttcccaccacaagggacgtaccaacttgatttgaatatgccatgagccatgaagagtgcatacattttgatggagaagctgtagatatatatattcatagcttcaccttcctattgagatccaaaactaaagtaactgcattgcaataaccaaatccatcaattgttgttgtgctggcataaatcaggctaatttctgattaatcttttgtactatttgcaatgctattacttggcttaagaaagagcaaataaaaaatgtgattaaaagacctgatgagatgatgagaaaacgggaaaaaattataggagaagaaaaacaatgtagtcg

SEQ ID NO: 19734 - DNA, 1774 bp, Oryza sativa
  ref <308>: DATABASE ACCESSION NUMBER: AK070079
  ref <309>: DATABASE ENTRY DATE: 2001-12-06
gactgttgcccatctccttcttatcgctgttcctccctaccgccgccacttccgccctcaaccgccaccaccgtcgcatgagatccaccttctctctccccctcgtggaccttcctacccccgctgattcaccgccaatgcgtcaccgcctcctacgccggtcacgatctccatcatcgtaacgcacaatctaaaaagatacaaactccatccctcccccccccccccacccccctaaaccctaattagtcatcctgttgtccataatcgttcagatcgtcggggaaggcctcgtcgctcgtcccactcctctatgtcgcaccccgatctgggctgatgtatgccatgcataccagatattacggaagggagggctaaaggaggagaacattgtcgtgtttatgtatgacgacattgccaataatatacttaacccgagaccaggggttattgtcaatcatccacagggtgaagatgtttatgcaggagttccgaaggattacactggagacgaagtcactgcaaaaaacttttacgcggttctcttgggcaataaaactgcagttactgggggtagtaggaaggtcatagatagcaaaccaaatgaccacatatttatcttctactctgatcatgggggtcctggagttcttggtatgcccaatctgccatatctttatgctgctgacttcatgaaggtgttacaagaaaaacatgcctccaatacttacgctaaaatggttatatatgtagaagcgtgtgaaagtggcagtattttcgaaggtttgatgccagaggaccttaatatttatgtcacaacagcgtctaatgcagaagagagtagttgggggacgtactgcccaggaatggaaccatcgcctccttccgagtacatcacctgcttaggtgacctatacagcgtttcttggatggaagacagtgagactcacaatctgaaggaggaatcaattaagaagcagtacgaagtggttaagaagcgtacctctgacatgaacagctacggtgctggctctcatgttatggagtacggggacaggacattcaaggatgacaagctttacctataccaaggtttcgaccctgcaaatgccgaagttaagaacaagctatcatgggaaggcccaaaggctgcagtcaaccaaagagatgcagatcttcttttcctctggagaaggtatgagctgttacatgacaagtccgaagagaagctgaaagctctgagggagatcagtgacactgttatgcataggaagcttcttgacagcagtgttgatcttgtcggaaaacttctctttggatttggaaatgggccttctgtgcttcaagctgttagaccttctggtcagccactcgttgatgattgggattgtttgaagagaatggtacggatctttgagtcgcattgcggaccgctcactcagtacggtatgaagcacatgagggcgtttgctaatatttgcaacaacggtatctctggcgcttcaatgaaggaagcaagcatcgctacttgcagcagtcacaactcgggtagatggagctcgctggtgcaggggtacagtgcttgatctgccgcaacacgtgatatagcctcaaaacttatgccttgtactcgtacttcctcaaaacaataccttcaggactgcaaataaccgtccaaggatgtaccgctgtatgctactgtacctctatgtgtgcaatatagatgccctgtatatacgagtatatgaatgaatcgtgtgcttttacatgcccg

SEQ ID NO: 19735 - DNA, 2978 bp, Oryza sativa
  ref <308>: DATABASE ACCESSION NUMBER: AK070080
  ref <309>: DATABASE ENTRY DATE: 2001-12-06
ggcaaatgctcacctcctcgctcccgccgcccaccgtcccgggctccaagcccaggcccgcggcggccacctccgtctccaccgctgccaccgccgacgccgcggtcgctggtggccggagcgggagcgggagcgggagcgggatcggccgcctctccgcgctcatccgctccctctgctccgcaggccgcaccgccgaggccgcgcgcgccctggccgacgcgggggacgctgcgggcgtcgtcgcctacaacgccatggtcgcggggtactgccgcgcaggccagctcgccgccgcgcgccgcctcgcggccgccgtcccggtcccgcccaacgcctacaccttcttccccgtcgtgcgggggctctgcacgcggggcaggatagccgacgcgctcgaggtgctcgacgaaatgtcgttcaaggggtgcgcgcccatcccgccaatgtaccacgtcatcctcgaggccgcgtgcaggagcggcggtttccggaactcggtgagggtcctcgaggcgatgcacgcgaagggatgcactctggacaccggcaactgcaatctcgtcctcaatgcaatctgcgagcaagggtgtgtggacgaggctgtggggctgctcaggaagttggcattcttcgggtgcgaggccgacatcgttagctacaacgcggtgttgaagggattgtgtatggccaagcggtggggagatgtggaggagctcatggatgagatggttagggtggactgcgcgcccaatatcgtgacgttcaacaccctgattggttatttgtgccggaatgggttgtttgagcgggtgcacgaggtccttgcacagatgtcggaacacggatgcacacctgacatcagaatgtacgcgactatcatcgatgggatctgcaaggaagggcatctggaggttgcgaatgagattttgaataggatgccttcgtatggtctcaagcctaatgttgtttgctacaacaccgtgttgaaaggcctgtgcagtgctgagcggtggaaggaagctgaggaattactgtctgagatgtttcagaaggactgcccccttgatgatgtgacattcaatattcttgttgatttcttttgccaaaatgggttggtcgacagggtgattgaacttcttgagcaaatgttgagccatggatgcatgccggatgtcatcacatacacaactgtaatcaatggattttgcaaagaagggcttatcgatgaagctgtcatgttgcttaaaagcatgtcatcatgtggatgcaagccaaatactgtcagttatactattgtactaaaaggtttgtgcagcgccgggagatgggtagatgctgaggaactgatgtctcaaatgattcaacaaggttgtcctccaaatcctgttacatttaatacactaatcaatttcttgtgcaaaaaagggttggttgagcaggccattgaacttcttaagcagatgctagtgaatggatgcagtcctgacttgattagttatagtacggtgattgatggacttggcaaagctggcaagacggaggaagcactcgagctactaaatgtgatggtcaataaagggatcagcccaaatacaataatttattcatcaatagcttgtgctctatctagagaaggcagagttaacaaggttattcagatgtttgacaacattaaagataccacaataaggtctgatgcagtgctctacaatgctgttatttcttcgctttgtaaaagatgggaaactgatcgtgctatcgatttctttgcttatatggtgtcaaatggatgcatgcccaatgaatctacctacactatgcttattaagggtttagctagcgagggattagcaaaggaggctcaagagttgctgagcgagttgtgctctaggggagctctaaggaagcacttgatgaggcattttggaattgtatgagctgatagtattactggcttactgccaaatgccagtgcctaatggttttggcattgccagcacaaacttgcctacttgaagctactacagctcatgatggttcgtaggtgaaagcctataagagagttccttttttttaccacatcgtatagcataccttacggctttcatgcagtttattacagtggcatacgtaagttgacaatccaacattgtctcaagacatttctttgctagcagcatctttcttattaatgttgttgaagacactgagaattcagattcattggagctttcagagctttgtcattattgctaattgatgtatcagaaggatctacttagctgttttatgaatattgtatcagagtattatctaactttccaatttcattacaatagtaggagaaaccgtcttacatatagagcaattgtactcaagaaaatggaaagcagaaatgcgaagagaatctgactagtgcagtagataataattacaaacttcccattgaaatattgggctttttggagattcagaatttaaggccaggtgagtttgttgcttttgtgcccaaacttcatgctggttgttttggccatgccatcctccatctctaggtatcagctctcctttcttctgggatgaggtgaaaagcaattcctcacccatttcctttcctcctcctggttctggactgctggtttgatggaagtagtagctgctgcagcagcagtttgcagtgtgctcaacatatcaggctatgaggcttccgtgccagtgacaatcgtgagttctccaatacttctccttattcttgcctcactgtattgtccgtacttgttttgtcgacaaagggatttgcatgaattatatacacagtacttgtggcttctgtctgtctcagaagtgcactagttgaacagctgtaattgatgttaactagagctaatttctgttcatttttttttctgaaatgtactagttcatgtagaatttgtgctcaataatctgaaatctgatttcagttgaccgtttct

SEQ ID NO: 19736 - DNA, 2025 bp, Oryza sativa
  ref <308>: DATABASE ACCESSION NUMBER: AK070081
  ref <309>: DATABASE ENTRY DATE: 2001-12-06
ggcgttcgagccatcgagccgacaaggcgacaacagccacaacgcctcactccccccaccccacgcgctccgacgagctccgatccgccgcccacctcgccgcccgccggcgatgagcaccgcctccggcgacggcggggacggcggcggcggcggggatggcgcctcgtcggccgcggggggcggcgggaggcggatcccgcccgcctcgtccatgccgtgggtccgcaacctccgccgcttcgtcggcacgggcgccggcctcggatccgaggccttgatggaactggaaacaaaaaggatactgcttgagattttcaaggagcgccaacggaagagtatggaagctggtgccattccaagtttttataagaagaaacctgaagatggatccattagcaatagagttcagaaattggcaaagtacaggtttctaaagaaacaatctgaacttctgcttaatgctgatgatcttgatgccatgtgggtttgtctcagagaaaattgcgttattgatgatgctacaggtgctgaaaagatgaattatgaagacttttgccatattgcaacagtatgcacagagcagatcggccagaagtgcaagcgtttcttcagcccttcaaattttatgaagtttgagaaggatgattctgggagaattgcaatcctaccattttatctttatgttatgcggacagtatctctcacacaagcgagaattgatatgagtgagcttgatgaggattctgatggtttccttcaacctcatgaaatggaagcatacataagagggcttatccccaatttggcacaactgcgtgatatgccatcagcatttgttcaaatgtactgccgcatagctgcacgcaagttctttttcttctgcgatccacacagacgagggaaagcatgcataaagaaagtattgctgagcaattgtcttcaggaacttatggaactacatcaggagagtgaggaagaggttactgatactgagcaggctgaaaattggttttccctgacgtcagctcagcgcatttgtgatatgtttcttgcacttgacaaagatacaaatggaacattgagcaaacaggagctcaaggaatatgcagatggcacattgactgatatcttcattgaaagagtttttgatgagcatgtacgccggagcaaagttggaggtggcaacagtcgtgaaatggactttgaaagctttcttgactttgttttggctctagaaaacaaagatactcctgaaggattgacatacctatttagatgccttgatcttaatggaaggggattcctgacaactgctgatatccatacattatttagggatgtacaccagaaatggattgaaggcggaaactatgaactttgcatcgaagacgtgagggatgaaatctgggacatggtaaagccggcagatcctctcaggatcgcactaacagatcttctatcttgcaagcaaggcgggactattgccagcatgcttatagatgtgcgcggcttctgggcccacgacaacagagagaacctcctccaggaagaggaagagcaagtggaagaggcctgagttctccagctgccgtgcaaccaacctggtaaactctcaaccgcaaggcactggcaattgctggtatctcgcaaccgcaaggcacgggcaattgcttgtaccactgtatgtgtgccattgtagcttacatagtgtattagaatcaagttcaacctgttcgctgggagacttgttgtaacctgtaagtgttccatttgtgtaaccggagtgaaatctgacatattttgagttgaacatggttttgtcgtgtcgaccagatgtattaccgcagggcttggttggatgcagaaaggaaagcctcagcctgtggaatttgtacgtctatgcgacaccacgcatgtaattcggtttgcaactgcaagtctatatacgcaaaaatacattgtatgccctttgatgcagtggttatttgtgcccttctccgtgccaatcactagtttgctttc

SEQ ID NO: 19737 - DNA, 960 bp, Oryza sativa
  ref <308>: DATABASE ACCESSION NUMBER: AK070082
  ref <309>: DATABASE ENTRY DATE: 2001-12-06
gttactgctccccccatcgaatcgaatcgaatcgaatcgaatcccctcacgattccaccaatcctccgccgccggaggaggaggccagggaatcgccgccgccaatgtcgctgccggtggcgaagctggggacgctggcgctgcggacgctgtccaagcccatcgccagccgcctcaagaaccaggccgccgtccaccccaagttccgcaacttcatcatctgcatcgcgcagattaaccatcgtgttactacaaggatacaaaggcgcatttatgggcatgcaacagatgtggaaatcacacctttaaatgaggagaaagctgtacaagctgctacggatctcattggagaaggctttattttttcggttgctgttgctgctttaatttttgaggtgcaaagaaatgcaaggtcagaggctaggaaggaggaagctcgtaaacaggaacttgaggaattgaaacaacgggaagagagtttatctaaagatttggaggatcttaaactgaggcttgctgaaattgagcacctcgctaaaggacgaggcctttcaggaatcttgaacttcaaaggtgttcatggagcagaaagcagcaaggcagcaacacctgcttgatcaatcaaattaacttgggtcaggcgaaacaggatgatattttgttaagttgatgcgcaaaacacctcaaaatttcactgatctgttttgtgattcttgtgtggcagttcattgccatgcccattcttttggtgtatggatcaaaatatatgccggatgatccatagacaccctaaaataatagaggccaaggatagaaaaaggcactgtatcatgtagattacttctgggtaagtaactatagaacaagttcgaaagagtaaaagtgaatgtgatattgtactttgctaacacatcacgcacatagctacggctgaactgaatgcctccttttactctgtct

SEQ ID NO: 19738 - DNA, 2044 bp, Oryza sativa
  ref <308>: DATABASE ACCESSION NUMBER: AK070083
  ref <309>: DATABASE ENTRY DATE: 2001-12-06
gaggagacctcgccgccgatcgatcaatcgccgccgccgtctcctcgtgtaaccctagcttagtggattagtttaagtgtttgccggagattatggggtcggtggcggcggaggaggtggtggtgttccggtcgaagctgccggacatcgagatcgacaacagcatgacgctgcaggagtactgcttcgcgaggatggcggaggtcggggcgcggccgtgcctgatcgacgggcagaccggggagtagtacacgtacgcggaggtggagtccgcgtcgcggcgcgccgcggcggggctccggcggatgggggtgggcaagggcgacgtggtgatgagcctcctccgcaactgccccgagttcgccttctccttcctcggcgcggccaggctgggcgccgccaccacgacggcgaacccgttctacacgccgcacgaggtccaccgccaggcggaggccgcgggcgccagggtgatcgtcaccgaggcgtgcgccgtcgagaaggtgcgggagttcgccgcggagaggggcgtccccgtggtcaccgtggacggcgcgttcgacggctgcgtggagttccgcgaggtgctcgccgcggaggagctcgacgccgacgccgacgtccaccccgacgacgtcgtcgccctcccctactcctccggcaccaccggcctccccaagggcgtcatgctcacccaccgcagcctcatcaccagcgtcgcccagcaggtggatggagagaaccctaacctgtacttcagcaaggatgatgttatactatgcctgctgccactgttccacatctactcgctcaactccgtgctgctggctggcctgcgtgccgggtcgaccatcgtgatcatgcggaagtttgatcttggcgcgctcgtcgaccttgtgcgcaagcacaacatcaccatcgcccccttcgtgccccccatcgtggtggagatcgccaagagcccccgcgtcaccgcggaggacctcgcctccatccgcatggtcatgtccggtgccgcgcccatggggaaggaccttcaggatgcattcatggccaagatccccaatgccgtcctcggacagggttacggtatgactgaggctgggccagtgctggcaatgtgcctggcgtttgccaaggagcccttcaaggttaagtccgggtcgtgcggtacagtggtgcgcaacgcggagctgaagatcgtcgaccccgacaccggcacctccctcggccggaaccagtccggcgagatctgcatccgcggagaacagatcatgaaaggctatctgaatgatcctgaggcgaccaagaacaccatcgacgaggacgggtggctgcacaccggagacatcggcttcgtcgacgacgacgacgagatcttcatcgtggacaggctcaaggagatcatcaagtacaaggggttccaggtgccaccggccgagctggaggcgctgctcatcactcacccggagatcaaggacgccgccgtcgtctcgatgaaggatgatcttgccggtgaagtgccagtcgccttcattgtccggacagaaggctcagaaatcaccgaggatgagatcaagaaattcgttgcaaaagaggtggtgttctacaagaggatcaacaaggtgttcttcaccgattccatccccaagaacccttccggcaagatcctcaggaaggacttgagagccaggctcgccgccggcatccccgacgccgtcgccgccgccgccgccgatgcgcccaaaagcagctaaggccaacgccgacgttttctctattttcagtcacacaaccggtgaaaaaaaaatgcagagatatgatgttgctgtccatgaaaatggaggcagaaatggagcagaggaagtttatagtttggtttgttggttggttgatgctgctgcagcagcttgtgcaatgttcataaaatggcattaataatattattattattattatacatagatgatgtattgtttttgaccataagaacaaggctgattacaaaataatacagtgtattaattacgccctgtttctctct

SEQ ID NO: 19739 - DNA, 1871 bp, Oryza sativa
  ref <308>: DATABASE ACCESSION NUMBER: AK070084
  ref <309>: DATABASE ENTRY DATE: 2001-12-06
gagtggacgcccacgcgaatacgcgatcctccccttcctcctcctccccaccaactcgatcgcgcgtcgcggaatccggatgctcccggcggcgctgctcgccgtcggcgcatgagcttcctccgcgcgctcgcggactccctgtcgtcgctgctgtactcggcggctgcgaaggggggagacatggacggggccgcggcggcgccgtcgccggcggcggtggtgggggagcgcgtggcggtgaagctcaggggatacttcgagctggccaaggaggagatcgacaaggccgtgcgcgccgaggagtgggggctccccgacgacgccgccgcgcactaccgcaacgcgctccgcgtcatgctcgaggccaaggccgcccgcgtcccggacgccgtatcctccagcgagagggggcaggttagggtctaccaggagaagatcgcaaagtggcagactcaggtggaggaacgactccgggtgctcggccagaggagtggagcggctgcaccagtgccaaagaaggttgttacaaacaatcctgttaataggaatgacagagccgcatcaactagcttccataggcctacttcgcagcctagccctacctttaatagaggtggtcaagcatcttctcatcagaagagtagcagtggaggtgccaaacctgtgcaaagagctggtgcaaactatgatgataagcttgttgaaatgataaatacgaccattgtggatagaagtcctgctgttaaatgggaagatgttgctggccttgacaaggcaaagcaagcactcatggaaatggtcattttacctaccaagcgaagggatttgtttactggtcttcggaggcctgctagagggcttcttctctttggtcccccggggaatggaaagacgatgcttgccaaagctgttgcatcagaatctgaagcaacattttttaatgtttcagcttcttcactgacatcaaagtgggtaggagaggctgaaaagcttgtacggacactcttcatggtcgctgtcgatagacaaccatctgtaatttttatggatgagattgatagtgtcatgtcagcaaggttagctaatgagaatgatgctagcaggcggttgaaatctgaatttcttatccagtttgatggggtcacttcaaaccctgatgatcttgttattgttataggtgctaccaataagccacaagagctggatgatgctgttctccgtagactggtaaagagaatatatgtgccattacctgatccaaatgtccgaagattactgctgaaaactcagctcaaaggacaatcattcaaattatccagtcatgatcttgaaaggcttgctgcagatactgaaggatattccgggagtgatctgagagcattgtgtgaggaagctgccatgatgccaatcagagagcttggtccacaaaatattctcactataaaagcaaatcagttgcggcccctgaaatacgaagatttcaagaaagccatgactgtgattaggccaagcctgcagaagagcaagtgggacgagctagagaaatggaacgaagaatttggttcaagttgacactagacaatggtgcgccctatgcatcagcagttttaatttggccagtattaccatctcctcaacataactattggtttgcaagtggtcgcgcgcccattcaggcattgatatcccttgccatctgtaacatgtacatgtacaagaaaaccctatatttcatgagccatttgagaggggaagctaaagatgaactcacggtgtaaataaacgcccatagcttcaacccgtaccaaaacagtcatgtaaacaaacactgctaaaaatttacatataccactgttccgttactttct

SEQ ID NO: 19740 - DNA, 3387 bp, Oryza sativa
  ref <308>: DATABASE ACCESSION NUMBER: AK070085
  ref <309>: DATABASE ENTRY DATE: 2001-12-06
ttgggttgatcgaggtgagcgtttcctgacctacttgctcggattaattacaaattgatttgatcacgtagataattacatcatcatcatattgatggatggatgcttgcacatatatgcatgcgttttgaatctggtgatgtaatgatatccaattaataatcttgctgcaacacgaaagctcagccagtttaattgatttgatttagttaatgccatcgatctcaggcttgattatcgattggctgttgaatgcacggattaatcaaataggttgaaggcacgcaatgcaaaattccaaattgattgtggacctcttcggtttctccttgtataagaccttgaatttagaaattattagtgagctatcgaaagttttcagtggcatcacatattatctgcttacttggaacatatagaaaaatagaattattaattaataaattaattgtattgagcattatacttccttagtctgagagtatatagcattgggcataaagttagtattaactattcaccatgtaactagcttcttagtaaaggtacaaattaaggactgaagagaaactccagacttttaatcttcaaactgaaggcaagtaatacattttcagcccttccatttagttccttggaggatcaaattcaaatgttgcgacggatgaagacgcacgaaatttgatgcttttatcgcacgttcatgtagtatttggtcaatcgatctctgcatcatgccttgaccaagatgcatatttagtttgatgatctctgttgcttccaattgcactccattaattgtttgaactaatagtcgttttgcttcatgtaatcgaatgcttcctgcgttcgattggagagagaagtgcactccaatgctgtaccaacagtactcttgggtttttctcttaggagagctttatttagagtgaaagggacttcctaattaagatttctttattttgaaagaagctagtaattaagatttcttaacatatgcacacgtgaagttataaaacatgactcaaatctgatgttgatgtgtgttcgaccaagtccctaatcagtttttgcactttttcttctgatttctcacgccaactgatcaattaaggcaagtaggattttagttgtgttcttttcttattgttttcctttctcttgcttttcgctttctcacctcctacctccttggagacagtccacaattgtgaattttcaacattagaaaaataatcacaattttgtggaaatgattgaaaaactaattaataggttgcatttcacatgaacatagttaattagagaacaaaatgcatacactaggtgttagagcagtacaaaagttatagaagatgtcactgcttactgcatgagtatctttcttcacaatcccattccatcataaatattgcctaaacaattccactcaaccttgttgcttgttcaactttaattctttcataacttgatatgaaggtcaggacaattactgtagactagtttcttcatggttgcacgctgaataatcgtacacagatgcccttgctgtctctgaattctcaaacactgaacatatattgtagaacattttacacctattcctgtctgatctcttgctgtgtgtgtacggagcatgctgccgttcttcccaagactttgtgtctcaattggttatttttgacttgaagcgatccgtttcggtagtccctgaggcagctagcgtaagcctcttttgacttccaagcacacaagttacttgctgcctcagattcatcagcaagtcactagtacttttcggtatctagatgaagcatatatataaaccacaagaaaagcggctgcccatttgtgttctgatcatgaggagattcaggtggtttcttgaaaggatgtgaatctgtggttgcaagatactgaagaaagtaataaggtggttcttcaatcttcataggcttcagagttcagagttgagttaatgtttttgcaaacaaggtgtctgctgacagtttgacagtaaaaagatctgtatatatgggttcctgcggtaacggtagaagctctgaatatgatgatcctgcatcattagagaagatggaggaactggttttacctctgaaattgatgcccttacacaccaatggccggttgtatgacatgaggttgtcctcacctactgctacctgtgtgatcaatagttcatctggttcattcgacccgatctaccgagcttggacgaagaagtatccttcagctctaaatgcctttgaccacattgttgcctatggcaaagggaagaagatagcgctgtttttggactacgacggtacactgtcgccaattgtcgatgaacctgacaatgctatcatgtctgaccagatgcgcgaggtggtgaggaatgctgccttgcatctacccactgcgattatcagtggaaggtctcgtgataaggtgtttgattttgttaaactaacagaattgtactatgctggtagccatggaatggacatcatgggtccagttggggaacatgattcagttactaaccataggagctccattaactcaaatagaaagcagggcaagggagtgaagatcttccaggctggtactgaattcttaccaatgatcaatgaggtttttagattgctcatcgataagacaaaggcaatcgacggtgtgaaaattgagaacaacaagttctgtgtatcggtgcactaccgcaatgttgaggagaagaattggcaacttgtttctcaatgcacaaatgatgtcctaaaagtctaccctcgcctccgattgactcatggacgaaaagttttggaaattcgtccagtgatagactggaacaaggggaaggctgtggagttcttgctggactccctagatctagctagctgtaaaaatgttctccctatttacatcggggatgattgtaccgacgaggatgcttttaaggttcttcgtgacgataaaaggggtttcgggattctggtgtcatctgtaccaaaggattctcatgccctatattctctgattgatccatctgaggttatggaattcttgaaaagactagtgatgtggaagaacgaagaagcatcacataataagtagattataaatatatctgatgtttactctagggtagatttctgaattctgacaaagagaataagcagaagggcaacagaattaacttggacatagtggacagttgtacatcatatagttaatccattttcttagcctagcaagtggcaaaataaaagtaattgccatgttgtacaagaatgcgaagcattctgcacaagtccagttctttgaataatggtctcagttgtagaatggtgtaacttgttaatgaactgtgatataaatttttgggct

SEQ ID NO: 19741 - DNA, 2100 bp, Oryza sativa
  ref <308>: DATABASE ACCESSION NUMBER: AK070086
  ref <309>: DATABASE ENTRY DATE: 2001-12-06
gggcggcgtgctccgggaagcgagccccgtggtggcggcggtggtgcggagcacggcacggcatctctctctcgcgagcgcgcgagcgagcgaacgctagatctgcgaacgcggggtttggttccttcttcttccgcgatcgcttcgggttgatctggctgatgctgcttcggcggaggccgcgctgattaattgctggaggggagagagagagagagagtttgcgtcaatgcggatggcagcgggagggaggtgctgcttccggagaggggctcccgcggcggtgctcgtgctgccgctgctgctgctgatcgccgcggcggcattgccccggcgggcgctcgcggccaccgtcgccgccgatgttgctgctataaatggactgtatgttgcacttggatcaccggctcttcctaaatggactgcgaatggtggtgacccctgtggtgatggttggcagggcgttgtatgtattggctcaaatatagattcaataattttcaatgctgcaaatttggaaggacagttaggcagcctggggaacttcacttcaataaccactataaatcttagcaacaacaatattggtggaactataccagaagatctacctgttacactgcagcatttttttatgtctgataaccagctcactggaagcattccgacgtcactatcaatgcttcagagtttaacagacatgtctctaaatgataatcatctcgacgggaaactgccagatgcttttggttcccttactggccttgtaaattttgatatttcatccaataacttcagtggttcattaccaccttctctgggaagcctgtcatcattgactacattgcacatgcaagacaaccaactatccggaacccttgatgtcttgcaggatctccccctcaaagatttaaatatagagaataattcgttttctggaccggttcctccaaagttgctgaatgtgccaaacttcaaaaaggatgggaacccatttaataccagcatagctccttctgcatcaccctcttcaacacctacaggctctacaccaacacaaacaccatcgtcaccttcatcttctggaactccttcgccatctagttcgccctctaattcttctggtggatctactgctcgagacagcagctctccatcatctaggaaacataagtcttcaaccctcaggattgttggatatgttcttctagctattgtcctgtttatagttacagtgctgctggtaatattttgcctgtccaagtaccaagagagacagtcaagacgtgattatacaacaagtcaggtggggagggttcatcagagggttgaagagccgaaagttaagcaagcttcagtgcagtcaaggaatgatgccaaaaaaggatcaacagaggttcctgaacggaggcaggttcgtgaaataaatttggcggtaccagctgctctcgagaagcctcctgaaaagagaaaagaacatgtaattaacttgcagcgatcagaaacagaaatttttgcttctacacctccgccgccgccgcctccaccaccaccacctcctcctcctcctccgacaccaccaccgccaccgccgcggccgccgccgccgccgccaccaccaccacctgttgaaaaagtgattgtaaatcccattgttaagccagagaaaagagttagtactccacctaggacaggtccctcgacatctgcaacatccttttctgttgcatcacttcagcaatatacaaatagttttgaagagggaaatttgataagagagagtaggttgggaaaagtatatctggcagaacttcctgaaggcaggttcttggaagttatgaagattgataacgccaatgataggataccggtagatgaatttctagaactggttgcaagtgtatcagatattaggcatcccaacatcctcgagcttgttggatactgtgcagaatatggtcagaggttacttgtttataatcatttcagtagaaaaacactgcatgatgtactacatgaaggggaggaattggatggtgcactatcatggaatgctcgcctccaagttgctcttggtgcagcaaaggccttagactatct

SEQ ID NO: 19742 - DNA, 1353 bp, Oryza sativa
  ref <308>: DATABASE ACCESSION NUMBER: AK070087
  ref <309>: DATABASE ENTRY DATE: 2001-12-06
ttgaggcagccaatccttcgtcttgcttggctacctatcttgcagggagctcatgccgctcgcgggcatggctctcctccagctccgggagcactgctccctcctcccaaatcccctcagacccgcgaggaatcctcgcaagaaccggctcttgccgccaaattcggccaaggttcccggcttctcaagaatctcaatccacggtgcgccgcccgcgcccgaggccgcaatcttggaggaaagggtggaggtggatgtggatgtggaggccgcggttgtgccgtggaggggcgcgttcctcttccccgtcgccgccgccgtcgtcgcgtcctggccgctcccttcgctcgcggcggaggccggcgggaaggtcagcctcgagtccatcgtggtggccatcgacgacttcaacaaccgcaaccccttcttcgtggccggggcggtgttcgtctggctcgtggcgatcccgctggtgcaggagtacttcaagaagtacaaggcggtgagcgccatcgacgcgttccgcaagctccgcgacgagccgggggcgcagctgctggacatcaggagggggaagagcgtgcggttcatggcgtcgccgaacctgaggctcgtcgagaagagcgccgtgcaggtggagttcgacgaggaagacgaggagggattcgtcaaggaggtgctggctagattccctgacccggcgaacaccgtcgtctgcgttcttgacaactttgatggtaattctatgaaagtggccgagctgctgttcaacaatggtttcaaggaagcttatgcaatcaaaggtgggctgagaggcccagaagggtggcaggcaattcaagagaaatatcttcccccatctgttcatgttgttccaaggaagaagagcaaagaatcagaggactctgatgttagcgctgatggaacagatgaccagctggaagtgaatggaaaattattagctacccctaatagttctgtagtcaatacaggcaatggagctgaagatagtaccgagaagcccaatgggagtacttcagccataaagcgtgcaagccggagaccattatcaccatatccaaattaccctgacttgaagccaccatcatcgccgacaccatcaaagccagagaggtagtagaacaataaagggaaataagaaatcagacaaagagaagaaatcagaggacaagggactaatgttgcaagaacagtcagtcatttccggcataaccattttgatatacttgtaatcgtgaatatagaggcgatcaatgaggttcacaatgcagaagaccattgctgttactgacatcatggtgaatcttatgtttgttggatgttgtatttttc

SEQ ID NO: 19743 - DNA, 822 bp, Oryza sativa
  ref <308>: DATABASE ACCESSION NUMBER: AK070088
  ref <309>: DATABASE ENTRY DATE: 2001-12-06
gacgccgtcgattcgagtattcgttcttcaagttttttttgccttcccggcgcctccacccaaacccccattctatccctccccaaaaccaccaagaaaatccttgtgatctcgcctccaagatcgatccatgtcgctggaaccggcctcaccttccgccgattccggtgtcaccagcctcacctccaccgccaacaatgtcgccgtcgtcgtccgcggcggcgacagcgatgacagcgatgacagcgacagcagcgacggcgtcggctacgacagcgacgacctgatggacgacatgatggacgacatcttcgagcagttcatcgagaaggacgagctgctggaccggatcggggcccgcctcgtggcgccgctgctccccgccgccacccgggcgcagcggcggcaggtcctggagcagagggagcaggcgcgcgcggcgcgggaggagctcaggcgcggcgtggcgaggagcagggagctgacgaggaagatcaggaggctcaagaggatggcgaacgccgacgtctccggctaccccgccgcgcggcgggaggcgcacgagagggagacgcggcggctcgcccgggagatcttcggctcggatgcctagcctggtatactctctctgatctgatctgatggatggattggttgcaatttgctttgctttgatttggaaaacagggatatcttcggttcggaattcggatgctaagtctggtagtaatacactatctgatatcccatggatgaattggttgaaatttgtttgctttgatcggggagacaatgcaatgctgtgctagtagattaaagggt

SEQ ID NO: 19744 - DNA, 1111 bp, Oryza sativa
  ref <308>: DATABASE ACCESSION NUMBER: AK070089
  ref <309>: DATABASE ENTRY DATE: 2001-12-06
gagcccagcgcagcaaagcgctgtggtaggccctttcccctcctcctccgaaaatgatggcggctcgccgtttctccgccgccacgccctcctctcccctcctcctccgccgccgcctcctctcctctcagccacagcccacggcggcggcggcggaggccgacgcgggcgcgggggagtgggtccgtcgcgcgggggcgctctcgcttctggggctcaccggcgccgtcgccgccagcgccgtcagcgacctctccgtcttcctctcctgctccaggcgatagagaaggcctcccagaaccagcaaatagtgaatgcgatcggcgcgcccatcgtgcggggtccctggtacagcgcttccatcgccgtgaatcacgcgaggcattccgtctcctgcactttccccgtgtcggcgcctcaaggaaatgggcttctcaagttcaaggctgttcgctcgggagatgagtcgtggttttcatttctgcagcccaatgactgggaaatactcctaatggatgctatccttgatgttcctactgacgatgggaaacaccaaacaattagggtaacaattccagacaacacagcacctccaccagcaattgattgcaaggcatgcaagtcccaaccaacgctgacgccaccaccacctccatctccgtcacctccacagaagtgaattcgtctggagaaattcttttggtccggaaatacctaccttggattagtcttttttactctattcctcattgaccatgaaagaaataagtactgcagttggaccgagagaacagcagattctttacttttgtttttgcaatgatacaacatagaataggttacctgattgttccccactcagcaatactttggaaggtggatccatcaatcactaaactagatttgctttaggacttgctagcgaggcagcgttttggcactcaagttttttagggtttatactacatgatactccatgagaatctaggttggttaattcagtgcttcttcctggttgtccaagccttctggttggcatgtggaaatacatcatactaaatactgatattatgtagcagtttgggtaggaatgtacgatttgaagttcaag

SEQ ID NO: 19745 - DNA, 851 bp, Oryza sativa
  ref <308>: DATABASE ACCESSION NUMBER: AK070090
  ref <309>: DATABASE ENTRY DATE: 2001-12-06
ggccacagatcgctcccagccattctctccgcgacggtctcgtcttccccacccctcgcctcctcgcgcgctcggtgagagaagcgaagaagaagaagaagaggaggaggaagaagccaggctaagcccagcggcatggcggaccagctcaccgacgaccagatcgccgagttcaaggaggccttcagcctcttcgacaaggacggcgatggttgcatcacaaccaaggagctgggaaccgtgatgcgttcgctggggcagaacccaacggaggccgagctccaggacatgatcaacgaggtcgacgcggacggcaacggcaccatcgacttcccggagttcctcaacctgatggcacgcaagatgaaggacaccgactcggaggaggagctcaaggaggcgttcagggtgttcgacaaagaccagaacggcttcatctccgccgccgagctccgccacgtcatgaccaacctcggcgagaagctgaccgacgaggaggtcgacgagatgatccgcgaagccgacgtcgacggtgacggccagatcaactacgaggagttcgtcaaggtcatgatggccaagtgaggcaccacttcccctgccgatgatggcatagtaccctgggaggaggaaaccgtgcattgccgtattagtaaggggatgcaaacactggtttcagtcgtcttccctgatgaagaaaaccgaaccgtactagttgtagttgctgaacatttttctatctctccagtctctccggtgtgccatggaacttcttgcttgatttttctgtgtgaatctgttaaggcttgctctgatctctccgaaccctgaattgcattgcagttgagtcc

SEQ ID NO: 19746 - DNA, 1003 bp, Oryza sativa
  ref <308>: DATABASE ACCESSION NUMBER: AK070091
  ref <309>: DATABASE ENTRY DATE: 2001-12-06
ggcccgtgccaccctccgccgccgcatccagctctcccggtcgccgccggccgtgggcgtccaccgcctccggcctccgaccctcccaccgtcgccgccctctgctcctcttatccgtcgcgcacgccctgcttccccgcctccggcggctaccgcctcctaacccctcctccatctttagaatccgaccacctccctgtcccatcccagtggctccggcggtggtgcgtcgccgccgccgaggtctccctctcaacgcaaggaccccttcctcccctagcccaaccccgaatccagtcaggctccagagatgctgaggaacatcctgtgccagtcgtggaggagaggggcttatgctcttcaagaaggcaaccatcctggggcacttcatgcttgttggagtagatttcacagcgggcagatgttaagctcttccaggagcttctttggtgtggaggactttatggacgaagacaacagcaaaccatacacatacaagaaggagaagagatcaaagaacccgcacaagcacatctccttcaagcagcgcaccatcgcctacatggagcccttcacgctcgacgtcttcatctccaagcgcttcgtctcggcgtccctcacccaccgcacgacgtgcaggcaggtcgcggtggccgggaccaactccaaggacatcaaggcggccctcaagtcgaggtcggacattccggcctgccttgccgtgggtcgcttcctggcagagagggccaaggaggctgacgtctacacctgcacttacacgccgagggagcgggacaagtttgaggggaagataagggcggtggttcagtccctgattgacaatgggatcaatgtgaaagtttacctggattgagttccctgctgtatgtttacagtactacatttgtttctgaaaatggtcatcaccattatcatgctgcattgctgctgattgtgagacttatggtgcccctgatgttaatgttttatcattttcctgtgc

SEQ ID NO: 19747 - DNA, 1432 bp, Oryza sativa
  ref <308>: DATABASE ACCESSION NUMBER: AK070092
  ref <309>: DATABASE ENTRY DATE: 2001-12-06
gcttccacgttacacagtatatctctcctatactatccaacatggtatcagagcgggcgatctaatcgcctctctctcacgcttccgctcgtcgcccctgggagggttctgatctccgggggcggccaccgtttcttttttttttcttctttgcgtcgtcatcgtcgttcttcgtcaagcagcaagcagcacatcgtcctccacctccgtcgtcctcctcggatcagatctcgcgtcgatgatgggcgccctccgctggctactggtcctcttcactggcatccccgatcccgtcgcacctgaccgccagccctcccggatctggatcatcggcggcgccggccaccaccaccacctccgatccgatctgctccaccaccaccggcgctccgggcggacggccacctcttcaccgcgccacatcctcagatcgtatctgagggaccccgtcgcctgccgccgccgacctcaccaccttcagatccacgccgttcgttcgccggctcctcctccggaccacggccgtcgtccggggggacgagctcccgttcgtcgtctccatgccgcgcgtcctgcaatccgccagggcgctggcctcgccgcctcgacgtccttgctggagccggtggtgtggacgcaagtcgacgggcggccggtggaggatgccgaggccagcgccatcggcggccaggaaccccgtccgccaccgcgtccacccggctgcacaggccccgtctcgtacgggccctcgtcgccggcgctctccactacctcgacctcttcgcggagcacttgcgtgagattgccgtggtcggtaatcaagctgcccgctctaatctgttttgtctccatctgctatgatcttgcacgtggcaagcaagtgaggagatagagacgagatgggtgcagagtcgtttagcatgttgaccgggtcatgtgtggcattggaggattctggatgctactgttgctgctgtacctttgtcctttttcccgttcagagaacgggtttgcgtcgcccaccgtctcgtcgatatccacgcgtcttcgacatcggcatcgactctgcttcgacttcatcgttccgtctcgggcatcttcggcttgatcactcgttcaagcgcccggctacaacgacttctgtaaccgatcgtcattgagcacgcgtctacgccaccaaccttcgggttgccgctgcgtcgccccattgggctgcagtgtcgccgcccgtggtccacctccaccggttgttggagttctcgccgctgcatcgacatcgagccgtacctgtgtcgccccttcaggtcacaacgttgcccctctcgtcgtcttcatcgtcgttcgcgcttcgacaccctcgtcgtccacactggtcattgttagccactcgggttgtaacgccccgattttcgttcgggattaaaaatcaatt

SEQ ID NO: 19748 - DNA, 1607 bp, Oryza sativa
  ref <308>: DATABASE ACCESSION NUMBER: AK070093
  ref <309>: DATABASE ENTRY DATE: 2001-12-06
ggtaagcgtaactcctccctcctcctcctcccacgtcccccgcacctttccccccaacccgcagcccaaacaagagggaatcgaccaatcaatccatcaatcaatcaaccgatccgacccatgcccccatccgtcgccacccacgcatccctcctcctcaaagccgccgccgcagccgcgcacctccaccccaagcccttcttctccccacgcgcggcgccgccgcggatcccgtctgcccccgcgccgccggccgcaggaggcagccgctaccgtccgacgacgacgacgacggcggcggcgacggcgaccagcgccaccgccgcgtgccgctggttccggtggcccccgcccgcgcaggcgcccgtgaggggtctgtgctccttgccgcattctggcggtggcggtggtggtggtgagggtatgggatctgaaggggtcgggaggaggaggcgggtggtggcgcctgcggtgaacggggtggcgaaggacggggcgccacagccgcctccgcccaagctgctcacgctgcccaccgtgctcaccattggccgcgtcgccgccgtgccgctcctgataagcactttctacatggaggggccttgggcagcaactgcgacaactggcatcttccttgctgctgcagtcactgattggctagatggttatattgcgagaaagatgcagttaggaacaccttttggtgcatttcttgatcctgtggctgacaagcttatggtagctgcaacattagtgttgctgtgcaccaaacctttggaaatttcactgctcagagatgggccatggcttctaacggttcctgccattgctattattgggagagagatcacaatgtcagctgtgagagaatgggctgcgtctcagaataccaaagttcttgaggctgtggcagttaacaatttggggaagtggaagaccgcaacgcagatgacagcattgactatcctccttgcgagcagagacaaaagtcttcctgcacaagatgctctggttacttccggcatcgcattgctttatgtatcagctggacttgccatatggtccctagtggtgtacatgagaaagatatggcggatacttctaaaatagccgtagcacatagtgtaatagaaggaacaggagcaagccagcaaggtgatattacatttcaagagcatacaatttttgaactgcggagttgattgatggacctagaattggttgagatcctcagctacttacgcattgtctcagtttggcggattagttgctaagctgctgtgcctgcaagatctccgtagaaacaaaaaacatagtagcaagtagtatgttgcccgggtgattacttcttcgaaagctattttcagagcctatcacggctcgagtgttggacactgggtgtaatgatctgcaaaactgaaaaatgcagaagattgtaaccgtatacgaatacaaaaccatgaggtttgagtgtgtgactctggggtttctatagtttctaccattgtaagtttacccatatgatatgtcagaagcgaacattattctttggacaagtggtgttcttgttgtgcatttgagccatttaaccaaatctgtttgatatt

SEQ ID NO: 19749 - DNA, 2478 bp, Oryza sativa
  ref <308>: DATABASE ACCESSION NUMBER: AK070094
  ref <309>: DATABASE ENTRY DATE: 2001-12-06
ggtctcggcttcctccttcctcatccgtctcccacttgtcgctcgagctcgcctcccaaaccctacctcctcctcatatacctctaggtctaggtctagggccctcctcctcctccccgcctcctcccctcttcgcgccttctgccccgcctcccgccgcccctcgcccgccacctgctccgccgcctacgcctcctcctccatggccaccgacgacaacccgctcctcgccgacttcgacttcccgcccttcgaccgcgtcgagcccatccacgtccgccccgccgtccgcacgctcctcgcccgcctcgagggcgagctcaccgacctcgagaagggcgtgcagcccacctgggggaagctggtcgagccgctcgagcggatcgtcgacagcctcgaggtcgtctggggcaccgtcgaccacctcaaggccgtcaaggactcttccgacctccgcgccgccgtcgaggacgttcagcctgacaaagtcaaattccaactaaggctgggccagagcaagcctatataccaagctttcaacgccataaggaattcttcagactgggaaaccctcagtgaggctcgcaagcgtatagtagaagcccaaatcaaggaagccgttctaagtggagtcgcacttgaggatgaacagagggagaaatttaatcaaatcgagcaggagcttgagaagttaacacaaaagttcagtgaaaatgtgctggatgcaactaagaaatttgagaaattaattactgataagaatgaaattgatgggttacctgccacagcacttggcttagcagcacagactgccgcgtcaaagggtcatgaaaatgcttcggctgaaaacggaccatggatcatcacattggatgcgccaagctatattgctgttatgcagcatgcacggaacagagcacttcgtgaagaagtttatcgtgcttacctaacccgtgcctctagtggcgaccttgataacaccaatatcatcagtcaaattctaaagttgaggctggagaaggctaagctactcggctacaagaactatgctgaggtaagcatggctcagaaaatggcaactgttgaccgtgtagaagagcttcttgagaaactccgtgctgcctcctgggatcatgctgttaaagatatggaagatctaaaagcctttgctaaagagtctgcttctccagaagccaatgacctggctcactgggacctaagcttctggagtgaacgactccgggaatctaaatatgatatcaacgaggaagatttgcgtccttactttgcactacccaaggttatggatggcctcttcagtctcgcaaataggctctttggtgttagcgtagagcctgcagatggactggctcctgtttggaatagtgatgtcaaattttactgtgtcaaagattcttcgaatagccctgttgcttatttctacttcgatccatattcaagaccatctgagaagcgtggaggggcttggatgaatgtggttttttctcgcagtcgtgtgcttgctcgcaatggttcacctgtcaggcttcctgttgcccatatggtgtgtaatcagaccccaccagttggtgataaacccagtcttatgaccttccgtgaggttgaaactgtgttccatgaatttggtcatgcgctgcagcacatgcttaccaaacaagatgaaggatttgtttctggtattcgtggagtagaatgggatgctgtagagctgccctctcagttcatggagaactggtgctaccacaagaatactcttttgagcattgcaaagcattatgaaacaggcgaacttcttccagaggaaatttatgcaaagcttgtcgctgcaaagaatttccgtgctggcaccttcagtttacgtcagatacgttttgctagtgtggacatggagctgcatacgacttacgatccaaatggttcattgtccatatatgatgtcgaccgaagagttgctgagcgaacacaggttcttgctcctcttccggaggataaattcctgtgcagctttagccatatatttgcaggaggctatgcagctggatactacagttacaagtgggctgaagtattgtcagctgatgcattctcagcatttgaagacgttggtttggacaatgagaaggcaattgaggaaactggcagacgattcagagaaacagtccttgcgcttggaggtggaaaatctccactcgaggtgtttgtgtctttccgcggacgggagccatcaccggaagctctgctcaggcacaacggcttgctacctgttgctgcattgtgataactcatgctcgattgtccccttcttttttcttttaacttgcgaaaacggcttgtaagatgttattgattgatggcatatcagcaacacgctaaaagtgccgtgtcctgcttacaacatgaaaaacaagttgctgtgcacaaccattatataatgatcatcgctgcttcttgccgttc

SEQ ID NO: 19750 - DNA, 957 bp, Oryza sativa
  ref <308>: DATABASE ACCESSION NUMBER: AK070095
  ref <309>: DATABASE ENTRY DATE: 2001-12-06
gacgccgtcgcggctcccactcccactccctctcccactcctccccaagcggcggcggcggcggccgccaccgagcagcggcgcgacgagggcatcgttcgccatggcggccgcgccggggcgaggcggcggcgaggcgttccgtctgtcggcggatgcgggcgcgggcgcgctcaagctgcagaagggcgacatcaccctctggtccgtcgacggcgccaccgacgccatcgttaatgctgctaatgagcgaatgctaggaggtggaggtgtagatggagctatacgtcgaactgctggacctgaactcgtagaggcatgccgtaaagttccagaggtcaaatctggagttcgctgccccactggagaagctaggattactccagcattcaagcttcctgtttcccgcgtgatacacactgttgggcccatatatgatatggacaagcaacctgaggtctccttaaataatgcctacacaaatagcttgaagctcgctaaacagaatggtattcaatacattgcattacctgcaatttcttgtggtgtttatcgttatcctccaaaggaagcatcgaagattgctgtttctactgcacaacgattttctaatgatattaaagaggtacactttgttctgttttctgatgagctctatgatatctggcgtgagactgccaaggaatttctgtcacaatttgagaaatgaattgtgaactgtgatgaggcttacttcctggtgtaagtctggtgccgaccgtgccgtagttgccgtcgttaatatgagcactagagccggttggccatgataaaacctgtatctgtatgacagtatgagttgcttagtggtgaatggatatgccctgaatggcatatttatcaaaataaaggtttcatctctgaattatgctaattaacatacttgtactcgaaaaccaataaccatgtcttatcgtt

SEQ ID NO: 19751 - DNA, 2720 bp, Oryza sativa
  ref <308>: DATABASE ACCESSION NUMBER: AK070096
  ref <309>: DATABASE ENTRY DATE: 2001-12-06
gagcagcagcaccaccaccaccgcttcgtccgccccgtgccccaacggccgacgctgctgcacggcacggcccccggccgaatctgccgtgcgcgggttggcacagtggcacacgcccaaattccatccctcccgtccctagccggttcctctccttcctccccccctcgcaaaaattcaaaaaaaagcttgcgctcctcccgtcctccggcgccgatctgctcgaaggaggccacccccaacctccccgaccaaaccaatggcttcctccaacgaaacctaccgcgtcgagctccgagccgccgcccgccagctcggcgagcgcggcctctactccgccgccaaatgggcggccgagctgctcgtcggaatcgagcccgacgcgacgccggccccgtcgtcggtgatggacaccccttcctcgtcgggctccgccgcatccgggggccgcctcctgcacctccaccgcagcggcgggtccagcttccgccgccgcctccgcccgggcgcggccgaggccgggacgccgctcggcggcgtctcgtacgtcagcacgcccatccccgacgacgacgcgttcgacgtggggggtgataggtacctgctcgccaagacctacttcgactgccgcgagtaccgccgcgccgcgcacgtcctgcgcggccagaccggccgcaaggccgtgttccttcggtgctatgccctgtacacggctggagagaaacggaaagaggaagaaacagtcgagcttgagggatctctgggcaaaagcaatgctgttaatcaggaactagttgcattggagagagagctcgcaacacatcggagaactggtgctattgattcattttgtttgtacttgtatggcattgttctacgtgataaaggcagtgaagctctagctagaacagttctggtggaatctgtcaacagctacccttggaactggagtgcttggttagagttacaatctctctgcactagcagtgacattttgaacaacttaaatatcaagaatcactggatgaaagatttcttccttgctagtgcacatctcgaattaaaaatgcatgaagaagctttgaaaagatatgagcgcttaatgggggttttccgttgcagtgactacattcaggctcaaatagctaccgtgcagtatagtatgagagacctggatgaagctgacatgatttttgaagaactccttaggactgatcctttccgtgtggattctatggacgtttactcaaatttattgtatgcaaaagaaagctcgactgctttgagtttccttgctcacagagtatttttgtcagataaatatcgcccagaatcttgctgcataattgcaaattactacagtttgaaggggcagcatgaaaaatcagttctgtactttcaaagagcgctgaagcttaatcgaaagtatctttcagcttggactcttatgggacatgagtttgttgagctaaaaaatacacctgctgcgattgatgcctacaggagagctgttgatataaatcccagagattaccgtgcttggtatggtcttggtcagatctatgagatgatgggaatgccgttttatgcagtttattacttccgtaagtcatcatacctacaacctaatgatgcccggctttggaatgctatggctcagtgctatgaaagtgatcaactccagatgattgaagaagccatcaagtgctatgagagatctgcaaataataatgacaccgaaggaatagcacttcatcagctagcaaagttacatggtatgcttggacaatcagaggaggcagcattttactacaagaaggatctagagagaatggaagttgaggaaaggcagggccagaattttgttgaagctctgcttttccttgctaagcattgcaagagcataggcaggtttgaggaggcagagcactattgcacaaggctcttggattacaccggtccggaaagggagactgcaaaaagtattttgcaagggctaaaaagagcacaatcggtacttccgttgatggatatcgaccattttgcaatgtaaatttgacttgcagataagttatttagttggaaactaaggtgttaagtgagatgtacaagagaaaactaccccttgcgtattcttttctccatttttgcatgcatcgaggaaagctacacattggtttcaagagaactgctataatacagaacagtcatcatgaacaaaggggattggttatcactcacaccgcaccaggcaaggaaaagaaatctatctaaggccacacactgacccacctgatgaaactggtactttgcgtatctccagtaccagtagagcagccacttccgagcttcataatgtaatccttattgtttgtatccttgccagaaaactccatattgctggagatgttgaccttgtgtgcatgatgatctcttccagttgctgaagcttggtaattagtaacactaatcgccggcatggggcaaaaatgagcgtcatcgggatgatgaagatcgctagctcaagtatcggcattgctgcttgctttctgctaggttctgtttctatggcttttcttcactagattgctttggtctgtgttgcactcaaagttccatggagttgcttgcatatataagcttcttggaagacttgccttgtctggattccagttctcatattcttgcttgttaaaataattgttgatgctttcctttcc

SEQ ID NO: 19752 - DNA, 1464 bp, Oryza sativa
  ref <308>: DATABASE ACCESSION NUMBER: AK070097
  ref <309>: DATABASE ENTRY DATE: 2001-12-06
gattccacctctcccgacgcctccgacctcgccgcggaaagcttctccatcgatcgatctctcctctctctcccgcgggggctctccggcgcacggtgccctctcgtgcctcggagaccccgatccgccgccgccgccgccgccgccgtgcctgagtagtacagtcttgttgtcgaggtgaggtgagtggtgggaggagaaatggacaccgggatgagggtggcgctgcaccggcaggtgtcgtcggggtcgctgaaggagagcggggagctccggcggcagtcgtcgctggagtctccccggacggggagggcggcgacgaggttcctgttcgggaggcagtcgtcgatggacccgaaccggcggcgcgggcggagccagagccccgtcggcctcgccgaggacctgaccgtgccggacaacctcgacgccaccatgcagctgctcttcctggcctgccacggcgacgccgccggcgtcgaggccctgctccgcggcggcgtcgacgtcaacagcatcaacctcgacggccgcaccgcgctgcacatcgcctcctgcgagggccaccccgacgtcgtccgcgtgctgctcacctggaaggccaacatcgacgcccgcgaccggtggggcagcacggctgtagctgatgccaagtgttatggccacacggaggtgtacaatcttctcaaggctcgtggtgcaaagatcccgagaaacaggaggacaccgatgatggtgtcgaatcctggggacgtaccagagtacgaattgaaccctagtgagctccaattcaagaaaggggatgaggtggtcaagggcgtgtaccaagttgccaaatggaatggaaccaaggttcatgttaagatacttgatagagaatgctactgcgatcaggaagtcataaactctttcaggcatgagctgaccgtattggagaaggtccggcacccgaatgttgttcagttcgtcggagccgtcactcagaacatacctatgatgattatttctgaatacctcccaaatggtgatttatcaagctgtattccgaggaaaggaaagctacatggtcagaaggttctaaaatatggccttgagatcgccaggggcatgacttatcttcaccagtgcaagccagaccccatcatccactgcgacctaaagccaaaaaatatcttcctggatagtggaggccaactgaaaatcgcaggattcggtctgacgaggctgtcgaaaatctctcctggcagagtgaaactggccgatcatgagtccatggttgacagcttcagtcactacactgcacctgagctgtacagaaacgaaatattcgacgcaagcgtcgacgccttctcatttggtttcatcctctatgagatggttgaaggaacacacactgtacatgggaagtcatcagaggaatctggccacacaattcgatatgatgggatgcgtccatcgctgaag

SEQ ID NO: 19753 - DNA, 1946 bp, Oryza sativa
  ref <308>: DATABASE ACCESSION NUMBER: AK070098
  ref <309>: DATABASE ENTRY DATE: 2001-12-06
tccctcctggcgtcgggggcgaggacgaggacgccgctagggaggggttcgccgatcggatcaggaggatgatatcggagcgcccgcccgacgatttcccgatgccgcctcctcctcctccgccgttgccgccgatgcagcacgtcccgccgcgacagcggagaacgccccggaggagactgagggaggacggaggaggaggcggtggcggaagcagcggggattcctcgggaggggagggtacgagcgctgcaccgaagagggagtggtggggaggggccaccctgggagaagagcttcccacgccgcgggagatgtgccggaggctcgacgagttcgtcatcgggcaggggaaagctaaaaaggtcttgtcggtagctgtatacaatcactacaagagaatatataacgcgactgtacagaaagggtgttccaccaattctgggtggctagacgctgcaagtgatgatcaaaataacatagaaatagataaaagcaatgtgcttctaatgggtccaactggctcaggaaaaacattactcgccaaaacactagcacgcattgtaaatgtaccattcattatagctgacgcaacatcattaacacaggctggatatgtaggtgaagatgtagagtcgatactgcagaagttactagtggctgctgaatataatgttcaagctgcccaacaagggatagtgtacatagacgaagtagataagataacaaagaaggcagagagtgcaaatgttagcagagatgtatctggggaaggtgttcaacaagcactgttaaaaatcctagaaggaactgttgttagcattcctgagaagggatctcgcaagaattcccgcaatgagagcatacagatagacacaaaagatattcttttcatatgtggtggcgcttttgtcgacttggagaagactatttctgaaaggcgccaagattcatctataggttttggggcacccattcggataaacatgagaagttctgaagtgactgatccaatggtcacttcatcattgttggaatctgttgagagtggcgatcttgcaagatatggtttgataccagagtttattggacgcttgcccatcctagttagtttgacagctctcaatgaagatcagcttgttcaggttcttacagaaccaaagaattctctttccagacaatacaggaaaatgtttagcctgaacaaagttaagttacactttactgatggtgcacttagaatagtagccaagaaggctatagccagaaatactggtgcacgtggtctgagagccatcttggaaagccttctattggaggccatgtatgagatcccagacgagaaaacaggaagcgaacgagtagacgctgttgtggtggatgaggaggcaataggttcaattgataggccaggatgtggagccaaaattcttcggggtgacggtgcattggagcagtacataacaaacactaacatgaagaattccatggaagctaacgagggtttggcgggtgaacttgaagatgcatatatgatgtcaagatttgttagcttgtaattaatttgaccaacttcattcaacatgtaacatggtctccccctcactcacatcacagccgcttgttctcttaccatttttttctgtaatttatttttgcttgttttctgacaagcaagtctatagctcaatttgttgtaattcatgtaaacaggagttgcttttcattgagcaaccctcctgcaaagtaaatttgccccttctttttttctgaagccaccaactgggcagtttagttattggcaaaagtataaagaatcctacataccattgtttcctagtacatgatatggtgccattttcctgacatgataagccatcaactgggacagcaagtttcaagtattatatgtgaaataatgtaatgatgaatgatttgaatgtcct

SEQ ID NO: 19754 - DNA, 1625 bp, Oryza sativa
  ref <308>: DATABASE ACCESSION NUMBER: AK070099
  ref <309>: DATABASE ENTRY DATE: 2001-12-06
cctcctccttcggtttctcttctcggcttctcgccttcttttccgccgtcgcgcgcgatccagttcagttcagatccccccccctctccctctcccccggcgcagttgcgctgcttcccctctcctccactccgccgccgccgccgcgaggcgaccaccgcccctcgagcaggcgccaccaatggacgacgagcccatcaacgcgcacaagctcctcaaggagcagttcgtcagcaacttgacggggtcttccctgctggagatcgccgcgctctccaccgtggttccggctgtggtcgttctgaggaaatggagctgcggagataatactaggaagaattcattgaagaaaaatgatgatgcccttcctggtcataaaggttttgtgcattacttctctacactggctatagattacctcagtattgtattgccagttcttctgattttcacagttttagctgaatgggcttgtgcttgtgcactttctcttgtaatgctgatatctatcctcaccatgtttaagaggtctcgatctcatctcaaagctggaccaaatgagctgcctttgctccgagcagatatatcatcatacagagtatctgtggttctagtaacatgcctgtgcatattagcagtggacttcaaaatcttccctagacgttatgccaaggctgaaacatatggttgtggcatcatggatctcggagtagggtcttttgtagtggctaatgcactggtatctagacaagcacgaaactttactgcaatgacctggaataaagcactgatgtctataagccctctaatatttcttggttttgctcgtctcatatcgacatcaggtgttgattatcaggttcatgtaggagaatatggcgtgcactggaacttctttttcacccttgcagcaatttcgatccttacgtccgttatcaggatccatcctaagtattgtggattagctggtctgcttgtgcttacaggattccaaacgtggctctcttttgggttgaatgagtatctcatttctaatgaaagaaacggtggtatcatcagtcagaataaggaaggtgtttatagcatatttggttactggggtatgtacctgattggtgtttccttgggttacaatctattcttcgacaatagttcaaaaggcaagagtaggagcagtcaagtggtaaaagtttgggttcttgctgcatctttttggattatggcaatcattcttgacagctatgttgaaagagtttctcgacgaatgtgcaactttgcttatgttatgcttgtatttggacagaattttcaggttatatctattctcacactagctgggtttatttcatatgaaaagaacctggttcttgaagatgcattcaatcaaaatatgcttggttcattccttctggcaaacatcctaactggtgtagtaaatctctcagttgacacactctctgcctcttccggcaccgccttcatgattttgttagtatactcctttactctatgcatgattgctgctttagctcagttttgcggtattaggatgaaattttggtgaattcaagagttatctaatacgatgtatgtatattaattactttctcagcaagctttcttgg

SEQ ID NO: 19755 - DNA, 1095 bp, Oryza sativa
  ref <308>: DATABASE ACCESSION NUMBER: AK070100
  ref <309>: DATABASE ENTRY DATE: 2001-12-06
gagggtttttgaagatcctcgccgtcgccgccatgtatgggaactccggcgagggccccccgtgaggcggccggacaccttccctgcatcctccaggacgcggttagcagagtctccaccgcccagatcctccactcgtccggctacaccgcggcggagccagccgccctccgcgccctctccgacatcgccgggcgctacgttgcctccctgggccgcgcggcctcggccatcgccgaggcccgcggccgcacggagcccaacctcgcggacctcaccctcgcgctcgaggaccacgcgctcggcgggttccccggcgcgtccgaccccgcccgccccgtcctccgctccggcgcgctctcggagctcgctggcttcgtccgcgtggtgcgggaggtgccgttcccgaagcccgtgccgcggaggggaggggccccacgcggcaaggcgtgggagagcttcgcggcggcggggaaggagcctccgccgaagcacgtgccgcggtggctcccgcgctttcccgacaagccggagccggagcccgaaccaaaggcggcgtacgacgaggcgacggcgaggtgggaggcgcgcgttcgccacgaggaggaggcgaatgcagaagaagcggtggtattgaagccgagcgttgatggcggcggggagcgcaggggagtagtaccggagaagagggggaaagtgagcttccgcgtgcgggcggagaggaagaagcggcgggtgggattggaccagcagtgaggcggtggcttcgaacggttcgcggagaatcgagaaaaatccgcggcaatagtgcgggcggcgagcaactaccgctcggccgtggccgtggagaatggagatggacgacacgccgcggcgttgcccggtgacccctgtccagtcgaggggttgaagaagacttgacgagttttgggctctgcctgggccacacgtggcgcctataggctactagcccacgagccacctgccgtcgtggctgaactggccgaaaaggtcaagtgtgtgggtgattgtacaagttgtaattgagttgccacagtttatcacaaattttggctttagtttgttcacgcggcg

SEQ ID NO: 19756 - DNA, 2261 bp, Oryza sativa
  ref <308>: DATABASE ACCESSION NUMBER: AK070101
  ref <309>: DATABASE ENTRY DATE: 2001-12-06
gacttttatgagagagaaggaagaacagagagagagagagagaggagggagaagaaaaaaaataatcgaaaataaaataaaataaagagagagatagaaccccagatctctccacagtttcaacgcctcaaatctctcaactctcgtcccaatccttaggtacacgcctccctctctttcctccaatttttgttcggagggaggacgaatttcagttcttgtttctgtttcgatctccaaccaaatctggcccaagaaaatttgagtttcttgtgtggtagatgccaccaatgtgtgccaagcccctctgagatctcaccggctgatcagctgatgtagtttgcagtcgaattttgttccgtttttgggggcaagattgtgttcttggagctgtagattggttatacatttttttttccatttcttggctcagttttgtccattcgacgaggaatttctcgtcgtgtttgttgttgattgattgatccaatctttgatgcgccaagaagcaagatgaacacgaattactcgtccctcccattgacctccatcgagctccaatccaaccagcgcacatccgaggtcgccaatggcgtcggctacaacggccacgccaagatctccaagcaagattcgttcctggtcgacggcgagaacgacgacctgccgctcatcggcgacggccccgccgggccacccgagggctccggcgtgcccgccgcggtgttcaacctcgccacctccatcatcggcgccggcattatggccctcccggccaccatgaaggttctcggcgtcgccgtcggcctcgtctccatcctggtcatggggatcctctccgaggtcaccattgagctgctcgtgaggttcgccgtgtactgccgcgcgctgtcctacggcgaggtggtgcacaaggcgctcggccgtccggcgagcatcgtggcgcagatgtgcgtcatcatcaacaatgccggcgtgctcatcgtgtacctcatcatcatcggagatgtgatgtcagggtcactgaagcacattggtgtcatggatcagttgatcgggcatggcgagtgggataaccggaggctgctgatcttggtggttcttgtgatctttctcttcccgttgtgcgcgctcgagaagatcgattcgttgagcttgtcgtctgctgcatcggtcgcgcttgctgtcgtgtttgtggttgtgtcatgcatcattgcgctggtgaaggttgttgagggtaagatcagtatgccgaggatggggccggattttagctcgagggcagcaatgctggatttgctcgtcgtgataccgatcatgacgaacgcctacatctgccatttcaatgttcagccaatctacaatgagctcaaggagaagacacctcacaacatgtacaagattgggaggatcaccactgtgctatgtgttgtggtatatgcactgactgcggtctcagggtacctcttgttcggcgaagacactgaatctgatgtgctcaccaactttgacaaggatctcgggatcagattcagctcaatcctcaacttcattgtcaggattgggtatgtcatccatctggttctcgtcttcccggttgtccacttctcgcttaggcagacggtggactcgttgatctttggcgagttagcgccccatagcaggaaaaagatgctcaccttgacagtggtgctcttggcactcatctatcttggctcgacgatgataccaaacatctgggtggccttcaagttcaccggtgcgacgacggggttggcactggggttcattttcccggcccttattgcattgagattggacaaggaaggcaagtctttaggtaagggtgagaggctcctgtcaattgtgatgcttggtttggccatggttgttagcattattggagtaattggaaatgtatacagcctgaggagcaagtctgcatgatctatcatgatgaacaatttagtagggttagtgcattgccatggcagtcatacagactgtattagcatggtcagatacagaagacagcagaggtactacttgagcaaagctcagatacattttgtttacctttagaggtgcaggagcatttcttgaaggtttttgtttttgggagcttggactagattgacagattctttgatgtatttgcatttattggtaaggcagcacaagatgataagaagctggttgtgttgtactgcgaggttgttgcctgtctactacatgaaaagaaaagaaacgatatgtttggc

SEQ ID NO: 19757 - DNA, 968 bp, Oryza sativa
  ref <308>: DATABASE ACCESSION NUMBER: AK070102
  ref <309>: DATABASE ENTRY DATE: 2001-12-06
gtcagttgagttggggtgctacgcactagctactcaagtgcatgagctagctcaaacaatcgatcgatggcgatgaaggcggtgatcaagggcggcgatggcggaggcgggtgcatggtggtggtggcgcacgtgctagcggtggcggcgacggcgatggtgttggtgtggtgcgttcacttccgcggcggactcgccctgcgctcccacaacaagcagctcatcttcaacacccacccggtgctcatggtgcttggcctcgtcgtcctcgccgccgaggccatcctctcctaccgctccctctccatcatcgtcagcagcagggacgccagaaagaaggtgcacctggggctgcacgccgtggggctcgccctcggcggcgtcggcatctacgcggtgttcaagtaccacgccgaggccgacatccccaacctctactccctccactcctggatcggcatcgccaccatctccctctacgcgctccactggctcctcgccttcctcaccttcttcttccccggcgcctcccacgacaccaggcgctccgccgtcccgtggcacgcgctcctcggcctcctcgtcttcgcgctcgccgtgggcaacgcccagctcggcttcctcgagaagctcaccttcctgcaggccccgccgctgcgcctgtccaggtacggggcggaggcgctactcgtcaacttcacggcgctggtggtcctcctcctcggcgtcgccgtcgtcctcgccaccgccaacgtcgactccactaaatacaccgccatgtaattccattttattatacatatatttcatcatcttttctttattattactctacatataatcgatcgatctagctacacacccgtagtacgcagtgtcgtaccatatatacatgcatcgcgctgagtgtgtgcgcgcgcgcacgtgtcatgtggctttgtgtaattaattaattattattattcctc

SEQ ID NO: 19758 - DNA, 2478 bp, Oryza sativa
  ref <308>: DATABASE ACCESSION NUMBER: AK070103
  ref <309>: DATABASE ENTRY DATE: 2001-12-06
gaatctcgtctcgccattctctctctcacacacacacctcgcgtcgcctccctccccgagcgagcgagcgagcgtgcgcgtgcctacgccctcctctctaccgccatggcgatctcgccggtggcggcgatggcgctggccatcgccctcgcggcgctctgcctcgcggggctggccgccgggttctacctcccaggcgtcgcgcccaacaacttcgacaagaaagatcctcttcaagtgaaagtcaacaaattgacatcaatcaagacccagcttccctactcttatgtcgacagtgctcaaaatctcggtgaagttcttcgtggtgatcgaatcgagaactctccatacacgtttgaaatgagagagcctcaaatgctgtcaaatagtctgcaagatttctgtcggggagaaagaagcaaagattctcaaggaaaagattgaagatgagtaccgtgtgaacatgcaagctagtgtaacttggtttcttgattctaagagcttattcatggctgccaaatattctaaacattcattttctcaacatgattcttgacaacttacctctagttgttccaattaaaagaatggaccaagaaggtgcatatttctatcagcatgtcttccatgttggagccaaaggacaatatgcaaggagcaaggatgaaaagagcttcattcacaaccatttatcatttactgtgaagtatcacagggatgcccaaagggatgtttctaggatagttgcatttgaagtgaaaccatacagttatgctgcatgtgatttattaaacaacgttaaacatgaatacgaaggacagtggaatgacaagaagacccgcctgaccacttgtgatcctcatgcaaaacatataattacatcatctgattctccccaggaggttgaagttggcaaagacataatatttacttatgatgtggatttcaaggagagtgatatcaagtgggcatctcgctggctgggatacctatctactgatgacggatgaccaaatccactggttttccattgtgaattccctcatgattatcctcttcctttctggaatggttgcaatgatcatgctccgaaccctttaccgggatatctccaagtataaccagcttgggactcaggaagaagcccaggaagaaacaggatggaagcttgtccatggtgatgttttcaggcctccatccaactctgactagctctgtgtttatgtcggtacaggagtccagtttattggcatgctgcttgtcaccatggtctttgcagtccttggattcctttctccatcaaacaggggtggactgatgacagcgatgctcttgctttgggtattcatggggttgctcgctggctactcttcttcaagtctttacaagttgttcaagggcgcagaatggaagaacattgcattgaggacagccttcactttccctggcagtgtatttgctattttcttcttcctgaattctcttatttgggggcagaagtcctcaggcgcagttccattcaccacaatgtttgcccttgtcctcctttggttcggtatctcagtgcccctagtatttgttgggagtttccttggcttcaagaagcctgcaattgaggatcccgtgaaaacaaacaagatacccaggcagattcctgagcaggcctggtacatgaacccgatcttctcaattctaattggaggaatccttccatttggtgctgtattcattgagctctttatcctgacctccatctggctgcaccagttctactacatctttgggttctgatcctggtcataacttgtgctgagatctcgatcgtgctctgctacttccagctgtgcagcgaggactatctgtggtggtggaggtcatacttgacatcagggtcttctgctatctacctgttcttgtatgcaaccttctacttcttcacaaagctggagatcacaaagtttgtgtcagctgttctgtacttcggttacatgcttaccgcctcatatgccttctttgccttgactggtacgatcggattctacgcatgcttcctgttcactaggctgatgtactcttctgtcaagatcgagtaaagaggctgtcttgcctaattctttattgccacggcaagtactgatcctgcggagtgcggacagtgaatatggtctccaagcttagttgcctgtggcatcagttttgagttttcaaagctggtagttaagatgaactggtgatttgttatcccatgattcaggtatcatagctagctcagtggttttttgttttcattttcttttaccttttcttctttttatggatttagcccttggatcacggcctattaagtggttgttgcagagttaattgtatacgaatgctgagtaatccatttctctccctatcagaatgttatgtacttgttgacctataatgcgactaccattaaagatattactgcagttgaaatattcatcttcc

SEQ ID NO: 19759 - DNA, 3603 bp, Oryza sativa
  ref <308>: DATABASE ACCESSION NUMBER: AK070104
  ref <309>: DATABASE ENTRY DATE: 2001-12-06
gatcgagtacacatttggagggaaagagcacccatggttttgcaatttttttctttgccctagttgcatccaagtccaaagtccaagcagagagagagagagacgctgcctcagtcgtctcgtctcgtcacgacagcacagtacacaagcctcctcctcctcttcagcagctgcttcacactcacactgcctcctctctctctctctctctctctctccatcttgctgctaaatccatccgcacctaatccggcgtgcggtgcgggagcaagcaaggaatccacccccccgtggcgacaagagaatcggatcgagggcgtgcaggcgcagctggcgagcgagcgagcaggggaggaggggaaggaaagctcttggtacacccaaccgtagaggcggagagggcatcggctcagacggtggctgcagtgcaggcctcagctggggtcctcggctcggatctggggaggacgcgccgcggcggaggcgatgcagggtttgcttgtagtgaaattctgcacccaatgaattatacatacaatatataagatggcagcagaggtcactcagaattattttgcatggtcacaggaggaatcacctgtgcaagacagctctcagggaacaccacaagtgttcgaccatggttccatatcttttggaagatttgagttggaatcactagcatgggagaagtggtctgtatttgccaatgataggcgccatgaagagtttggcaagttcaatggtttggttgctaagaagaaggcatacttcgaagaatacttcaagagaattagggagttaaaggctttacaacaacaaaaccagcaaactgaacttaatcttgactatagtggtgatggtagtgattctagtcagacaggagaggatgtgccaactgcagatcaggcatctccttctggatctggaacccttcttgattccatggtacaaacaggtgttcagactatatttgagaatgatttggaatgctatgatgataatgacaaagagatgttagataaggatatttctccatcagttggaggcacatgtcaaattgagcaagaattcagagaaagtgcaagcggtggtaatcatcctgacagaatggtggatgtgttgcagcaaaacaccaactgtggtccagatgatctgggaaggcccatggagtctatgatgactccgaagagaactgtcaagaaagattcactggttggtcaagctgcaaaaacaatgccaaagactgtcaatatgacttctagtaatattccgggtcatgcagttgttaataagggaactgattcaggcaaatccagtgtggtgaatcgtagagccaagccagaaactattcagcaaaggctaaaagcagtaactggcaatattgttgacatcgttggaagaagcaaacttgtggtaaaagaagtccctggtataatgggtgttagaagaccttcctctccagcactacaacgcccctccaccagggaacgacgacctgtcaccagagatagttcacggaaggctcctgaagttgccaccatgtgccggccttctactgctgaaaggcgccctgccacccgggagttggcaccaaagcaagccaacacagttgttccgtgtcgaccatctacaccaaacaggcgccctatgaccagagagttggcgccagtgcattcaagcattgctaccccacgtcgaccttctactgctgaaaggcgcccaatcaccagagggatggcaccaatgcatcctagcattgctaccccagttcgaccttccactgctgagaggcgccctacctcaaaacagatggctcaaaagcatgttggtatggccaccccatctcggccatccactgctgaaaggcgacctatcaccagagaggctgcacggaaaaacgctgatgttgccatcttgcatcgaccttctactgccgagagacgccctatcaccagagagactccacagaagcatgctaacgttgtcgcactgcatcggccttctactgcggagagacgacctgttgttagagagattgctccaaagcatgctgatgtcactctcactcctgcacgccggccatctacctctgaaagacgccctgtcaccagagagactgcactgaggcacagtaatttcaccggttcatgttggcctttgactcctcaaaggcacatcagcaggggaagtgcacaaatacatgctgacgttagcaccaccccgcgtcatccatctactggagaaaggcgccctatcaccaaagagagtaacataaaattggatgaaaaaacacctatcaagttgagaggcatgctggctaacccaaagggtgctatggctacagtagtcactccccagaaggcaattactcgaaagcttgttaagagtagcaagccagaaatgaaaagttgtgctaaagagaggacagaacttcaagcagttgggaaacacaaagcaagttctgttaaccttcctccaagggaaatgtttacttcaaatgttagagccaatcgagtcccagaaagcttcagaaagccaaacaaggtgacatgcccgagcttattttttgttccatgctgtttgtctaaattgcattcattaagtactgtagtgacatatgcagtgctggcgcctttggccatttttattgctgtctggcgccttttacaactagattaattacatttgcattatgcattttctttgcatcctggatgcttccctgttggacacactatattgataaatctagttcaagttactacctgctgccacaggggaaatccgcaagtaaattttagcgatacaatatggaaattgtaaagagtggcttatatttaaaggtgttccacaccttattctgggaggactttgcatagtcttgttccagcctacactggaatcttgcactgcacttcacgttagtgttgtagcatatggctataagctaacccatacctctgaattctaaagattatcttatgggagacaaactgcaaatgaacatgagataatgaaattttctactgcattacacgcttttgatttgctgataatgatgattatcattttttcagggcattcaggagacagcgagatctcaaatatcctcatcaaagagtgcaactcctgcacagactagaagtataaagacaagggctcccaacccacctccgcctcctcccccaccgcggcgaccttctcagatatccagcaagacaaacacaaataacttgtctgttggtggaaggaagcccaaggcttctactccacactggcactaacccaatcgaaagtctccaatctaggatcctgcagaacaagatagctgtgaaaaaatgtgaagaaaaaatgaggcattcgacgcatctaaaagcattaaccgtgctgttcctcgttatcttctgtcattagtcgttactagtaccacttaccatcactttttgtcacctattagaagtaaccgatgtagtgttcgtatctaccaatctgtaatatgtccagttctccactaatcccgtagttctaccgtccaagaatttacctagaacattgtatatacctgaaataaatggagcttttggctgatgaaccttgacc

SEQ ID NO: 19760 - DNA, 1414 bp, Oryza sativa
  ref <308>: DATABASE ACCESSION NUMBER: AK070105
  ref <309>: DATABASE ENTRY DATE: 2001-12-06
gaaatcacaaaacccaattcaccaaagccaaagcaagaactagatcaagaagagagaagaagccaagataatccagcagaaataatttcagaaatctatagctagatagatcatagatgctgcctctgctgaacatgcaagctgaagctgctggtggcgatggtggtgatgcagagaagaagagtggcaacaacaagcagatgatggtggcggcgaaggtgtccatctccattctggtgatgtcgctgccggtgctctacgtctccttcctccgcatcccgccggcgacgctcttccgggacaccaccttctggttcctcatgtccaactccatcatcatcgtcatcgccgccgactccggcatgctcttcttcgccgctaggcccgcctcaagctccggcgagcttcaagccatggttgtcaccgatgtcagcctcagccatgcattggtggtggcgccgccgagaggtggccaagaagacgatgacggtgttgtcgtcgccggcgagccggcggaggaggagtcgacgatgatgttggtgccgtactacggcggcgaggtggtgcaggcagcagcaaggccgacaaggctgacggcgagcagtgaggcggagaggacgacgacgatggcgcgtcgccgtcgtcgaagcaggtcgcactcgtcgcaccacgcgctgatgatgacgccgccggtggtgcaggagaagagcatcgttgtcgtgagggaggagaagctccggcgaactgcaacggagcggccgccggagccggaggaggagatgacaacgacgagcagcagcgagtactcgcggctctccgacgaggagctgaaccggcgcgtggaggagttcatcgccaggttcaacatggagatcaggctgcagctcgagaaggaacaagaacaagctgcagctgcttgacatatgcaagaatccgccatggccatgtacaaaatcgatcaagttcaagctcaaagctcaaaggctctagctagctccatgtcatgtccatgtccatgtagatgttgatgcgagtttgttaattaggttgagcttttggacatggagctagctagctaggcataagctccatgtcacagaaaataggtcggttttttaaaaactcccacaaaattcctctaggcctattcagatcggaggaattttgcaggagtttttaagaaaccaagctattttctgtgaaaattttgtaaaattcctacgtttcaaagagccagcagtagctatagctaagtagttagctagtagcttcttcttgcttggttcctcttggtagtcttctgcatccatagatgcaggagagtgagatgagaggagctatattctcatgagggatcatataatttgtagtttgtatttgtgtacatcatcaagagatcagatcagaacaatcc

SEQ ID NO: 19761 - DNA, 1806 bp, Oryza sativa
  ref <308>: DATABASE ACCESSION NUMBER: AK070106
  ref <309>: DATABASE ENTRY DATE: 2001-12-06
gagccgcagcagcagcgatggcaatggagaggcttatctcttcgccgctcctcccgcgccggcctccccgcgccgccttctcccgcccgccgccctccctcgccgccgcgccaccccaccaccgcgccggcggtgcgccgtcttcttctcgctccagcacgacggcgacctctccttccgcgaggcctggtaccacctctccgatgccgactaccccatcaagcacgacgccgaccgcctcccctctcccctagtcgccgacctcaacggcgacggcaaacccgaggtcctcatccccacccacgacgccaagatccaggtcctccagccccaccccaggccctcccccgacgatgcctccttccacgacgcccgcctcatggctgatgtctccctcctcccctccaacgttcgcctctcctccgggaggcgccccgtcgccatggccgttggcaccgtcgaccgccactacgcccacgccccctccccctccaagcagctcctcgtcgtcgtcacctccggatggtccgtcatgtgcttcgaccacaacctcaaaaagctctgggaggctaatctccaggacgatttcccccacgccgcccaccatcgcgaggttgccatttccattaccaactacactctcaagcatggggatgcaggtttggtcatcgtcggaggaaggatggaaatgcaacatcattcagcagagcttttcgatgaatttatggtgtcagaacacaacagggaagagcaccgtagaagcgccagtgagaagcaggcttctgagacaggcaacacagacctgcgtcattttgccctttatgcttttgctggccgcactggtgaattaagatggagccgaaagaatgagaatatcccatcgcaaccatccgatgcttcagtgctgataccacaacacaattacaagcttgatgcccatgcccttaatagtcgtcatcctggtcagttcgaatgtcgggaatttagagaatcagttcttggggtcatgcctcatcattgggataggagagaggatacttttctgcaacttgcccattttaggaggcataaaaggaaagcactgaagaaaacacctggaaaagctgttgtaaataacgtgcacaagcccagtgaacataatccacctggaaaggatgtttccaataggttagcaaatgtgattgggaaagctgcagatatggctaattcaaataaaatcaagaaggtataatgcatgcagacacaaacacatagttcttacgcactagcatgttgactgtgttgttctttttgtgtttggtgttttggggaggggggaggggggagggggagttgcatgaacgcagtagtggtaacgtgcatgggccaacgtaggcaccaggagcaggagcactcgtgattgcacggcgcacagagctactcaagatggagaggatggtggcgtggggaggggagaggataggatttgaaatgaggcagatcagtggaggcagtggtgctggcagttactgggccaagatgacattgtaggtggtcgggtagaaggaaaaagagaagatggcaggggcagtcgagggttcttaagagtggatttggtgttcacccagtaggaaatgggtgaagatttgcccagtagggcctcccttactctcatttcaaaatgtatcctctcaatttatctgcaagtgtgttcgtcttgaagatactgtatactttccgatccatttactgtactctcaaaattagtgttaaattgtatccctggaactatattctaaataagtaagaacagtcaaactttgaacc

SEQ ID NO: 19762 - DNA, 1334 bp, Oryza sativa
  ref <308>: DATABASE ACCESSION NUMBER: AK070107
  ref <309>: DATABASE ENTRY DATE: 2001-12-06
gagaggtgaaagaaaaaaaaaaagcagagacatcttctcgaaggcctgagcaccaatggcacggtatcttctccgtcctcccaccgccgccgccgccgccgctgccgccgcctcttcacaccgcaggaatggcacaacctcgccgcggggaccggttcttggcctccgggcgcttgcctccagggccggcaaagctcgccccgtgatggcggtggcgtcggagcagcccgccgcgaggggcaagtgccccaaggtggccgcccccaccaccggcccgattccggccgcggagctcctcggcgtcatccaggacgcagccagggccggagccgaggttataatggaagctgttaataagccacgcaatattcactacaagggagttgcagacctggtcacagacacagacaaattgagtgagtcggtcattctggaagttgtgaggaagaccttcccagaccacctcatacttggggaggaaggtggacttattggagatgccttgtcggagtatctctggtgcattgatcctttagatggaacaacaaactttgcgcatggttaccctagcttttctgtatccattggagttctgtttcgcggaaagcctgctgcttccactgtggtcgaattttgtggtggtcctatgtgctggagcactcgtacggtttcagcatcatctggtggtggtgcttattgtaatgggcaaaagattcatgtcagtaagacagacaaggtggaacaatcacttctggtaactggttttggttatgaacatgatgatgcatgggtgaccaacataaatttgttcaaggaatacacagacattagcaggggagtacgaagactaggttctgctgctgctgacatgtcccacgttgccctaggcattacagaagcctactgggaataccgacttaagccttgggatatggctgctggtgttctgatagttgaagaagctggtgggatggtgtcacgcatggatggtggggagtttaccgtctttgatcgttctgtccttgtttccaatggtgttgtacatgatcagcttttggatcggattggccctgccacagaagatcttaagaagaaaggaattgatttctccttgtggtttaaacccgacaaataccctaccgacttttaagttgaactcctcacccagagctattttatactactagaagaaaagagaaaaacagaggatcttatgttaaaatgccatgtacttgactgaatatttgtttattgaagtcctttgactcagccatcgacttttgttggttgtatgatttatttatggagagaattacccaaatcacttaaattct

SEQ ID NO: 19763 - DNA, 927 bp, Oryza sativa
  ref <308>: DATABASE ACCESSION NUMBER: AK099125
  ref <309>: DATABASE ENTRY DATE: 2002-08-28
ggcccgccacgtcaccacgccacaccccattcgctcgttaacgggtccgcatcaagatccgctaagacccttcttcttcctctcctccggcgacagagaggccaccggcggcggcggcgggcggagatgttcctggtggactggttctacggggtgctggcgtcgctggggctgtggcagaaggaggccaagatcctcttcctcggcctcgacaacgccggcaagaccacgctcctccacatgctcaaggacgagagattggtgcagcatcaacctacgcagtatccgacttctgaagagctgagcattgggaagatcaagttcaaggcgtttgatttaggaggccatcaaattgctcgccgtgtgtggaaagactactatgctaaggtcgacgcggtggtctacctcgtggatgcctacgacaaggagaggttctccgagtcgaagaaggagctcgacgccctcctctcggacgactccctggccaccgtccccttcctgatcctgggcaacaagatcgacatcccctacgccgcgtcggaggaggagctccgctaccacatggggctgagcaacttcaccaccggcaagggcagggtgagcctcggcgagtccaacgttcgccccctggaggtgttcatgtgcagcatcgtccgcaagatgggctatggggatgggttcaagtgggtgtcacagtacatcaagtagggtgttgttagtttttgctggaaaaatgttgaggtagtcttcatagttcatactcctgtttcaccttaccacagagatgattttaggagggagctagagctatagctagcaatctggtcatggtggttcatggttcttccggtacatatgtggtggaagcagcgaaagactgggatttgtgctagatttttcttcagttaattaaaaagtgtgactttt

SEQ ID NO: 19764 - DNA, 938 bp, Oryza sativa
  ref <308>: DATABASE ACCESSION NUMBER: AK070108
  ref <309>: DATABASE ENTRY DATE: 2001-12-06
gatcgtggcgtagaggaaaacagcttgattctaattaacgaccatggcttcattcacgcctaattgctctacgttgttctttttccttgtcttccttgctgcagtattcgtctctgctgcggcagcctccgagcacggccgggtgttggaggaggatcagaacattcggtaccgtgtggaggactcggaacttccggacctctactacgaaatctgcatgtatgcgagggagcacaggccatgtaggagggtgatggccaccatcccggatctaaaattcaagctctccggccaggttgatttagccttgctgctctctcacgtcatagccaaccggagcgccgaggccaaggccctggccgatccgttgctcgccgccgccgccgcaaagaagggcggtgatgagctccccaagtgtctcgcatcctgcgccgccagcctcgacgacgtgtccaaggccatgtccgggctccccgcggatatcgatgtcgagaggtacccgaaagtccagagcttcctccgcaacaagttcgaatcgggcgccgctcccccactatgcaagagcggctgccccgacaagacttccaccgccgatgaggccgccatcgccgacaagtttcatgccatctgggcgctcatggattgcgcagagacactcgcccaatactacgtcctccctccgcctccgccgccaaaacgctaattaattaattgacctactactacgtacgacagggaacatggtcgtcatcactcatcatattgcagacaaatactgcatgcgtccattccaagttttttttttgataatcgattaagttctcaaatcaattatatgtactcctatacttggagactgattacagtacatttatatcgcagttcgttcattcacatgtactcgcaagtgctatatatattatattttgatatgagat

SEQ ID NO: 19765 - DNA, 783 bp, Oryza sativa
  ref <308>: DATABASE ACCESSION NUMBER: AK070109
  ref <309>: DATABASE ENTRY DATE: 2001-12-06
gttctctccctcaacctctctcttagatccatttctcctctcccctccactcccacctctccctcaatcgtggttggcggcggcggcaagtggagctgcggcggcggatcaggcggcgaggaggctcacgcgtggcgatccggtggcgcgaaggcacgtgggtggcatggaggctcgcgacggtgggcgggccagcagaagtcaggcgaggctgcgggaaggctcgcacgtggcggatctggcggcggggaggtacggaggcgtggaggctcgcgccggcgggcgaaactgggggcggggaggctcgcggcagcaggcgaggctgtgggcgggctatggagctcacgtccaacccgctttaccgtcagcggcagcgcaggggagggggctcggcagcggcaaggggatcgacggtgacagagcttggcggtggtggatggcacgtggcggggctcagtgatgacggtgcgtggtggcagcaaggggctcggtagcgatggcgcgcggctctctcctctctgcgcctccggcctcccacctccctccgcctctcttcggctcgacggcgactgcaccggcaggatgactttgtgtccgccagatctagtgctggtgcccctcgacggtggatggcgacgagatgcatgctgtgaaaatcgatttgcttcactgtaatggatttgttgatgttaatttgttgatgtgaatctgttgatttgttgaatttgttgatgtgaatccgctgatctattgatgaatatgttaatgggaatctagatgtcg

SEQ ID NO: 19766 - DNA, 1726 bp, Oryza sativa
  ref <308>: DATABASE ACCESSION NUMBER: AK070110
  ref <309>: DATABASE ENTRY DATE: 2001-12-06
ggcttcctctcctttcagacaaagcaaaaatttaatttccttccagtggagaacctcgaagtcaaagaacaacgtgttcaccatgcccagcgatggcagcttccgcatcgtcctcttcccgttcccggcgcagggccacttctccgccttcctctccctcgccgcccacctccacgacgcccagcccacggccgacatcaccatcgtctccaccccgcgcaacgtggaagacctccgccgccggtcgagctcccagacgcggtacctccggttccacgccctgccgttcgcgccagccgagcacggcctgcccggagacatcgagtcgaccgacgccgtgccgctcctccacttcatcacgctgttcgaggccaccgagtcgcgctcgctacaggacagcttcgacagcttcgtccgtgacttgatcaccgacgccggagcggacggtgccagggtctgcgtcatcgccgaccccttcctcgcgtggacgacagacgtcgcccgccggcgtggcgccgcgcacgccatcttcgtctcctgcggcgcgttcggcagcgtggtgttccactcgctgtggaaccacttgccgcacctgcgtgcgcccggtgacgacgcgttctgcctcccggaccacccggaggttactgtccaccggtcgcagcttccgccttacctactccacgccgacggcacggaccggtggtcggcccaccaccgccggcagacatcggccgggtacgacaccgacgcgattctcatcagcacgatggaggagttggagacgaccgggctgcgcatgctccggaaaacgatgggcgtcccggtctatcccatcggccctctagtgcgtcgccggacggagcactccgatcacatcggtgaccataacgacgatgacgtcaagcggtggctcgacacccgagaggagaggtcagtgctgtacatctcattcgggtctaataactcgctaaggcctgaccagatggttgacctcgccatggcactggagctcaccggcaggccgttcatttgggctatccgtccgccgttcgggtttgacatcgagaccaccaacggccgcgagttcagcgccgagtggttgccggaagggttcgaggagaggatgcgtgccaagaacattgggcttctcatccacgggtgggctccgcaggtgagcatcctcgcgcacgcgtccaccggcgcgttcctgagccactgcggctggaactctgtgctggagagcatggcgcacggcgtgccaatcatcgcgtggccgctcacggcggaccagttcttcaacgcccagatgctggaggagtggggcgcgtgcgtggaggtgtcccgcgggaactggccggactccccggcgctggagcgtgagagggtggtcgaggtcgtggaaatggtgatggggattacggcgaaggcggacaagatacgacagagtgtgaagcagattcaggggatgattggtcgaactctggaggacggtggttcgtccaagacagcattggaggaattcttgaagctgcatggtcacattatgctcatgaaatgctgacgccgagagaaataattttctgttttagcaatttgcccaaccttgaaacgtggtgcctgaaataacctattatgtgttcttgaataacgcacgcatttgggttttgtattggaaaagctaatttcgcaagaaggttaatacacaacagctatagcattaaaaaat

SEQ ID NO: 19767 - DNA, 2554 bp, Oryza sativa
  ref <308>: DATABASE ACCESSION NUMBER: AK070111
  ref <309>: DATABASE ENTRY DATE: 2001-12-06
ggagtgagtcccgaccacgtcgctgccctcgcctcaccgccggccaaccgccgtgacgagagatcgagcagggcggggcatggacgagccttcgccgcgcggaggtgggtgcgccggggagccgccccgcatccggaggttggaggagtcggtggtgaaccgcatcgcggcgggggaggtgatccagcggccgtcgtcggcggtgaaggagctcatcgagaacagcctcgacgctggcgcctccagcgtctccgttgcggtgaaggacggtggcctcaagctcatccaggtctccgatgacggccatggcatcaggtttgaggatttggcaatattgtgcgaaaggcatactacctcaaagttatctgcatacgaggatctgcagaccataaaatcgatggggttcagaggggaggctttggctagtatgacttatgttggccatgttaccgtgacaacgataacagaaggccaattgcacggctacagggtttcttacagagatggtgtaatggagaatgagcctaagccttgcgctgcggtgaaaggaactcaagtcatggttgaaaatctattttacaacatggtagcccgcaagaaaacattgcagaactccaatgatgactaccccaagatcgtagacttcatcagtcggtttgcagtccatcacatcaacgttaccttctcttgcagaaagcatggagccaatagagcagatgttcatagtgcaagtacatcctcaaggttagatgctatcaggagtgtctatggggcttctgtcgttcgtgatctcatagaaataaaggtttcatatgaggatgctgcagattcaatcttcaagatggatggttacatctcaaatgcaaattatgtggcaaagaagattacaatgattcttttcataaatgataggcttgtagactgtactgctttgaaaagagctattgaatttgtgtactctgcaacattgcctcaagcatccaaacctttcatatacatgtccatacatcttccatcagaacacgtggatgttaatatacacccaaccaagaaagaggttagccttttgaatcaagagcgtattattgaaacaataagaaatgctattgaggaaaaactgatgaattctaatacaaccaggatattccaaactcaggcattaaacttatcagggattgctcaagctaacccacaaaaggataaggtttctgaggccagtatgggttctggaacaaaatctcaaaaaattcctgtgagccaaatggtcagaacagatccacgcaatccatctggaagattgcacacctactggcacgggcaatcttcaaatcttgaaaagaaatttgatcttgtatctgtaagaaatgttgtaagatcaaggagaaaccaaaaagatgctggtgatttgtcaagccgtcatgagctccttgtggaaatagattctagcttccatcctggccttttggacattgtcaagaactgcacatatgttggacttgccgatgaagcctttgctttgatacaacacaatacccgcttataccttgtaaatgtggtaaatattagtaaagaacttatgtaccagcaagctttgtgccgttttgggaacttcaatgctattcagctcagtgaaccagctccacttcaggagttgctggtgatggcactgaaagacgatgaattgatgagtgatgaaaaggatgatgagaaactggagattgcagaagtaaacactgagatactaaaagaaaatgctgagatgattaatgagtacttttctattcacattgatcaagatggcaaattgacaagacttcctgttgtactggaccagtacacccctgatatggaccgtcttccagaatttgtgttggctttaggaaatgatgttacttgggatgacgagaaagagtgcttcagaacagtagcttctgctgtaggaaacttctatgcacttcatcacccaatccttccaaatccatctgggaatggcattcatttatacaagaaaaatagagattcaatggctgatgaacatgctgagaatgatctaatatcagatgaaaatgacgttgatcaagaacttcttgcggaagcagaagcagcatgggcccaacgtgagtggaccattcagcatgtcttgtttccatccatgcgacttttcctcaagcccccgaagtcaatggcaacagatggaacgtttgtgcaggttgcttccttggagaaactctacaagatttttgaaaggtgttagctcataagtgagaaaatgaaggcagagtaagatcatgattcatggagtgtttttgaaaatgtgtataatttcaccgtattatgtactttgatagtgtctgtagaaactgaagaaagaaagatggctttacttctgaattgaaagttaacgatgccagcaattgtatattctgatcaaacattggcgtctactactctactagcaagtgatcttccttagctccaggtcgacaagaatcaagaatgtgtgtgttgtacccaatttatttagccaaaatgaaaaggtatattttctaagttc

SEQ ID NO: 19768 - DNA, 2114 bp, Oryza sativa
  ref <308>: DATABASE ACCESSION NUMBER: AK070112
  ref <309>: DATABASE ENTRY DATE: 2001-12-06
aaccagaaatcccatttccaaaaccctcgtcgacgtcgcctcggggagccccaacgccgacgccgtcgccgcggccgcgccaagagccaccgccccaactccggcgaagatggatgcgaaggtggacgagatgagcaaggcgtaccaggagctcgtcgcggcagcgcaggccatcctggaggcgcggcggcagccgggcggagagaacacggcggccatggacgcagcgcgcgaggcgttcgagcagcgccggaagctcttcgccgtcgcctgcgacgacgccgacgcgctcgtccagtcggctcgccagagtatcgtctccgaccccgggcgcttcgtcgacgtggtgaccacccccgacgaggattcggtgcgctctccgacgaggtcctccgcggaatcctcctcgtcgagcggattcggtgcgctccccgacgaggtgctccgccacatcctcctccgcctcccctccgccgccgccgccgcgcggaccagcctcatctcccgccgctggcgaaacctctggtccaccctcctcccgaagctgcggttccccggcgtcactgacctcgcccgcgtcggcgccgccctccgcctccgcgtcgccccggtccgcctcctgcgcatcgagagcagcgaccgcgccccggataagatcgtcgccgtcctccacttggccgcgcccctcctcgagggcaagctctgcttcgacgtcatcacgccggcggcagcggcagcgggggcggccgggaccgggggcgcgattcagatcccgtgcttcgagaaggccacggagatcaccatccgcttgcgcggccgcctcggcattcagctgccaccatccggcgtcttcgcgaggctcaccgcgctgagcttgagccactgcaggttcgacgaccagggccagcgcgatctcggggacgcccgctcgtcggaggggtgcccgtcgctacgagagctccgtatccgcgatgccgatgtggtgtccaatctagccatccgctcggagtctctccgccttgttcagctgtctcgactggaagggattcgtcagctcaccatttctgctcctgcgcttacagaactagatttgtacgcttgcttattgtgggggatgccaatggttgacatctttgctccagcactggagacacttcattgggttgattttttcagttcgagttcagtccgatttgttgagaagcccaacgtccatagactctccgtctatggcatggtgtatggacgtcgaaatactccaggctctctgcaactcgtgcagcattttacagaagcccgcgatgttcatctatctcttgtctatccctctatcatggatatgtcctgtgagctcctggtgcaagcagtgaaaaagctccctgccgttgaaatcctatctctgcggttattaacaataggacatacctttggaccttgtgtttaccatttgcttaagatgtctactggtataagggagctgaagctgaagttagaagatcacattgcggatggagaagttccttgctcatctggctgcgtttgttacgagccccaggcctggaaaaagaataatatcagcttgaattttctccagaaagttgaaatcaacaatttgagtggagcagagcgtcaaatatattttgtcaaacgactgttgagatggacgatgccagagctcaagacgattactctaagttttgatcctttggttactgtcagcgagaaggtgtctaggaagctacttagcttctctaccccagggatttgcatggaaatttacttgcaccgcaatggaactagggtaaagtatagtgcagcgaactagacctagaggtgattaactgacgatgaaatggagcacagtaatcactgaaaccaggcaaattcgggccttcctttcagatcaactagggttaaggatgtccgtctgtcatgatacaggattgtcgtatacttggttatggttgattgcacgactcacaacttgcgccttaatgtgtgtttacatgctctgaggaaagttttcatcctgctggtgaaaattgtctgatcgaaagtttgttccatttaaatgtgaatgctgcctgaccgaaaggttcaaatatctagtttcc

SEQ ID NO: 19769 - DNA, 2091 bp, Oryza sativa
  ref <308>: DATABASE ACCESSION NUMBER: AK070113
  ref <309>: DATABASE ENTRY DATE: 2001-12-06
gccaaaatttattagggggaattaatcccctttccctcctctctctttcccccttaattcccccttgaatggcgcccccaatcgccgggaacggacgcgccaactccggccaccttccatggccgccggccggcttttccgccgccgttcccggctcctcccgtggccggatccctccccacgcctataaaatggaatccccatccttcgttctatcgttttagccccttcccgagcctccccgtggtcgtatcacctctccccgccttctccttctctctctccggcgccagccggcctccagccgcctctccctcctcgcccgagcgccgtccggtcgcgccgtcgccgccctcggcctcgcagccgccttctctcccccggtcagccctccgtttcgcggggaaatcaccggagacgtgtcctcgccggcaaaacagtggcgttgccgccactgtactgcctccagccgcccctgccgcgccgctcaggtgcgggccggctgcgccgtctcctccctcggcgtcgccgcgtcgacctccaccccggcctgccctcggtttcaccggaacgccgtcgcccgcgtcggtctcgccctccgcctcaccggagttcctccggcagccccgtccgccgtgccagtgcgccggccgacgtcgccgtctccacctccggcatcgcagcggcaaggtcgccctcggcctcgcctcccctccatccgaaccccgccagtgttcgttatcgtcgtctccgttcgtcctcgtcgacgactcctccggtcggtcgttcctcctcgccggctcgtcgtctcgctgcgccgcctccgttgtcggattcgcagcggcgtgttccacgccgtcctcgtctccgtgcagctgctgctagctgtccctcgtcgcctcctcgccggccccggtcatcgtcgtcgtcgtactcccgtcgttcccggtcattgtggcgttcgtcctttcgtcaagccgttctcgtccgtcgtacgcgtccgtcaagtgtgccgctgcagccccgacggtgacttcgtcctcgcctcggcggtcgtcaagccttgtgccggccgcgtctcgccttcgtccaaggatcgccgccgaagtcgtccccttgcctttcgtctccgtcgttcccggccgtctccgccgcgcccgttcgtcgttgttgttccctcgcctcgtcgcgtggtggcttgtagctttgcttgtgtgcttcgcgtagcttctgtcgttccagaggttcccgaagcgtggttcgcggtcgtcgccgaaggttcggaaggccgttctctctgagcaaggttcttgaagctgaggcattgtactctttcaatgcaccaaagaacagggcatttcaatttaatcattgttggttcaagttgaggaattctccaaagtttcaaacactagaatcccacaagaagccaaggtctaggaagtcttcgacaccaattgagagagttgatgaagaaaatgaagaaggagatgatgctagcaagagtacaaatcttgatttatcacaggcgagtgctaaaaagagaccaatatgtaggaagcaagcaaaggagaagttgaagaatggaggagaagatggaccatacagggaggcaatgaaagatttgcttgacgccaaagagaaagaagcaaaattgaaagaagagagatggaagaaaactaaggagattcaagagcgcaagctcctatttgctgaacgtaagttagtgtgggatcaacaacataagatcatgttttttgatgtttccaccttggctatgagggcacatattgtagcttcaaatgtggctgccctcaatgatggatttgatgggagtagtggctttggaggtgagtttggtggcggtaatggagagagtttgagcacttcgatggaataaattggtttcttggatgatccatgtgtcctttactagtaggatatgtcattaccacgattggcctttggagcccttttttgttaaatatttccgcaataatttatattactttcagatttgttatttataatggaaccattcatggttgtaggatgtgttatttttaatttatataattgatcattggattc

SEQ ID NO: 19770 - DNA, 2593 bp, Oryza sativa
  ref <308>: DATABASE ACCESSION NUMBER: AK070114
  ref <309>: DATABASE ENTRY DATE: 2001-12-06
gagtgggcaccgatcgatctcgtctcctcccgaggcggcgtgggcgtggcgatcgaggcgagccgttgcatccgccctcaccggttagatccgtcctcgctaacccaacgccgacgagaagtttgcagtgctctagtatgtgaaacggatcgatttccatttgagcagcagcaactgctgctgctttgttttggttgatatgggcatggacatgcttgtctcggcagcattggaggaggtgtgcgcccgcctttcgcttggtctcccagtaactgagatgtggacagcactctccagcgtgttcaacatggccggcctcccaatggacctggccgtcaagcgtgtcctctttgcccgtctcattgcactccctgtcatcagcctcgtggttgagggggtgctcgcccacccgccacggatggacatggaggaggctgagcgatatggcgcacgactgcttgcgagccgtcctctcagggacaacttccttgggatttatgaccacaggtgctctgcttccaagctgagtgacatccagaggaagacgttagaattgatcggggcaagcaggacttctggtctcacacaacgcagtctaagcaaagaggccgagataaaaggaaacaacttccattatgttgtgaagacacttaagtcgcaagggttaattgttggaaaacaagcaattgcaaagattaatacccaagctaaaaggaaagctgtttcacaggataaacatgtcatcagcacaaactcattatatctctcaagatatgcgaaaaacttgaatatgaactcataccaaagaattgaggttacaaagcccaaacttgagtgcaatgaagaaactaacatagatgccttacaagaagatgagactcttagtgttgattacaagaacgatgtgtccattcatgattatcttccagcaatgaaagccatatgcgacaaacttgaagaagctagtggaaaggttcttgctgtatcagatataaaaaaggatctcagttacaggatgcaacctgggcacagagcatggagaaatgtactgcataggcttttaggtgcacaactcgttgaaaaaatcgctgccaaccttgatgataagattgttcactgcttacgtcttctgaagagatttaatccagatgagtttaagccaaaaggtacaatctcaaactacaaacttggcaagaaaggcctggaaactgatcaagtcatggagcttccattagacaactgtatatatgatatgatcgatgctcaagggccaaaaggcataacccttattgagcttggcaaacgtcttgggggaaagtacaacaattcgaaagagctccatgatcgagtatcatctatgcatgatagattcaatctgactgtggaggttgaagtcgttggcaaaagtaaacagggcagagtttggacttcaaaaaatttttcgctgtacaatgctactctgcgaaattgtgatgtgccagatgatcatgactattgttcagtatggcctctcattccttctgaagaaccgacttctgttagcccatatggttttgtggttaataacaaactcttgtttgaagaagattgtcatgatgaaccacccgtacatcgtctcctgaatagccatgaagcttgtgttggagtttctcaaccagttgaacaagataaagttgcctttcagaggaagaggcattgctggcccacgtcaatttctgatgatcgaagacagaaaaggattattcacatattaaagaaacatagttttgtactgatggtggagttgcataaatggttagagagagttgaaaaggaaaatcggaaaatatttgacaggaagacattgattcacactttggataagcttcagcaagagggtacttgtaagtgtattaaagttaatgtccctgtggttacaaactacgctggcagccgttccatattgatgtaatactgaattcttctgttaaagtcatgtcaccggaactcatggatcaaattaggaacagactaagaaattttgattctcaaagtcgttcaggtgcagcagctaaactgaagcaaaagcaagatacagctgccatacatggcttgagggttcaacgcagagtcaaagttaaaaaaatatcaatatcagaagctattcatgacaacggattcataggtgcaaagatgattcgggcaatattgttacataaatttctgtgggtatatgttagtggtttgccaaacgggtccaacgactgtgtcaaagaagggtagcattatgacaagaaccttgatcaatcatgtctgttattttcaatcacagcagctataaagaaaatgcctcttgaactctttctacaagttgtgggatcagcaaaggttcataccttgataaaaaagtgttctcttggaaaaacactttcagagattcctaccgacatatacaatcagctcatggatactcatgccaagggccgactctcgcgcctaataaatattttagataaactcaagttgatcggacttctaaatggatacatagaggattctaatgtgcaaccagatgatttgcctactcattcgctggagctcaggccttacatcg

SEQ ID NO: 19771 - DNA, 860 bp, Oryza sativa
  ref <308>: DATABASE ACCESSION NUMBER: AK070115
  ref <309>: DATABASE ENTRY DATE: 2001-12-06
gctcttgccgacgactcggaaaaaaaccgcggacaccgcgtccgctcgacggagggaaggggatgagctcctcgtcggcgtcggctgtgccgccggaggacgacgtctgctcggtctgccacgaccgcttccggatcccctgccaggccaactgctcccattggttctgcggagagtgcattatccgtgtttggaatcatggaccttctgtacagccttgcaagtgtcccatttgccgtcgccttattaatcttctggtaccagcaaatgtatcaatagataatgatgatgatccgcaaattcagcatgttctaggagaggttcagcattacaaccgcatatttggtggaacaccccgcaacctgactcagaggttgcaagacctaccctttttcatcagaagactgttcagggaactactggatccccagaggaccctcccacttgtcttcagggcgaggatggtcatgatggtagccctgagtgcaatttatgtcctgagccccatcgacattcttcctgaaaacgtgctggggctgtttggattcttcgatgacttcctcgtgctgctgatcgtgttcctccaccttgctgctgtctaccgttctctgctgctctaccgccacggaggccactgaattgctgctgcacattacgtgatggcagatggagtacttgcgtccctggctgacgttctgagacaagagatatttcatttgtgctggaagagattgctagctaaagtcgatgatgattgatggtacgaatgatggcggcagtagtttctctccccctgtgtattctatttcgctatgctatgccttgtttggtgatattcacatggtggatttaatgagacc

SEQ ID NO: 19772 - DNA, 1924 bp, Oryza sativa
  ref <308>: DATABASE ACCESSION NUMBER: AK070116
  ref <309>: DATABASE ENTRY DATE: 2001-12-06
gagttgcccgctaccttcctctccttcagttcacatcagcccagaggaagctcccattgttctgtagcctctgctgcatatgctgctgaaccaagactcggcgaaggagcagtggtgtctaagaagacgccaagccgttctccctgcaggacgatggccaaggttgatgacaagaatgatctctgcagaatgaatcaagcaaagttcgagccttccatctggggagatttcttcctctcttactgcaacccgttggcttactctgacaatcagagatcgatggaagaacgggcagagtatctgaagaaagaggtggcaaaactcatagtaaattcaagaaccgatagccttccggagaagctgcatcttatagatgtactggagcgtctctgtgtggaccatctgttcgaagaggagattaacgctgtgatggatgaaattagcgacgccgatgtcagtgactgtgaactgcatactgtagctctgtggttttatcttctccttaaacatcgacacagagtttctccagatgtgtttctgaagtttagagatgaagatggaatttttgaggcagaagacgcaagggacctgctaagtctttacaatgccgctcatctcacgacacatggagagggaatacttgatgaagctatttccttcactaaaaggcaactaagatcattgatgcccaaagttgttgaagggtcactagctcatgacataaattctgcgcttgagatccctctccctagaagggttcgaatatatgaggccaagtattttatgtctacatatgagaaaggagcttcagtgaatgagatgattatggaacttgcaaagttgagctacaatatcatgcaaatccatcatcagcaagagctgaaaataattacaaggtggtggaaggatctgcaacttgaaacaaggctctccttcgcaagagatagagttgtggagtgctacttttggatagcaggagtatatttcgagccatgttactctcgaggtcgaattatattgacaaaagtgctagccattgtgtctattttggacgatatttatgatgtatatggatctccagaagagtgtgaacagtttaccaaatgtatagaaagcttgtcgttcccgtcgtttcgaaggtttgcgagtgcgctggaagtgttcaagaagattaattgaagacccgttattacaagacagtagatctggttagagcttacaacaaagaggtgaaatggcgtgaagaaggttacattcctggaacaattgatgaacacttgcaggtttcagcgaggagtggtgcatgtcacctgctgtcttgcacatcatttgtagggatggatgatatagtttcaaaagactgctttgattgggtatgtagtgtgcccaaaatagtacaatcactctgcataattttgaggttatccgatgatcttaagtcatatgagcgtgagagattgactttacatgtagcgtcgacaatagatagctgcatgaaggaacacaacattgacattgaaatggcgtatgagaagatacatctactaatcgaggagtcatggaaagatttcaatggcgagtggttggattctggtaatactcaaccaatacaactaatggaacgaatattcaacctaacaagaacgatggagttcttttataagaaagatgatgcatatacaaatggccacacaatcaaggataatatctactcgttgttcgtagagcctgtaatgatgagctaatttgtcagattccgcatacaaacatctatgatttgtaggctatggtttggtctatttaataagcactatcacatttggtaataaaaacccagtgtgcttaaatctcatataaacacatatgagcattgtcaacatcttaagttgcaaaactcataataaatctgtagttttcattaccc

SEQ ID NO: 19773 - DNA, 1894 bp, Oryza sativa
  ref <308>: DATABASE ACCESSION NUMBER: AK070117
  ref <309>: DATABASE ENTRY DATE: 2001-12-06
gatttttcggatctggagagaggtgatgggctgatggctgcggcgctcaggggagcagctgattggccacgatggcggcttggtggagccgctcagcgacggtagcagcggcagccccggctaagagcggtggcggccctggctagaaacgtcaaggcggtggccctggttcgaaggagcagctcagcggcggaggcggccgccaacttagtggctcgagccggaggcgagtggcgtcgatgaaagccggctccacgatgacgggtgaccgctgttctccgcccacggtctccaccggcatcccttcagacgccaccaccctccccgccccaacccttgccgacctgctccacccaagccaccgtgacgccgctccaccggcttcactggcgttcggctctccaccgccggccccgtcactctgcgaccccctcgccatcttcgacacggtggccgcctcccgctccttaggatccccgagtcaccaccgcccttgatgtccgccttggccatggaccattgaggaggactgaattctgcattggtcatttgactttgttttaatctttcacatgctcgttgtttttcagggatgaatacagtggatcattgtggtaggcctgctcctagattgttgtcttcatgatgcattcaacacctcgttccttgctctgatcttaattttaactttagtactgaattcgtctatgcaacctccaggaaattggaacaagaccaggtgagcttttgtgtaccattatgagattgaggccctaatgattgcgagtggtggtggtcatatacaatttcttttttggattgctacttatagtcctgcggcctggatgttgtttttgcgatgcattaatcacctaattttcatactcatatgaatttttatgtggccagacatgaatttgtgtgtgcagtattgttagaaatctgctcacatctgaattttcatttgttcagttatcaggagttggcgcccttgctgtagaacaacacctgcaacatgcacatactctgttgtttctccgcatcggctgttttttgccaatgaggcggggatggcaacctccacatctgccgctgcctgactacctaactgctatatctgcatgttttttttttggaatacttggataattaactagtgaatgctctgaattttacttgacgcgagaacttgcgttggaggcatagcttgatggcactgcggttcacaatgctttgctttaaatgttcatgttctgaactttttgggttgagcagattaggtagagtggattgctccaaatatgttagctgaattttgttctactgcaggaatgctctgaataaattttgtagacttgatatttggattaaacccgttattttcaagtttgtatatttctatgcctcattgatatgcttaaatatgacacccctcacttataactgttggctaacaataggcataataaagtgaggttcttatgaagcattttatttcttcttcagataattgtatctcacttagagtcatttatgagtgtaaatcacttagatgatttaatctttttttgcaaatatccaggtggccatgggatgcctccctagatgatggccgtgggtgatggatatctgttgatggggaggcctagagaatctgcagcactttgtcagcttgattcgatatgtggcgccggagtcgtcctactcgcgggattcgggcaagggtcgacccacatcgttaggcctgatctacattgttggtgttgttgtaatcttttatttgtttttgtgtattctaccaatatatcgcattgtgtatgttgattagatagttgttgtaatactaaatcttattcaaacatttctcggatgttcatacatcttttactcaagc

SEQ ID NO: 19774 - DNA, 1364 bp, Oryza sativa
  ref <308>: DATABASE ACCESSION NUMBER: AK070118
  ref <309>: DATABASE ENTRY DATE: 2001-12-06
ggtcgtcgcttcgtattccatttttccgctttcctctctcccccgaatccccaattcgccctaaaccctgctagaacagcggcgagcagtgtcctgccatggccaccgccgcctgcggcgagagcccttcgcggttgggctccgcctccgccatcgtcgccgacacggagaccaggtaccacctcctcaagatcggctgctactcgcgcaccaaggcgacgacccccaccggctccttcctcagttccggccagttcaccgtcggcggccaccgctggcgcatcaattactaccccaatggggaaagcgccgactccgcggattacatatcgctttacctcttgctagacgacaaggccaccaatagcagtgtgaaggtgcaggcacagttcaagttccagattagttccaccgaccaggtgaagaacacaccttcattggcatccacgaatgtaaatacatatggtgaggattctagctggtcttggggtcacagaaagttcatcaaacgggaagatttcgagaagtccaatgatctcagggacgactccttcaccatccggtgcgacgtagcggttatcggagagatccgaactgagaagacgaccgagatcccatcagccacaacattcgtcactgtacccccgtctgacctgaaccagcagctcgtcgacctgctggagaccgagaagggcgccgacgtggtgtttgaggtcagcggtgagacgttcgcggcgcacagatgcttgctagcagcccggtcgccggtattcagcgcggagctctacggcttgatgaaggagggcgacaccgccggagtcgtgcgtatcgaagacatggaggcgcaggtgttcaagctgttgctccgcttcatgtacaccgactcgttaccaaagatggaggaggaagacgtcatgtggcaacatctgcttgtcgcggcagatcggcatgatctacagaggctcaagctgatctgcgaggacaggttgtgcaactacattggcgtcagcacggtgttgaacatcctggtgcttgctgatcagcatcactgcgacgggctgaagaaggcgtgttttagttttcttggctcactggagaacctgagtgctgttgtcaccggcgatggcttggagcatctgagcaggagctacccctctcttatgaaagaactatttgttgtgatggcacttccaccgaatcatggttaatattcttgtgctctagcaatgatagttgttggtttctcaatctgaagttctgaacctttctcatcaggtagatatgttatcttcttttagcacgcaggcatggtgctgtactccctgtgtatatatgcttttgttatcaggtatactatgaaaacc

SEQ ID NO: 19775 - DNA, 1657 bp, Oryza sativa
  ref <308>: DATABASE ACCESSION NUMBER: AK070119
  ref <309>: DATABASE ENTRY DATE: 2001-12-06
gacttactccccgatcggggtcctttttctctttttttttctttttctttttctcccaatacaaaagacactataattttttaaaaagtatcaatacaaaatgtttttaatattacttaaaatatgtgttcatatatttaaaaaaaatttggcacacgaagtaaacagagccttaatttcctggatagtctgccacaacaggctagccttaacgttggcactgtcagtttccaggataaccggcgtctgaatccattctgctgctagccgaagcccgtttctgcacgcaaacgcttctgcttcctcggcccactgacaactgcgatacatattccatgaagtcaggagcacgtcacccatatgatcgcgaatgacaatgccagttcaatcattcatctattcggctcttcagcgttccattcaattctcaatcttataaaaaaaagaaaggaaaaacaccactctcgacaagatgggttagagcatcaccaatgtatatgtcaaagtgatccatatagatgagacctatataaattgtttttccctatagcaatctccacagtgtatatagatacaaggtatcaatagaagaagagagaggagtagagatagataatataatttattccatatgggtagtccatatgcatatgggtatcttttgttattttttccatatggactagttgcacaatggttatagatggctgaataaaatattctattgcttatgaactacttttacaccacattgtggatgcccttacagcgacgaagcttgtgaggaatctcaagggaccagctacaagtattccactctaccaaaactacaattcactgcatcatcggcgggcggtggctcaagtactggacggaggccggcgcggtgctctcctccgtcgggttgttcgaagcgcagctgagcagcggcgcgttccagctcctcggcatggcggagctgggcctcctcccctccgtcttcgcccgccgcggccccggacgatccgccaccccgtgggtcgccgtcgccgcctccgccgccgtctcggtcgccgtctccttcctcggcttcgacgacgtcgtcgccaccgccaacctgctctacagcctcggcgcgctgctcgagttcgccgccttcctccggctccgcgcgagggaggagagcccctcctcgctcaagcgcccctaccgcgtcccgctgccgctccccgcgctcgccgccatgtgcctcgtgccgtcggcgttcctggcgtacgtggtcgccgtcgccgggtggagggtctccgccgtcgccgccgcgctcacggccctcggcgtcggctggcacggcgccatgagggtgtgcaggtccaggaagtggctcaggttcaacaccgcggttgccgccgaccatcgtctgcaactacaagatgctcctcctcctcctgctggtagagtctgaactctgaacccgttttggcagatttcgtcttgcgaaaagatgaaacacggtaagaaactcgaaatatttgctagtagaagactaattacaagctatactagtacaagactaattacatggttggatgaagctctaaagttggcgttttcatatttgttcctctaattaatcaccgtgtacgattgtggttcattatcagagacgcggtttaaattg

SEQ ID NO: 19776 - DNA, 1422 bp, Oryza sativa
  ref <308>: DATABASE ACCESSION NUMBER: AK070120
  ref <309>: DATABASE ENTRY DATE: 2001-12-06
gatcgcttctcatcgcaaatcgcatcgacttcgattcgcttcgtttcgttctcgctgttgatttgttcgtgagatttgaattctagcaatggctcctctcggtgacggagcggcggcggcggcggcggcggagcccaacctggtggtgtcgttcggggagatgctgatcgacttcgtccccgacgtcgccggcgtctcgctggccgagtccggcggcttcgtcaaggctcccggcggcgcccccgccaacgtcgcctgcgccatctccaagctcggtggctcctccgccttcgtcggcaagtttggtgatgatgagttcgggcacatgctggtggacatcctgaagaagaacggggtgaacgcggaggggtgcctgttcgacgagcacgcgcgcacggcgctggcgttcgtgaccttgaaaagcaacggcgagcgcgagttcatgttctaccggaacccgagcgccgacatgctcctgacggaggcggagctcaacctggacctgatccggcgcgccaagatcttccactacggctccatctccctcatcaccgagccgtgccgctccgcccacgtcgccgccatgcgcgccgccaagtcggccggcatcctctgctcctacgaccccaacgtccgcctcccgctctggccgtccgaggacgccgcccgcgccggcatcctctccatctggaaggaggccgacttcatcaaggtgagcgacgacgaggtcgccttcctcacccagggcgacgccaacgacgagaagaacgtgctctcgctctggttcgacggcctcaagctcctcatcgtcaccgacggcgagaagggatgcaggtacttcaccaaggacttcaagggctccgtcccgggcttctccgtcaacaccgtcgacaccaccggcgccggcgacgccttcgtcggctccctcctcgtcaacgtcgccaaggacgactccatcttccacaacgaggagaagctgagggaggcgctcaagttctcgaacgcgtgcggagccatctgcaccaccaagaagggtgccatcccggcgctgcccaccgtcgccgtcgcgcaggagctcatcagcaaggcagccaactagagctcctcggtttcgtcgtcgatcgccgccattgggggcctcggaattttaggtcgatttaatttagttgctgcttcgttttagacaaggaagaggaggggcttgggtgtgttcatgtctgtcttttgtgtgctaagttagttgcttccgtgtgagaacttttggcgtttatttttactattattattaataagaagctcttggatttgcggtggatattttggtctgaatttgtgtaatgaggcagctacttggcgaaatttattgtgtcatgtctttgttcagaggaaaagaaaatcttttcgtgtgctctgtttcaaatc

SEQ ID NO: 19777 - DNA, 1245 bp, Oryza sativa
  ref <308>: DATABASE ACCESSION NUMBER: AK070121
  ref <309>: DATABASE ENTRY DATE: 2001-12-06
ggcgccgcgcctcgcctcgcctcgcctcacctcacctcacctcaccctccgcctcgtctccttcccccctttcctctacccacgcacgccctctctcccatcccagccgtagccgcgccgtgacttgtctcgatcggcggcgaggaggagggcttccgttccctggccggtgggggaggatcaggcgggggggcggcggggagggggaggagatcggtctcggtcgatccgcgcgcggcggcgatggcgcgggagaggcgggagataaagaggatagagagcgcggcggcgcggcaggtcaccttctccaagcgccggcgcggcctgttcaagaaggccgaggagctctccgtgctctgcgacgccgacgtcgcgctcatcgtcttctcctccacggggaagctatcccacttcgcaagctccagtatgaatgaaatcatcgacaagtacaacacacattctaataatctggggaaagcagaacagccttcgctcgacttgaatttagaacatagcgagtatgcacatttgaatgagcaacttggggaagctagtctccggcttagacaaatgagaggtgaggagcttgagggattgagcattgatgaactccagcagctagagaggaacctggaagctggtctgcacagggtgatgctgacaaaggatcaacaatttatggagcagatcagtgaactccagcggaagagttcacagctggcagaggagaacatgcaactcagaaaccaggtatcccagatatcaccagctgagaagcaagttgttgatactgaaaattttgttaccgaaggacagtcctctgaatctgtgatgactgcattgcattctggaagttcacagtcgcaggataatgatgatggctcggatgtatccctgaaattagggctgccttgtggtgcatggaagtaactgaaaggaaaaaaaaagcatccttgcagatctggttggagtcgttgcggcatccaggggagaaacgcttgtgttattcccaaacccagactgcaataatataatcttgcgttggaagcgagatcagttaacctgatttatcatccttgtggctgcatgatgcgatgttccgcttgtactgttcgctaggatcttgactaaactttgagatctatgtgccgtttaattatcccatcgctattggcactccttatgcgatacatcatatatgcactttgttgctatcttaattatgatgcgtcttttgcagcgttc

SEQ ID NO: 19778 - DNA, 1260 bp, Oryza sativa
  ref <308>: DATABASE ACCESSION NUMBER: AK070122
  ref <309>: DATABASE ENTRY DATE: 2001-12-06
gagtgtccgtacacccaacccacctgggccgccgcgtctcgttctctcctccaacaaacccacctccgagcaggctgcgtgctctcgccgccgccgccaccgtaggcgagggcatctcatctcagggaggaatggcggagcggcaggtggcggagctgggggccggcgcggcgtgcgtaggctggaaccactgcggccgccgcctcgccgccggcgccgtcgacggcttcgtctccgtctacgactcccagtcccagccgtcgccttcctccaagtggcaggcccacaagcatgcgatcctgaatatcgtgtggcttcctccggactatggggatgctatagcttgtgtttgtgctgatgggacgctatctttgtgggaggaggtcagtgaagatgatcaacttccaacctggaggaaatgtaaagtatttgagagtggcaattctcacatactacacgtacagtttggattacaactgtctagtctaaaaatggttactgcatactcagatggccaagtgaaggtttatgagctcttggactcgttggaattagacaagtggcagcttcaggcggagttccagaacattacagatcctgtttcccgatctgggaagccagcatgtacttctgcatcaattgcatggagtccaagaagaggtgaaagtcagcaggctagttttgctattggtttcaattcagactctccaaatttcaactcttgtaagatttgggagttcgaagaagctcaccagcgttggctcccccttgttgagcttggctcacctcaggataagggggatatagtgcatgctgtagcatgggctcctaacatcggcagaccatatgagatcatagcagttgcgacatgtaaaggaatcgcaatctggcatataggcttaagcgctgaatctgacggcagcctgtcaactgagaatgtggctgtactttctggccatgatggggaggtcctgcaactggaatgggacatgggcggtatgacactcgcatcgaccggaggtgatggcatggttaagctatggcaggctaacctgaatggagtttggcatgaacaagctgtgcttgactgcaatgtgtctcactagggttgcatatcttttttttctggttggaactggggccttgggggattcccagctcccaagttgtgcaaacaagcatttaagtggattgcttatcaatgttaaagaattctgcaagatctctttcaattatactgtcgtgcacgtggttggtttt

SEQ ID NO: 19779 - DNA, 2025 bp, Oryza sativa
  ref <308>: DATABASE ACCESSION NUMBER: AK070123
  ref <309>: DATABASE ENTRY DATE: 2001-12-06
gcgccgccgcgccgctcgccgtcgcttcccccgcggcgcttcggggctccggcgatctctgctcgagctctgccgccgttggtccatccacgtcatggggggtgggaggaagcggcggcggcgggacggctcggaggcgccggcgatccacccgcgcaaccgctacgccgccgcggcgccggacttcgcgtcgctggcgtcgctctacccgtccttcgcccccttcgtctccgtctcccggggaggccgcgcctccatcgacttcaccgacttcgccgccacccgcgagctcacgcgcgtcctcctcctccacgaccacggcgtcaactggtggattccggatggacagctgtgccctactgtgccaaacagatccaattacatccactggattgaggatcttctctcatcagacctcataccaccaatatccagttcaaacaagactgtaaggggctttgacataggcacaggtgccaattgcatctaccctctgcttggggcttctttactaggctggagctttgttggatctgatgtcactgatgttgcccttgaatgggctaaaaagaatgtggagagcaatccacagctagcagctctggttgagattagaaatgcaaacaaaatgtcctgttcttctgaatctgaagcagttgatggtgaagcagccagggagaacacttcgaagccagtggatggtgtactgaggtcgaaaccatctatccttcttggcgttgtgaaggatagtgagagctttgacttctgtatgtgcaatcctcctttctttgaaagtatagaggaagctggtcttaatccaaaaacttcatgcggtggaactgctgaagagatggtttgtcctggtggtgaacaggcatttataactcgtataattgaagacagtgtttcccttaagaactctttcaggtggtttacttcgatggttggcagaaaagcaaatctaaaaatattggtttcaaaagttcgtgaagctggggtgtcagttgtgaaaactactgaattcgtgcaaggtcaaacagctagatggggccttgcatggtcattcattgctccaaggaaaatggtcattagatccagtacacctggaaaagccaactattcttttatgcttcaaggccttcgacgtgaatatggtgcatttcaagtgctgaagtcagctgagagctttttccatgcttctaatctatcgtgtaaaactgattcttcattattttctattgatgttaccttatcagatgagcaggctcaggctgcaatgttgcacgatgaatctggttctgtagaaggcaactctacaaagcttcatagtggtgttactggaacatccttccgtatttcggtgtttgaacaaatgccaggcacactcctagtcagaggttcattattgaacaaagcactgtcaggtatcttctcatcgacattctcacaactagaggacacattaaagatggaattcctcagcaaggcacggtagttaaaggccatcattagggacttaatcatgaaccctaatcagcctaatgtttggcaatcatgaggcagccatggaccatggccttggccggtagccacagagatcacaggtgctgagctgtgatgaaaagctgcttccgctgcaggaattcttgtcgcccatcttttgcttgctggtgtgggcattcacccctggacaagcaagctatacgctgtcacggtgcttggttacaagtaacgttaaatgtttttttttttttttggcggggaaagtaacgttaaatgttgccttcgctgcttatccgaaattggaaaacgactcgccgtgtgagattcttccttttccagattctgcagtgacacccacaatgaagaactgcttttgtgtcactggctgtgagatgtttgtagatgcctgaagctgtgctcaaaatatccgtagaaatacactgcatggtctgtactggatgtctggatgattgtataccaaccgtctcttgcaagttgcaacagctgtgttcattgcctccc

SEQ ID NO: 19780 - DNA, 2312 bp, Oryza sativa
  ref <308>: DATABASE ACCESSION NUMBER: AK070124
  ref <309>: DATABASE ENTRY DATE: 2001-12-06
ggattgtcctcaaccacattgttcggcggccctccctcctttgaggcttccttccctaaaagggcgttggagggcgtggaactagctagcaatttgttatagtcggattgaagaagactcgatgcgagcggtctctatggccgcaacccatcgccgccatagacgtacggacggccggctacaacacaacacagtaactgtaactgaagaagccggcgccaccattcccgccgccaatatgctcgccgccgccgcctccgtcaagctctccacggccgggaccgccacggcgcccaagatggcattattcaagcccctccacctccctcccctcttcgccgccgccgccgccgccgccgggccacgtcccctctccctctcggcgcgccccctgtaccggcagcaggacccgttattcctggcgtcgcgcgtcgcgtcaccggcgccgccgccgccgtccgccaccgccgacggcgcccggccggtggaggctgcaccggcgggcgcggcgccggaggaggcggcgaggcgggccaagatcggggtctacttcgcgacgtggtgggcgctgaacgtgatcttcaacatctacaacaagaaggtgctcaacgcgttcccttacccgtggctcacgtccacgctctccctcgccgccggctccgccatcatgctcgcctcctgggccaccaggatcgccgaggcgcccgccaccgacctcgatttctggaaggccctgtcaccggtggcgatcgcgcacaccatcgggcacgtggcggcgacggtgagcatggcgaaggtggcggtgtcgttcacccacatcatcaagagcggcgagccggcgttcagcgtgctcgtctccaggttcttcctcggcgagcacttcccggcgccggtctacttctccctcctcccaatcatcggcggatgcgccctcgccgccatcaccgagctcaatttcaacatgattggtgagtgagcaaacactctgcatctctctgtctctccacctgaaatcctggagatacttgcagcagatacaccagaaatatcctcactttttgattaaaaaaatagatattatctccaagaattcttcagaacaagaactgtccattaaccaaagatatgttttcttatgtcagataaagaaatatacaccagccacgaaaaagtgcacaatttgttcataaacctgacacatcacatcaatctgttcatcgtgtattgctgaaaattcgatgcaggattcatgggggcgatgatctcgaacctggcattcgtgttccggaacatattctccaagaaggggatgaagggcaagtcggtgagcgggatgaactactacgcctgcctctccatgctctcgctggtcatcctcctccctttcgccttcgccatggaggggcccaaggtgtgggctgccggctggcaaaaagccgtcgccgagatcggtccaaacttcgtctggtgagcctcacatgcttttctttgtaccacttctcaccgtttcactgtcacaaccatcacgtcagttgagatttttgggtatcaattgggcaaaaaatttctagtgataagtgcttgacctaagctttcaaacagtttcagcatgcaacactttgtactttcagtaacatcactcaagtattctatacaaaaagaaccattatcaattaatatagatataggatcgtcctatcactatcatttcctcctaagcggcaatatcttcttcagttcattctgaaagagaaataagaagtatcaaaagatttgatgatatttttgtgtgataatccagctgattcatgtggccatggatttctctgtggttttgtaggtgggtggcggcgcagagtgtgttctaccacttgtacaaccaagtgtcctacatgtcattggacgagatctcaccactgacattcagcatcggcaacaccatgaagcggatctccgtcattgtcgcctccatcatcatcttccacacgccggtccagcccatcaacgccctcggagccgccattgcgattctcggaactttcatctactctcaggcgaagcagtaatggcataagcatggaaatggcacccgttttcgccacaagtcgcgactcggtgctcgggatgtaacaatgctatgagcatatatccaaggatcccttgtaatatattagatcttcttttcttttcatttttctttctctaggtgtagctgccaatgtttcttctgaattcgtcgagttcttgtactatgactatgatgatgtagagaggtggatctgcctaaataaagctgttagattttttgctcg

SEQ ID NO: 19781 - DNA, 1206 bp, Oryza sativa
  ref <308>: DATABASE ACCESSION NUMBER: AK070125
  ref <309>: DATABASE ENTRY DATE: 2001-12-06
aggccgaggagtacctccaccagtacggccgcaaggagggttccgccggatccggcggcggcggcaagtaccaggatgagggcggcgagggcaaatacaagaagaagcccggtcatggaggtgggaggtacgaagaagaagaagaagaagattacaagaagaagcctactagtggtggtggtggtggctatggaggaggaaggtatgaggaagaagataattacaagaagaagcctactagtggtggtggtggctatggaggaggaatgtatgaggaagaagatgattacaagaagaagcctagtagtggtggtggtggtggctatggaggaggaagatatgaggaagaagatgaatatagaaagaagccgagtgggggtggctatggtggggggaggtatgaggaagaagaagatgattacatgaagaagccgagtgccggtgcgggtggatatggaggtggtggaaggtatgaggatgagtacaagaagaagcctggtggtggtcatggtggagggaggtatgaggaggatgatgagtacaacaagaagcctagtggtggatatgggtatggtgcttcaagtggtggaggccatggtgggaggtatgaagaagatgactacaagaagaagcctagcgcgcactccggtggcggcggtggcaggtatgaggaagaggaagggtacaagaagcctagtggccatgggggagggaggtatggtaaggaggaagaggaagatgacaagaagaaaaagaagcatggcgaggggtcggagggcggcatgggagactacctgaaactggcacaaggtctcatgaagaagcaaggcggtgagggggagagcggtggcggcggtatgggtgactacttaaagcttgcggaggggttcttgaagaagcgctgatttgtaactgaatctatgatgtctcatgaattgtgaaggaccttgctgtgtttggttagtttcctgttctacttaatgcccaaatggtgtgaaatcatgtacgatctccatccggttatacaataaaactgtcttggtcagttggtcatgttgtctctgcattgtaacacgaatgcttagggtgctacccatgaattcgggggaataaatattggatggaaacctgtgttgctcatgttgtgtgtgccattcctgactataattaagtattataatgctatgcagatgcatttttcagagt

SEQ ID NO: 19782 - DNA, 791 bp, Oryza sativa
  ref <308>: DATABASE ACCESSION NUMBER: AK070126
  ref <309>: DATABASE ENTRY DATE: 2001-12-06
gatctgagggcggaagcaaagggggaaacagtcccactctgaagagtctgaagattccccaaggtctatttggtttccaatcttattgaagcaggagaagaattgtacgtgctggggtggtgaaacacaagatcctgattcaatcactgccatgggtgaagggttcttgcaaactggagtcgattctgttgttgcatggtgaggtgaatttgccatctcaggattatacagaggctaggtgtttgtggaattgcctccctggaagcagctgtagggaaaggctggagaggagaggaaattgagggagaagagtgcgaggatgacgatgtcgtgggggcttgcggctcacattgtggacatggtgtggatggtgctcgccggctgggtttcaacgtgcctggtgatcgccggtgagatagcccgcggcatgcggaacggggagatcagcccctttgttgttggctgaatcctcctgggccattcttccttcattcattgatgcagatagattttgtcgaatccagtccttcaatacacattgcattatactgtacagagcccataaatctcgattagcgttccactgattgccttcaggcgtaaacagaagtggtagactctaggtcattatcttttcattcttacattttttttatgtcatgtaatcctgtaaacatttgtgcaactacatatgaacaatcatgtcatccctatgttctttttcaccctctcagcaagggtactgaactgttttgatcgatactcaaatgaagttccacagattatgctgc

SEQ ID NO: 19783 - DNA, 2139 bp, Oryza sativa
  ref <308>: DATABASE ACCESSION NUMBER: AK070127
  ref <309>: DATABASE ENTRY DATE: 2001-12-06
tgattgcgaagccgcaagcaaagccgccggaggaaggagcaatcgcgagtactcgccaccatgtaccgggcggcggcggcggcggcgtcgtcgatttcgaggtcctcgtcggcgctgcggaagcagctgtcgcgcggcggttgcggggagcagcggctgtgggcgcgggggtatgcggcgaaggaggtggcgttcggcgtcggagcccgggccgccttgctgcagggcgtgaacgacctcgccgacgccgtcaaggtcaccatgggccccaaggggcgcaatgtgattatcgagagatcccatagagctcccaaagtcacaaaggatggagtcacggttgcaaaaagcattgagtttgaggacagtgctaagaatgttggtgcaaacctggtgaagcaagttgctgaagctactaataaggtcgcaggagatggtaccacttgtgcaactgtacttacacaggctattcttacggaaggctgcaaggctgtggcagcaggggtcaatgttatggacttacgtaatggcataaacaaggccataagttctatcactacacacctcaaaagtaaagcatggattatcaactcctcagaagaaataaatcaggtagcaactatttctgcaaatggagaaaaggaaataggagatttgatatcaaaggcgatggaaaaggttggaaaggatggagttattactattactgatggcaagacattagacaatgagcttgaagcggtacagggaatgaaactttccagaggctacatatctccttactttgtgactgatcagaagactcagaagtgtgagatggaaaatcctcttattctaattcatgacaagagaatctcaacgatgaattcacttcttccagttttagaaatgtctatcaagaatcgtaggcctcttctcatcattgctgaggatgttgagggagaagctctatcaatgcttgttctgaacaagcatcgtgctggattaaagatatgtgctgtcaaagctcctggatttggtgaaaacagaagagccaatctggatgacgtggctgtgttgacaggaggagaggttgtcagcgaggaccaaggtcttgatcttggtaaagtcgaactacaaatgcttggcactgctaaaaaggttactgtatcccttgatgatactatcattctagatggtggaggcgacaaacagcagatagaggagaggtgtcaacagcttagagaatcaatggacaaaagcactgctgtatttgacaaagaaaaggctcaagaacgtctatcaaagttatctggtggtgttgctgtcctcaagattgggggagctagtgaagttgaagttggtgagaaaaaagatagggtaacagacgctttacatgcagcaagggctgctgtggaggagggcattgtaccaggtggtggagttgcccttctgtatgccaccaaggagcttgacaagattatcacagcaaatgaggatgaaaagattggagttcaaattatcaagaatgctttgaaggctcctttgatgactatagctgcaaatgctggcattgatggtggtgtggtcattgggaagctaattgaacaagataatcttaatatgggctatgatgcagcaagaggggagtatgttgacatgattaaggctgggatcatcgaccctgtgaaagtcatccgaacagcgctacaagatgcatcaagtgtttctttgctgatgacaacgacagaggcagctgttgctgagcccccagcagcaaaggccagaatggctagtcggatgccgcagatgagcgggatggatttttgagagcaagtaacatgatttatgatatgtcttctcctgatgtaaggcagtgcccctcaaatgaaaggggtgattttttgaaagctatatgacgtgattttgtcttttcgtggtgaaaggcagtagtagtacttaatatttctacagaatttcacggcccgggagaaagacgttacagatataatttattttaaacttgggaattgggaatccgtctgatgtaaactgaactaatgtggagcagcacctcattttgtagattactacatatgtgaaattgatactgtgaaagctgcaatattttactatgcattttggcaataattttgcctgcgc

SEQ ID NO: 19784 - DNA, 2551 bp, Oryza sativa
  ref <308>: DATABASE ACCESSION NUMBER: AK070128
  ref <309>: DATABASE ENTRY DATE: 2001-12-06
gagctccaggggagagtccctctcacgttaggttgttcccttcccctgaattcctaaccattttctatcatagaaatcacatatttttaacaccaccatctccctcctggcctgtgaggcgagcacgtttgtttaatcgtcgttgcctcgcgcgtgggcgccgaagcttcgatctgcatccgatcggatcagaatcatcacctgctcatccggtggttgtgtttctgtctgtccaccctgctgctgctgcctcgtttgacctaccgtttctttaatctggcgccagcagcatacgtgctatagtgtgctgccattggatggccacgttgtccatgaactggtcaagaggaggacgaagagaaatagaaaaaggagaagcgaatcattcaacagctcggtacacgaatggttgttgccgtgttgcgttaggcttttgtgagctggtgaggaggttgtcctcgatgacaagctaggtgtgaaggacgatggtttcttgatcgggacggccgggcatccatggaaggttcttgcggcggtggcggcggcggcggcgccgggcagatggcggcgtggcaggggagggtcggggcgaccaacatcgggaggctgcggcatgggaagacgtcgtcgtcgtcggcggcggcggtggcggcgaggggcggcggcgtgacggcgtggcacctgagggtgttcgccggcgtggtgggagtgatggggtgcctcctgctggtggcgtccctgatgatgtccgccgtccaccaggtgcagttcaggaacgcagccatttccaggagcttcaggggccttcaggaactgaagcaaaattctgtaaggacggagaaagcagagcagataatgcacccaaggcttctgcaaatggcaacttcagttgtcacaaagaacgagtctgacagtgacagtgtaaaattttcactatgggaagagccctacaaacaagcacgtaaatggaagccctgtgctgcaaagcatagtttacctgatgaagtgcctgaagagaacaacaatgggttcattctgatcagcgcgaatggtggtctgaaccaacagcgtgtggctgtgtgtaatgctgttgttgttgcagctctgcttaatgctacactagtcctccccaggtttctttacagcagcgtttggaaggacacaagccagttcggtgacatatatcaggaggactactttgtgaactacatgaagagcgatgtgcacattgtgaaagatttgcctccccatcttcagtcactggatctcgaagcaatcggcagccaaatcacagacatggacatctcgaaagaagctgcgccatctgaattcatcaaagctgtgctcccaattctccagcagaatggcgttgtccatttcctcggattcggcaaccggctcggcttcgattcggtgcccgttcatctgcagaggctgcgatgcaggtgcaacttccacgcgctcaagttcgtcccggagatccagcgggcgggctccctgctggtccagcggctgcgccgcgccggcgcgatgcggacggagatggacaagcagctgttcgggagcaacatgctcgacgtccccgccctcctcgccggcggcgagccgagcaggtacctggcgctgcacatgaggttcgaggaggacatggtggcgtactcgctctgcgacttcggcggcggcgacgcggagagggaggagctgcaggcgtacagggagacccacttcccgacgctcgccatgcgcctccggaacacgtcggtgtcgccggaggagcagcgcagcctggggcggtgcccgctgacgccggaggaagccgggctcgtgctcaccgcgctcggctacgaccgcgggacgttcatctacgtcgccgggtcacagatatacggcggcgccgcgcggctccgcccactgacgcgcctcttccccaacctggtcaccaaggaggacgtcctctcctccgccgagctagccccattcaagaacttctcctcccggctcgcggcgctggacttcatcgcgtgcgcctcggcggacgtgttcgcggtgacggactccggcagccagctgtcgtcgctggtgtccgggtaccgggtgtaccacggcagggggagggcgccgacgctgcacccgaaccggaagcgatacgcgcagatcctgggcgaggaggaggggatcgggtggggcggattcgagaggagggtgaggaacatggtggaggagtacaagcgggtcagcgcgcggccgcgggggcggagcgtgtaccggcagccgaggacgcccgggtgcatgtgcagggcagccggcgacggcagcgtcgacttctgatgacggcgccgcccgccggcgagttctccgcgtctcgatcgaaattcttttgtgcatagctcggtttctaattttctataggtttttcgggtcgttttaaccttttaatagctctaggatacacggcaggtttaaatgatcaaattttgaattttttttacaggctgtttttagattgtaacaaacagatttgaaaaaggtgcaattcaaaattatgtgtctg

SEQ ID NO: 19785 - DNA, 1585 bp, Oryza sativa
  ref <308>: DATABASE ACCESSION NUMBER: AK070129
  ref <309>: DATABASE ENTRY DATE: 2001-12-06
gaacttcttttttctcttcttcttctcctccattccattccatttctcctcacgctaccgccacaggtgtccgcgccgcgagaggcctcgggctcggctggtggtggaagaatcggatcaggagaagcaaaccaagggatagaaattcctccccccagaagatctctcatccccgtgcgctgctgctgctgtgtcgtcgtcgtcgtcgggagtggggagcgagcgagcgagctggtctgtgtccgtggtgattggacaggacatggtcgggcggatggagcggcagtcggcgtcgtcgtcggcgtcatgctccccctcctcctccgccgccggcacctcctcctcgtcttcggcctgcgggggcaagaagcggcccgacatactcaacatgatccggagtgcaacatgccttgattcgtcatctaccgataccggcaaggggaggagtaagcagtcaagcaacaaagtgactcatggattccacttggtggaagggaaatctgggcatgacatggaggactaccatgtggcagagtacaagtatgacaagagccatgagcttggtctctttgccatttttgatggtcacttgggagacagtgttccaagttacttgaaagctaaccttttctgcaacatactgaaagagcctatcttctggactaaccctcaggaagcaattaagaatgcataccgctctacaaacaaatatattttggagaatgccaaacaacttggacctggtggttcaacagcagttactgctattgtcgttgatggaaaggatatgtgggtagcaaatgtaggtgattcaagagctgttgtgtgtgaaagaggtgctgctaatcagctcactgttgaccatgaacctcatacaactaatgaaaggcagaggattgagaagcagggtggctttgtaacaacatttcctggtgatgttccccgggtaaatggtcagcttgctgttgcgagggcctttggggaccaaagcctcaaggcgcacttgagttcagaacctgatgttaggcatgtaccaataagttcaagcatagagttcgtcatacttgccagcgatggactatggaaggtaatgaagaaccaggaagccgtcgatcttgtgaagtcgatcaaggacccccaggcagcagcgaagcgactgacgaccgaagcgcttgcgaggaagagcaaggacgacatctcctgcatcgtcatccgattccgctgctgaacacccgcttcgcaacattgtctctgcgtttctcttcgttccgattgaatttgtgtggtggtgctgaaaaaagatggtttacctatagtatgtagctgttgtgaacagaccctagagatgagatatgttagcaaggacaaaactggagatgttcaaacttgtgggttcagtagcgagtagtgagtgtgtgcagggtggtggtgggcggtggtgattcgtctgtgcatacatacaccagcataaactgttttatcaatcgaacggggcgtgcaggttgttgccgttgtgtacatacattgttgcttggttttggctgtgagttgtgaaatggtagtagtcccagtcatgtgtcatggc

SEQ ID NO: 19786 - DNA, 3171 bp, Oryza sativa
  ref <308>: DATABASE ACCESSION NUMBER: AK070130
  ref <309>: DATABASE ENTRY DATE: 2001-12-06
gaccctcccgtccatgtccatggtggtcgagcaccaccggcgcggccaccgcgagctcctcctccccctctaatggcgcagtacaggcagtcgggcggcttcttcgactaccgcggcggccaccaccacgcgctcccggagtaccaccggcccctcccgcacgcctccaagccgtcccggatccgccgccccgggaagcccgcgcgccgccgctcgccggccgcggccgccgccgtcgcgtccgcgctcctcctcgccggcgtgttcctcctctcgcgccgcctctcccgccaacccgcagagatcagccaagatttgggcggcggcggggaggggttaccggagtggaaccggagcaaggagctcaagttcggccatggcggtggaggccggagcgcgcaggattcgaggtactgggaccgggacgatcggaggcgggacgaggactactcggaggacgagaaggagaagatctcgggtgcaagtggaaataatgccggtgtcagtgataaggttgtgacctctgatcctgctgttgaggagaaagggttgaccatggataccggcggtgccgccgataaggaggctgctgaggtagctgaaggtgggaaaggagggaccttgtacaatgaagggggcaggaaagagctcgagcagtatgaggcggctgcgatgggagctgcgggtactgggatcagggaggttgatccggatgatgagtatgacgatggcattgatgcacaggacgatcttgatgatgctcagtcgcattcatctgatggcgggaggaagcttggcgacagtagtcatgagagcaccgagagtaaggaaaatatagctcatgatagcaccggcaataaggaaagcatcgccttagagagacgcacggaaacaggtgcgggtattagtgatggtgtcgatgttattgatgctgctaatgtgaaccaaaagaaggtttcggcgactggtgataagaaacacgcgtcaaaaaagaaatcaaagcgcaagaagactggttcaacttgtgaaatgaggtttctgaactccactgctcaactcgtagagcctgctaaaaatgagaaatttgctagttttaatttggaatatgtggaagttgaagacaaacctcttggatcagagtattgggagccaagatttgctggccaccagagtttacaagaaagagaggaatcatacttagctcatgaccaacaattaaattgtgcttttgttaagggtcccaatggtacaagcactggttttgatatctcagaggaaaacagaaagtacatgagcaaatgccacattgcagtatcttcctgcatctttggaaattctgatcgtctgaagactccttttgggaaaacagtatgttctttttctgtaccaacaaactcctgaaaaaattatgatacccctaatcctgcatgagttacaaccaatgtaactcttgtcaatgtatttattttggttctcttgtatattttggcaatcgcaaaattagcgttctttgcatgatttgtcttagaaccttataatctcagtagcttcatttttaccataggtacttattggctctgttagtaggcaatgaaacataaaccttatataataggcctgtgaaatgcaactgaaccttctgcaatgttagtttggatatacatgaatatataacctcaatctccatacttaggttaaacaattgctgacctttccattctgttgttccaatgctccctgaatctttttaaatgcttcagaagttgatggaaatctggtaatatttaagaaataacttcatatgatatctgtctacgcagattacaagtctatcaaagaagacagtatgctttgctatgtttttggatgaaatcacattacgaactttggaatctgaaggccaaaaaatggatagttcaggtttcatcggtatatggaagatcatattgattaagaatatgccttataatgacatgcggagagtcggcaaaataccgaaatttctggcacatcgtcttttcccatcatcaaggttctcaatctggttagacagcaaattgcgattacaaaatgatcctatccttatcctagagtattttctttggcggcatggctatgaatatgctatttccaatcattatgatcgacactgtgtttgggaggaagtggcacagaacaaaaggctgaacaagttcaaccatacaataattgatcagcagtttgagttttaccaagcagatggactgacaaagttcaacccatcggatcccaacaagctgctaccaagctatgtccctgaaggttctttcatcgtgagggaacacacaccaatgtccaacttattttcatgcctatggttcaatgaggttgatcgattcacacctcgtgaccagctcagctttgcatatacatatttgaagcttagaagaatgaacccggagaagccatttcgccttaatatgtttaaggattgtgagaggcggtcaatagcaaagttattccatcatcgatcagaagagagacgcagcagtccacaactaacaagatgacagagattctttcggaatgggtggtgcaaggatattttaggattttacctttgatatagcacaggatggcacaggactattcagtgtcaagatttatgcccctgctgaggaatttaagcctaaaggtcgcaagcgattctactcctttactctatgatcctgcagaccagttcctgccgcctttctattttgcacttgacaaaggcggattagggaactatggccgtttgattttcgtaaattcttctgctctcggtaaagttttgttcattcttttggggtgatctgggacaagtggggcatgaactcccagaactagtttagcactgtgtattatcatatggttgttaaaagaactaccaagtgaagacatgattccgatgtaatcctcaatggtcttgttgaaatgtaatactacaacaggaaacaaaaccttctgtaatttctctgtgatagcaaactagcaattttttttttgtctgaatttgtggaatctccaggcttcccttgtgcttttgctagatcagaactgagaatgaataagtgatcatctgtttgttttttgttccatgtactacagcttgctgcaattgagcattccttcaacaatgaagaagtgacc

SEQ ID NO: 19787 - DNA, 988 bp, Oryza sativa
  ref <308>: DATABASE ACCESSION NUMBER: AK070131
  ref <309>: DATABASE ENTRY DATE: 2001-12-06
gagcactgcagccacacacacctgcgactgcgagctccccgtctctcgccaatggcggcgttgtcgtctgcctccttgctccctcctccttccaccttcgtccccgtcctctcgccactccgcaagccgccgccccagcacctcgccatccgcggctccccccaccgccgtcgcggccgccgcctctcgctcgccgcttcctccgccgcctcaccggacttagagaaggagccctcgcaatcgccctcgccctcgccgcaggagaaatcccctggtgatctgtcggccgtggcggagagcgtgaaggtgctgaaggaggcggccaagacgaggaaggtgccgtcgccggagttgctcgcggcattggccaagatcaagaaggcaaagctcgacacatccaccttcttcgagaccctcggtgggacacagtccccgggcaggacatggatgctcatcttcactgctaagggtcggctggagaaaggacagtacttcccagtgaccgcagtccagcgctttgatgctgcaggaaagaggattgagaatggcgtgtatttggggcctgttgggtccttaacctttgaggggaggctgtcatggaagaggaagatactcgcattcatcttcgagcgggttcgcataaaggtcggccctttcggccccctcgaaatcagcctcggaggtggcaatgatggtagggagccgagcacaaaggaccctttctttgtgtggttctatgttgatgaggaaatcgctgtggcacaaggcagaggagggggagtggcttactggtgcagatgtaagcgtgttccatgaactctgaagattcagttcagtcatcattccaggatgttcagttcagtttatgtatagataatttttcatcttctacatgtgtaaaaaaacgaagtattgaaaatgataccagttcgatgatgtctgcctgtacctgtaaattgtgttggtatagaatgccaaacgattgagc

SEQ ID NO: 19788 - DNA, 566 bp, Oryza sativa
  ref <308>: DATABASE ACCESSION NUMBER: AK070132
  ref <309>: DATABASE ENTRY DATE: 2001-12-06
gtccgtcagacatggctccggggaagcaacgaggcaaggccaaaggggccccaccgccgcccgccgcccccaacgccgccgccgccggaggcttcccggcctgcctccgcctgatgccgccctccaccgtcgccatctcaatccaagccaagccaggctccaagctcgccaccatcaccgagatcggcgacgaggccgtcggcgtccagatcgacgcgccggcgagggacggggaggccaacgccgctctcgtcgacttcatcagctccgtacttggagttaagaaaagagaagtttctattggttctggctcaaaatcgagggaaaaggttgtgctggtgcaagatgcgactctccagggtgtctttgatgctctgaagaaggcttgtgcttctgcatgatgtatgttaaatgtgcatatgtgaaaactactcacttaactgaatagaaagagtgtcaacttaactagtgcccttttatctgtacaactctgtcctgcaatgaaccctgtaaacggttaattaatttgcctagcgagtttacaagatgaaaactttggtcatcgc

SEQ ID NO: 19789 - DNA, 1071 bp, Oryza sativa
  ref <308>: DATABASE ACCESSION NUMBER: AK070133
  ref <309>: DATABASE ENTRY DATE: 2001-12-06
gagtccaccatagtagctaagctagcacaggttgcaacgagcagagagctaggcgaaatcgatcggaattcggagatggcgcgccgtggccatgtgttcgccgtggtggcgttcgtcagctacgcgctgctcgccgccgcctcgacgacggtggaggcgttcgcggcgtcgggctggagcaagggcaccgccaccttctacggcggcagcgacgcctccggcaccatgggcggtgcgtgcgggtacggcaacctgtacacgcaagggtacgggacgcggacggcggcgctgagcacggcgctgttcgacgacggcgcgtcgtgcgggcagtgctacgcgctgacctgcgacgcgagggcggacccgcggtggtgccgcgcgggggcgtcggtgacggtgacggccaccaacttctgcccgcccaactacgcgctccccagcgacgacggcggctggtgcaacccgccgcggccgcacttcgacatggcgcagccggcgtgggagcggatcggcgtgtaccggggcggcatcgtgccggtggcgttccgccgcgtgccgtgccggaggcgcggcggcgtgcggttcacggtggccgggcgggactacttcgagctggtgctggtgacgaacgtggcggcggctgggtcggtgaggtcgatggaggtgaggggcagccgccgtggcgccgggtggatggccatgtcgcgcaactggggcgccaactggcagtcgctggcgtacctcgacgggcagggcctctcgttccgggtcaccgccaccgacggccagaccatcgtcttcgccggcgtcgtgccgccgtcgtggaggttcggccagacgttcgcgagcacccagcagttcatgtagctagtctcactctcgctcgggttccctttggttggcacttggcagtggcgttgtttgctatactttgctctcttctgttggtgtttaattagcagcccgccaacgatttgtgctatgtaatcgtgttaatttgacagtttttgtggtgtattgagaagacttgtccacgtatcaatctagcacaaattgctttgcaaagtaacc

SEQ ID NO: 19790 - DNA, 1087 bp, Oryza sativa
  ref <308>: DATABASE ACCESSION NUMBER: AK070134
  ref <309>: DATABASE ENTRY DATE: 2001-12-06
ggaaggagtatcagagggcaaagccggtgataattgaccctgggctatacagcctgcagaaatctgatgttttctggattacagagaaaagaagtgttccaaccgcattcaagctcttcactggctcggcgtggatgatgcttactcatcaatttattgaatactgcatatggggttgggacaatcttcccaggacggtcctgatgtattatgccaattttctttcttcaccagagggttacttccacacagtcatttgcaatgtcccagagttccgcaacaccactgtgaatcatgatctacatttcatttcttgggacaacccaccaaagcaacaccctcactacctcaccctcaatgactttgacggtatggttaacagcaatgctccctttgcaagaaagtttggaagagaagatcctgtactagacaagatcgaccaggaattattgggccgccaacctgacgggttcgtggcaggtgggtggatggatctgttgaacacgacaacagtgaaaggatcgttcactgttgagcgtgtacaagatctccgcccagggcctggtgcagacaggctaaagaaacttgtcacaggcttgctcacccaggaaggctttgatgacaagcattgcttgtgaaacttgcagtaatatgattctggggtaggttacactatcaaaattcgaggatgttgcgccattagctagtcatctactagctgaagaagcagcagcacatagcatcaattccacatggatggaatggtcagataggtgatctttttacacaaaccacttgagttgaatcaccgtacaggagaccacggccgtagcacacggagattatacagcactaatagctcattaggttatgttagaggattatatcagcccccaaccattaataatctcttcttgatctctctgcgctgcgggttgtccaagatggtccattattcgttcagaaaatcacagcactgaccagatcaatttgccaacctgcagcgcttgagatttcgttgtattaacttggattcttctgggcaaactggcacattttgattacatacatgtattctttgatttcc

SEQ ID NO: 19791 - DNA, 1293 bp, Oryza sativa
  ref <308>: DATABASE ACCESSION NUMBER: AK070135
  ref <309>: DATABASE ENTRY DATE: 2001-12-06
gacccatctcgccctcgtctcgtctcgtctctccactcccccacctcccatccgctactgctagtactactactacccggcctctcgccttctcgcgcggccgcgatttccgttcgcaaatccgcacccacggcggcgcgaggtcgccgtcgtcgtcgagccatttcgggggggtagtttataagggcttgcgcgaggagggggaggagtagcgggtagcggcggctcgagtcgagtcgtcgtcgtcgtcggcggcggcggtcgagagagatcgggatcgatggtgcgggggaggacggagctgaagcggattgagaacccgacgagccggcaggtgaccttctccaagcgccggaatggcctcctcaagaaggcgttcgagctctccgtcctctgcgacgccgaggtcgccctcatcgtcttctccccccgcggccgcctctacgagttcgccagcgcccccagcctacagaaaaccatcgaccgctataaagcatacacaaaggatcatgtcaacaataagacaattcaacaagatatccagcaagtcaaagatgatactttaggcttggccaagaaacttgaagctcttgatgagtccagacggaaaatattgggagaaaatttagaaggattctctattgaagaactgcgtggtctagaaatgaaacttgagaagagcctccacaagataagactaaagaagaccgagcttctggagcagcagatagccaagctgaaagagaaggagcggactttgcttaaagacaacgaaaatttacgcggaaagcatcgcaaccttgaggctgcggcgctggtggctaaccacatgacgacgacgacggcgccggcggcgtggccgcgggacgtgcctatgacgagcagcacagccggcgccgccgacgccatggacgtggagactgatctgtacattggattgcccggcactgagcgctcctccaaccggtcggagacaggttgaagaaggccagccacagcaacagctgctatatagcatgcagtagcagcaacgacgccagtgacatcctgttcatctcacaagaataaccagagctctacgcatgcgcacatgaaacccaggcatgcagttctcggtgggtaaattattatctcgcattattagctatatgcgtgtccttgtctttttctttaggcaatggaataaaatttccggtaagtacaaacacaaacggaaacaaagaattaacaaagctgtagcagaccagatcggcaaattgaaatgccaggtaatccagtatatatttcgcttcc

SEQ ID NO: 19792 - DNA, 1774 bp, Oryza sativa
  ref <308>: DATABASE ACCESSION NUMBER: AK070136
  ref <309>: DATABASE ENTRY DATE: 2001-12-06
gaccggtcccctttttctcctcctctccccttccaccgaaaccctagggatggcgtcgccggcgtctcggtgcgtcctgctggatccaggtgtgcccgactacgtgttctccatcggtccaacagaacaagggtgggcgtctatcgacttgaagaagaagaggtaccaagggtgcgggaggtacggccccttgttggcggagagcgtgaagctctatgtgcgcctcgccgaggagcacccggctctctctcggttggccatctgcgccgacaagaatatcatccgcaacatcgtggcggaagaactcaagaagaagaaagcttccaaggccgccgaatcttcatcccccggcctcatggtgccggatctggcgattcgcgccatcgagttcgacaagatcgatgagatctcaggtgtcactgcccgcgtcgaggtcgcagacaagaacctcatggtcctctccctgtccttcgtcttcacatctagcaagcactacctcctctatgatgccattcacgcatccatgtccatgatccccatcccgaattggtgctgcgatatctacttaccgtcgaaccctctccctgtgcggtacggtgatgagtacgccctagtcctctttgccaagaactatccctacaagagagaaggacgatccacctgcattgacttgctctacctgtggacgcctccaaagtcgtcgtcgcctccaacgttgctgccaccgccgccaccgccgccgcgagagaagatgtacccgaatccctccggtgaaccgtggcacaccaggaaaccgcgcttctcgaaggagacgccagcgtccttctgccaccacgtcaagttcacatccagtagccatgctttctgggctgatctcaccaagggcgtcctgtgctgccgcatcaaggacctcttggacagcttcttcgtccattttgacttcattgagttgccccctgggtgcaagtctgacgcccttgatgactccgatactgggccagcggagatgttccgaaccatgggctgcagcactggggacttgatcaagtttgtctccatctccttcgatgattctgtgccggaggacgacaagacggtgacggagtggacactggacatgggtaccttgcagtggaccaagggcgaggagctgcgcttcggaactctgtgggaactggatgacttcaagaaggatggattaccggagaccgagccagtgtaccccctgctgagcatggaggaaggcgatggtggagacctttacttcatactgtccaggccaatcatgcggtgggaggaccctgcggtgcaccacgtctgccgattcaacatgacaagcaagaagcttgtgtccaaccctctttcctggcgcccagataagattgttccttctggtttgttgggctgtgaattcttcagacaccttgatagtcagcgccttgttcctgacaataggaagatggatgcgggcaaagtgcaatcctgggtcgagatggagtcagcattggaggaagttgatgaaagcatgcagagagagatatcacggaagcaaatggtgtggtccgggagccagctagatttgttttgccaggcaaattagggagatcaaatgctgattagggagatcggactctgaattccatcattcgatgttcacaagctgggttctttaatacttctgtttattggtaccagtatgtttttgcttgtcgatctcacaaccttatgtatgcactgaagtaatttgaatttatcttgggtgaactgcttttgc

SEQ ID NO: 19793 - DNA, 1628 bp, Oryza sativa
  ref <308>: DATABASE ACCESSION NUMBER: AK070137
  ref <309>: DATABASE ENTRY DATE: 2001-12-06
gagtccacccccagtcgcctcccgcttccctccgccgccttccgccgcgatccccatcccgcagctgccgtaaacatgcttcatcattcgaatagccggcaccaaaggaacagaggatcaagagtcaaaacattactccaggctaccttacttctaggtgttgttgtctggcttatgtaccaggtgaaacattcctatgataagaaaaatgagtacttggaagatgctgagaaccagcttgcccatgatgatagaagcatgttccaggggaggaaagaaaggggaggtagttatggtgatggcattctggaaaagggtggggagaaccctgatgtagtaagcaaaccagacgaagagaacattggagaaactgtgtttgagaaagacaatactgactctcatgatgatgatataagaaacactgacagatcaaaagctggtgaagggcatggcagtagtgcagatgggaatacagaagctaatagtaatgatgaggatggaacgaccaatcactcagaaggagagaagagtgacgctgagtccaattcatctgacgctgagagtaaaggtgaagaccattcaactggagatgatatgccccaaagcaatactgtcctagaggaaagcagtgcagagacgaacagaatgccccatgaagaagttgcacatggtgatgaatctactaatgaagatcagtccaatgtgaaaagtgacggatctaatgaagaggaagctgagaaaaaagaggcagtggattctcaaaatgcttctgaatctctgtccgatgatgcgaagggtggaacagatgatgagcattccagtggaactcttcctgatgaaacaggtaatctaccatcagggcagaatgagaactcacaaagtgatgcgacttccaccacatctgatgcttctagcgaggctgttcacattgagactggatctgagaatgaagatgcagcaaaatcatctgggactgcatctggtgatgatgacaagggctcagccaatgaggcatctgattcaaacgaaacaaaatctgatgaaggcaatgtggcagcagaagtttctaatgaccaggctgcaaacacggaggcagggaactcccaagaagcgtctgctgcagaagctgcaaatggctcttcagaagagaccaagcctgtggagaaccagaatgatgggaatacagagtcgtctaacaatggtgagcaggtggatatcaagatggaaaccagtgcttccaccaatgccgagcagaaggaatctcaagtcggcgatggcagctctgggtcgaacggctcaaatgacagtggcgctaaacagactggcacgactgaaacccagtgatacaacaaccaattggacatgaacattgtttattatacggatttatccctgaaaatttagacgggctactgcacatagaattttcaggttgaggttacgatcgtttagctcatagcaaatgtatggttggtgccaatagtgcactctatgtgatccgtgctcagaaagacaatcgactatcgaatgtattttcttcttgactcgtgtggctttggccgagacactcaaaccctgcatagtgatctattcatgaattcagtataatatacgcggaagttcatgtg

SEQ ID NO: 19794 - DNA, 1231 bp, Oryza sativa
  ref <308>: DATABASE ACCESSION NUMBER: AK070138
  ref <309>: DATABASE ENTRY DATE: 2001-12-06
gaattcagcattagcaatacacagtgtcagattgtcaccatatatagtagccatcaattgaaaccacataagagatcagagagttaattaatccggcagccatggagaacgtcaccggaggaggaggaggaggatcgccgcggcgggtggtggtggcggtggacgagagcgaggagagcatgcacgcgctgtcgtggtgcctctccaacgtggtctccgccgccgccaagtcccccgcggccgcgccgccgccggccgtggtcctggtccacgcccggccggcgcggccgctctactacccggtgatcgacggcggcggctacgtgctgacccaggaggtgatggacagcatggaccgctacatggccaccgccgccgactccgtcgtcgccaaggcccgcgacatctgcaccgccttccccaatgtaacttagctttctctcaactccaaactttgacattctcgttttccgttagcacgttttttagacggttaaattatacgtttctaacaaaaaaaaacttctgtctagaagttatttttagaaaatctaattattcgtcttttaattttataataattaaccatgtgctaacgagttttctcaatgtctatgttaataatatccattcaattgccttaaaccaacgggccttacaagcggaggattttttttgactttaccattcaattgccttaaaccaacgggccttacaagcggaggatttttttttcctaaagtcaattacatggaagacgtacacacacgaatcacacttatggtggtacgattgactgatcatctcgtctcctctgatgtgcaggtgaaggtggagacgcgggtggagaaaggggacccgagggatgtgatctgcggggcggtggagaaggccggcgcggacatggtggtgatggggagccatggttacggtttcctgcagaggacgctgctggggagcgtcagcaaccactgcgtccagcactgcaagtgccccgtcgtcgtcgtcaagaggcccggcaccaacgccaaggcctcttgatgcgccaactccgcggtccaggatgcaatctgtggaatgttgtgataatatgggtgtatgtatatagtggccttggtgcagagtttgtgtatgtgtagtagtacatgttttccttgtagtaacaagtaacaacattattgcactctctaatgtatatatgcaaatgctaggcttgcttcagttactgtgc

SEQ ID NO: 19795 - DNA, 2073 bp, Oryza sativa
  ref <308>: DATABASE ACCESSION NUMBER: AK070139
  ref <309>: DATABASE ENTRY DATE: 2001-12-06
ggtctcctctcacaccacacgcctcgcatcgcatccccacctccgccgatcccgccgtctccggccatctccgccgccggcagccaccaccacctcctcctcttcccctctcccccttccgcccaattggttgccccgaccaaaccctacacgcggaagggctcgctcgctcgatccggtgcgggcagcgcgcgcgcggggctcgacgcgggcggcgacggggggcgggctcgatccggcggagcagtgggcgctctcttccacgatgcgtctaccctcttcgcgcgagcacgacaaggttctttttgcggggtcaacaataatgaggagaatttgagttggtctggaattactctgggatgttatcattggcgaaaagtatagatcccttttggtagctgaggagagatctcaattttttcagagagtagatgtcgtttcgcagcatcgtgcgcgatgtgagggatggatttgggagcctatcgaggaggggatttgaggtcaggattctggggcatcgcagggggaagtctcatggtgctgtccatgagttgcatgacccggtgcctgtaatccagagcagctgctgggctagcttgcctccggaattgcttcgtgatatcattgagaggttggaagaaagtgaggctacatggccttctaggaagcatgtggttgcttgtgcgggtgtctgcagaacatggagggagatgtgtaaagagatcgtcaagaatccagagttgtgtgggaagatcaccttccctatttctctgagcctgggccacgagatggaactatgcagtgtttcattaggagggataagtctacgcagacctactatttgtacctctctcttggctctgctgtgcttgttgacaatggcaaattccttctatcagcaaaaagaaactggcatgcaacatgtacagaatatgtgatatctatgaatgctaacaatttatctaggtctaccaacacaaacattggaaaattgaggtcaaacttccttggcacaaagtttgtaatatatgatacccacactccgtacaatgcaactagtgattcacagtcagggaaaacaagccgaagattctccaacaagggaacagcaaagcatccctgcagcacatatagcatagcaaacatctcatatgagctaaacgtctttggaactcggggtcctaggcggatgtgctgtttaatgcactccatccctgcctcatctcttgaggctggtgggactgttcctagccagccggatagcatccttgcccattccctcaatgaatcctcctttaggagtgtctccttttcgaaatcgtccgttatggaccattccatgcatttcagcagtgctcagttctctgacatctcaattggagatggcccaaggattgggggccgggtattgagcgatgatgaggagtgcaaggagacacctttgattctccaaaacaaggctccaagatggcatgagcagctacagtgctggtgcttaaacttccggggccgggtaactgttgcttctgtcaagaacttccagctcatcgcagccacgcagcctgctgcgggagccccaactccatcacagcctgttccaccacccccaccagagcatgataaggtcatactgcaattcgggaaggttgccaaggacatgttcaccatggattaccactacccgctctcagccttccaggcatttgctatctccctgagtagtttcgacaccaagctggcctgcgaatagaacttccaggcaggccagaaacatcatggatgcttcttatttgacgccctgagggcatgcccctggatggagctgaccatccccaagtttagcctgggacgccgttctgttgtatgttactgatgatgtgttaactcagaaacacccaagcaacaaaaggcaaattgttattttagcatttagcttatttattctgattttgctttgtaattgaatgttatctttatttctttttgacccatagctctctctataacaggtattctgtatgtgcatcggataattttcgcagaattcatttgactgttctccagtgatttatt

SEQ ID NO: 19796 - DNA, 1376 bp, Oryza sativa
  ref <308>: DATABASE ACCESSION NUMBER: AK099126
  ref <309>: DATABASE ENTRY DATE: 2002-08-28
gattagctctcgacgtagcctagagcgcaagcagcagcagcagctagattggttggttgccaatgatcccggccatctccccgatgatggacggcgccgcgcctctgcttcccgagacgagccccgagagccgccagcaacgtgatccggagagggggaagaggcggacgccggtcctcccggccgtcgtcgcgtccgccgtggtccttctcggcctcgcggcgctcttcctggtgtatggatttcacgacggtggagacgggagggcggccgtactcgcgcccggcaccgtggaggtcgcggcctcgtcgtcccgcggcgtcgtggagggcgtctcggagaagtccaccaccccggcgctgcgcctcggcggcggcgcggtccgggactacgcctggaccaactcgatgctgtcctggcagcgcacggcgttccacttccagccccccaacaattggacgaacgatccgaacggtccactgtactacaagggatggtaccatctgttctaccaatggaacccggactcggccgtgtgggggaacatcacctggggccatgccgtgtcgcgcgatctcatccactggctgcacctgccgctcgccatggtgcccgaccactggtacgacatcaacggcgtctggaccggctcggcgacgcagctgcccgacggccggatcgtcatgctctacaccggcgccacggaggagtcggtgcaggtgcagaacctggccgagccggccgacccgaacgacccgctgctgcgggaatggagcaaggcggaggcgaacccggtgctggtgccgccgccgggcatcgggctgacggacttccgcgacccgacgacggcgtggcgcaacccggccgactcggcgtggcggatcaccatcgggtccaaggaccgcgaccacgcggggctggcgctcgtgtacaagacggaggacatcctgcactacgacctgctgcccacgctgctgcacgtcgtcaagggcaccggcatgtgggagtgcgtggacttgtacccggtgtccacctcgccggccgtcgaggacgggctcgagacgtccaccccgccggggcccggcgtgaagcacgtactcaaggccagcctcgacgacgacagaaacgactactacgccatcggcacctacgacggcgagaccgatacctggacgccggacaacgccgacatcgacgtcgggatcgggctccggtacgactacggcaagttctacgcgtccaagacgttctacgaccccgtcgggcggcgtcgcgtgctatgggggtggattggcgagaccgacagcgagcgggctgacatactcaagggctgggcctcccttcagtcaattccgaggacagttatgctggacacg

SEQ ID NO: 19797 - DNA, 860 bp, Oryza sativa
  ref <308>: DATABASE ACCESSION NUMBER: AK070140
  ref <309>: DATABASE ENTRY DATE: 2001-12-06
gtatcaaatcctctcctcgatctctcctgcaatcctcatcacacagcaaacccaaaccgcgagcggaatcctcagcctgctgagagagcctgagaccaagagggggattcttttttggttattgacgatggcgcagcgcgacaagaaggatcaggagccgacggagctcagggcgccggagatcacgctgtgcgccaacagctgcggattcccgggcaacccggccacgcagaacctctgccagaactgcttcttggcggccacggcgtccacctcgtcgccgtcttctttgtcgtcaccggtgctcgacaagcagccgccgaggccggcggcgccgctggttgagcctcaggctcctctcccaccgcctgtggaggagatggcctccgcgctcgcgacggcgccggcgccggtcgccaagacgtcggcggtgaaccggtgctccaggtgccggaagcgtgtcggcctcaccgggttccggtgccggtgcggccacctgttctgcggcgagcaccggtactccgaccgccacggctgcagctacgactacaagtcggcggcgagggacgccatcgccagggacaacccggtggtgcgcgcggccaagatcgttaggttctgagaggcaaacaaaattaaaaaaaaaatctactgttttagcaagaaatggagaaaaaaattgggaattgaaggtgtggatgttattattatgctgttctcttctcgcaattgtttttccctttttattctttttaattgcaaacgggaggataagtggtggaaaaggaatagtgtaacaataatggtgatgtgaggtggttgagggaaaaagaatcgaagaacaaatggattgggtgtgt

SEQ ID NO: 19798 - DNA, 4647 bp, Oryza sativa
  ref <308>: DATABASE ACCESSION NUMBER: AK070141
  ref <309>: DATABASE ENTRY DATE: 2001-12-06
gtgttcctcgccgcgaggggaaaatagattcgagctttctcgtagcttcccctcgaaccaaccgtccattcccgtgggtacagctcgtgggttcttcccgatttcttccagtaggagattccctgaatccgctcctttccctaatttaatttttatgaagagagggagtaacttgttcttgcctaatttgattcgagctcaggtccataatttgatttgaattttcctggattttcttctgctgggtacatttgtgagcgattttaaaggttctttttttggctggtactttggtagaagttcagctactatcgctttaatctgctcgaattcttggttgcgtcccgttcaaaattcgtccccatgtcgtgtatttgtgggtttcattcctgcgacttccgttatttcaggactgttcggttctctcaggactttatccaactggggcagtttgagattttgtgaaaaattgtttttttctttccttctctgcgataatcttgggcttttggcgacgggagagcaatggtgagcagcaacatgttctaccggaggaagcgctcatggcgtgccggtgatctcgtgagcaggagcaccctgcaaatgttggactttgatgatggctcaccaccagaatatgcttggagaagaaaactaagtagtcatgccaatagattgaaggagttcaatgttacctttagagaagcaattaagatggtacaggaaatgcaattatcagcattcccagttcatggaaattctggctgtgattgctcttcattctgctgaaatcttaagattatctggttatgtatgtcaacatgattgagttgtgtctcctcgtggctattagatgaaacttggtctgcgcctctggtcatatattcgggaagaagcttctcatggaaggaaagcaccaattgatccattcacgagggagagcgacaaaccttcagcctcgcaaggtgtacctcttggtgggatggggagcggtagcatttcaagagggttcagaggagaatttaaacattggcagataatcccaggttcatgtgaaatgtcaccagtcatggcaaaccaattttcggtaactcgtgagacaatttcactccgctgaacttgacatattcttggcagcatacttctagtttgatggctatgcttcagtgtactactttagaaaacttaacgaatcttaaagcaatgtgttcaatatgaaacgagggaaatccgtatcaggacactttattgtttgattgaactattaaatatttttgttatgatacactatctgcattttacttcttttacgttttatgcacacatttaatgttacctgtcaagtaaatggtgagtttgttctatgaaaatcaattaggaacaactgaacaaacatttcatgacatattagagaggcacccaccatttttgaattaaaatacacacttatattataattaataaaaaaaatattttcaattgagagctaggtagcagttcttcagaactttggatgttgcgttatgtgttgccattcatcaaatacttatttatcatattcagcagctcccttatgttgtaagccacttaacatatcactggaattatattcaatcattcagtattgactattctgatattctcttgatagtgtatcaaacatgatgttgctgtgaaatacaaagattaactgaagagaacattcacaattttttcaccatatctttaattactgcagatctttataactcgaggaggaaacaaaaaatactcctctgttttagctcctggtcagcatgatagtttaaagtatgactctctccctgatcctcaatatagtatatttagtatgaaacttcatctggacgttgtctaaatggatctacctgaaatattctcatctatgcttttatgtaaaatatatagcaatcatagtccatatgaaacaattgtccggttatttttatgtttcttggtccaggaaatctaatgatgatggtatatcatcctgggattggaaactaagaggtgatcgttctacataccatgcgttgtttcctcgagcatggactgtctatgatggtgaacctgatcctgaattgaaagtatcttgccggcaaatatctccttttattccccataactatcaagagagcagtcttcctacctctgtttttgtttacactatagtgaacactggtaaagaaagggcaaaagtcagcctcgtaatgacctgggcgaattctattggagggctttcccatcattccggcggtcatgtaaatgagccatttataggagaaaatggagtttctggcgtgcttctgcatcacaagactgccaacaataatcctcctgtaacttttgctgttgcagcatgtgagaaccaaaatgtaaatgtcactgtgttgcctgcttttgggctttctggagaaagttctgttacagctagggaaatgtggggcacattgagccaggatggttgcttcgaccgagataatttcagtgccggccctagcatgccttcttcgctgggtgatacagtttgtgcagcagtttgtgcatccacctgggttgaaccacatggaagatgtacagtcgtattttccctggcttggtcatcccctaaggtcaaatttaagaagggaaatgcatactacaggaggtatacaaaattttatggaacttctccaaggtcagctataaacttggtgcaagattctttgatgaagtataagcactgggaagaggaaattgataagtggcagaggccaattctccatgatgagaggtttccggagtggtgtgtacttgtacatgacttaccagttggctgctgcaaggcagtattatccttgtgttaagttatagagctttgtgttaagttcttagttttctttagtctacacaaaagataatatccttgtgctttctggtgcttaaattcttgcaggtacaaggttactctcttcaatgagctgtacttcctagttgctggaggaactgtttggatagatagtgcatctttgatggctgatgctgatgaaatgatgaactcaaggctatctgaggacaatgatttgccacttcatcatagcagtcgcaattctgcagttccactcattggttttagcccacatataattgatgacagggaaaatgtagggaagtttttatacctggaaggaatagagtacttcatgtggtgcacttatgatgtacacttctatgcctcttttgctcttctggaactgtttcctaagattgagctgagcattcaacgtgattttgctacagctgttctgcgcgaagataaaagtagagtcaggtttcttgctgatggtacttggggcactcgcaaagtaatcggtgctgttgcccatgaccttggggcccatgatccttggcatgaattgaatgcgtacaacatacatgacacaagtagatggaaagatctcaatcccaagttcgtgctacaggtttacagagatttcgcggcaacgtgacatgtcatttggcaaggatgtctggcctgcggtttgtactgctatggagtacatggaacagtttgaccatgacgatgatggtatgattgagaatgatggctttcctgaccaaacatatgatgcttggacagttcgtggagtaagtgcctactgtggttgcctttggcttgctgcccttcaaactgcagcagcgctggcccgcacccttggacaccatgattatgctgagaggtgcatgttgaagtttgcaaaagctaagcccgtatttgaagcaaagttatggaatggttcatattttaattatgacagcggaacaagttacaacagtcgctccatccatgcggatcaactggctggacaatggtatactgcatcgtcaggtttgccgcctctgtttgatgagggtaggataaaatgcacccttcagaaaatatttgactataatgtgatgagggtaaaaggagggcgtatgggagctgtgaacggtatgcatccaaatggtaaggtagacgagacttgtatgcagtcaagagaaatctggacaggagtaacgtacagtttagctgctactatgctgctccatggaatggacgatcaggctttcactactgcagaaggcattttcaccgcaggatggtccgaagaaggctatgggtactggttccaaacccctgaagcatggacgatcgacggccactacaggtcgctgatatacatgcggccccttgcaatctgggcaatgcagtatgcattgtctcctccaagaaccatactcgaggcgccgaaggtgaacaccatggacaggacctcctacatctcgcccagcacgctccagttcctgcaggacagcgtcaggaagatgacgcccaagaacagctgcttcgggagcagcacgtctaactgcgaatgctgatgtgatgattattagaggaatggtgttttaactgtgatcactgatgttcctagtgaatttcctgtacatgttcgaagaagaaaggcactgctccgtcttctcttatttgtggtgccccctgcatgcagttgtgagtgatcataatcttgtattataatactgtacagatttatatatgtatatagttactacatatgttgggcaatgtcaaatatcagaatttttact

SEQ ID NO: 19799 - DNA, 1994 bp, Oryza sativa
  misc_feature (928)..(928): "n"=any one base of a, t, c, or g
  misc_feature (1138)..(1138): "n"=any one base of a, t, c, or g
  ref <308>: DATABASE ACCESSION NUMBER: AK070142
  ref <309>: DATABASE ENTRY DATE: 2001-12-06
gaccgcgacaatgcggacgatcgatcgaaccacccggttcttggattaccgggacaaacaacaatcatcatcacctcgggattaatcatttcaaccctcccctttttgttccttctcgtggctctctctgcgtgggtgttctgcagcgccaatcctggatcatcatcgtttgcttctgcacacgtcgctcgaggccgcagaaagctgcgtcctttacagctggccacggtggagttgatcggttgatggcagcgagcggcggtgggtcgctgctagagagacgaagctcggtgcgacggtcgcagagtatggtgagcgaggagggccggggcacgccggccgatgaggatctcggcggcggcggcacgctcaagattggcgccgtgctcgacaaggacagcgcggcgcccaagtcgcggctcgccaaggacaccggcgaacacggcggcggaggaccttccgagatggagctgatgaaggagaagttcgccaagctgctgctcggggaggacatgtcggggtccgggaagggcgtgccgtcggcgctggccgtgtccaacgccatcaccaatcttgcagcttctgtgtttggtgagcaacggaagctggagcccatggcgccggacaggaaggggaggtggaagaaagaggtcggctggcttctatccgtcgccgatcacatcgtcgagttcgtcgcgaagaaacaagtcttggacaacggcgttgagatggaggtgatgggcacgcagcagcggagagatctccaggcgaacataccggcgttgcgcaagatcgacacgatgctcctggattacctggacaacttcaaggatcggaacgagttctggtacgtgaagcgcgactcgtgctcggatagcgacgagcagagatcagacgagaaatggtggatcccgatcgtgaaggtccngcctgcggggctctcgccgggcgtcagagggtggctccagcaccagaaggagctggtgaaccaggtgctcaaggcggccatggccatcaacgccactgcctatggagatggccatcccggaatcctacctcgaatccctccccaagaacgggagggcgagcctcggcgacgcgctgtaccggatcatcaccgacgtggagttcgacccgnacgtgttcctgtcgacggtggaccttacgtcggagcacaagatcctggacctcaaggaccggatcgaggcgtcggtgatcatctggaacaggaaggtgcacaacaaggacggcaagtcggcgtggggatcggccgtcagccaggagaagagggagcagttcgaggagcgcgcgcagacgctcctgctcatcatcaagcaccggtaccccggcatcccccagtccaccctcgacatcgccaagatacaggaaaacagggacgtcgggttcgccatcctggagagctactccagggtgctggagagcttggccttcaacgtcatgtcccggatagaggacgtcctcaacgccgacgaccacgccagggagaaggccaagaaggaggcgccgccggcgccggctatggccaacgacgccgcggagcaccaccaccagcaggctggcgaggtggatgccccctgcaaaatgacagggtcacccaacggcaggacgctgctcgacttcatggatgactggaacggtgacgccgataggccctcgccgacggcgcctgagccggccgcacaggaggacggaaggctgatgaagctgcccaacatcatgacgaacctgaagcagacgtacatggacaacctgttcggggcgcatagaagcccaccaggtcgccattaaaaagtggcacgatattttgcatgtattatcacatagtgtacatatatattttgatcaaactgggctctcgcttgagtagcccgccgttttcggcttctgggtttgtagagctgagaatcttctgtaccatttcaaggggttgaggggttgaccaatgtatacgacagagacatctactgacgttc

SEQ ID NO: 19800 - DNA, 2040 bp, Oryza sativa
  ref <308>: DATABASE ACCESSION NUMBER: AK070143
  ref <309>: DATABASE ENTRY DATE: 2001-12-06
gaccctctcctctctactgttccgccacaagaccccagggcgccgccgccaccgccaccaactcactgggtgagccgccgcggccctaaaccctagcccagcgcgcgcctctcctcctcctcctactccccccatggccgcgccgcaggcttccccgtcgccctccgcgcaagtggtgggcaacgcgttcgtgcagcagtactaccagatcctgcaccagtcgccggatctggtgtaccggttctaccaggacgccagccgcctcggccgcccgcccgccgaccgctacggcgacatggtctccgtcaccaccatggaggcgatcaacgagaagatcatggccatggacatgtcgcgggcggagatcaagacggtggattcgcaggagtcgctcggcggcggcgtcaccgtgcttgtcaccggccacctcaccgtccgcgacggcgtgtgccgtgaattctcccagtccttcttcctggcgccgcaggagaagggctactttgtgctcaacgacatgttccgctacgtcggggacggccctacccctgctgctgctgctgctgcggaggtgcagcccgaggcagatgccgtggctccacccctggctaatggtacagctactgctcctctgcagcctgctgctcctgactatgatgctatgccgcacgaggagccggatgttgtggagaatgtggcggtgcctcctgaggaggaggaggaggtttataatccgcctctggaggaggtggagggtggggctgtggaagaggaacaatcagttcctgaggtgattaatgaagtcccaaataatgtggtgcccgttgtagctcctgcagatgctccggtgtcacacgaggaggcgccaaagaagtcatatgcctcaattgtcaaagtcatgaaagaagctccagtgccagcccctattcctgctactaggcctgcacctgctgctagacctgcacctcccaaacccgagaagcaatctcctgcccctccggctcctgctccagttgcagatgctactccttttagttctaatgctgagagcagcaatacgcatgagccagaagttgatgcacatgcgatatacgtgaggagtctaccattaaatgccactacgacacaactggaggatgagttcaagaagtttggcaccataaaacctgatgggattcaagtcagaagccataagattcaagggttctgttatggctttgttgaattcgaggaagctactgcagtccaaagtgctatagaggcttctcctgtaatgattggtggacgccaatgttttgtcgaggagaagagaacacctggttcacgaggatccagcagaggaggaaggtttgcaccaggaagaggtaataacaacttcagagctgacgggatgagaggccgtggcaattatagtggaggaaggagctacggaaggggtgatttcagttacagatctgattatggtggcagaggtggtggcagaggtggctctgcgcgtggacctgatgttggctaccagagggttgacggtggtcgtggtggccgtacatcagcaggccctggtgcccctgcaaaatgaggggcgaagtagcttgtgtctctagtattatcattccatggtccttggaatgtccagattcaacataggcttcatcaattgattgcatgctggaattgtcaagcccaatttacaaattatgaggttctatttttgaaggcggcaaaaggggttaaattggttgctaattgtagaatatacacctattcacatgtagtcttagcttggtctttgatgatcagctgatgtgttattttttttctttttgtgttaattttgtcccgtttaagtttggagcattcatttgttgtgtccatttgattttatagttactacgaactgctgaaaatttgattttatagttactacgaactgctgaaataattgatagtttagactctagagtagctggtaaagtagtaattaggagagattttgtcttgttcttgtgatgtcttgaggcgaaggacactcttattgatact

SEQ ID NO: 19801 - DNA, 1992 bp, Oryza sativa
  ref <308>: DATABASE ACCESSION NUMBER: AK070144
  ref <309>: DATABASE ENTRY DATE: 2001-12-06
gatcttcggtgtctctcctccgcccggcggcttctgctcgactccaccgagccggaggcgtttcctggcacgcgccgccggcgacaagcccggcaacctcctcctcctcctccgctgcggctgtgcttcctttcctgctcgcgcgcacgggccggcggcggcgagacggttcggaggccgacgcggccgacgccgatcccctttcagcgtcctcattgcggttcgaatcgaaggtatccccccattcttccctcgcatcccttcctcctccgcagcgccggcgtcccgtagattggaaatccatccggacttggggatcgatttcgttccctccggttaacccatccggtttcttctcgattttcttgatatctatggagttggtagggactttcatagagggcgaagtatacggggcagtgtgaagttccctgttcgttcagccattcatacttacatttctcaagtcttcaacaagatttcacagctgtgtgacctgtattgtgtatttaggtttacaatgatgagtgcgaaattgctccggagcatgagcgtgaggaggctcctaggacagcaaagaaactcagttggtgggcacttagttttagcctttctaatgtttggtgtaaggtgctcatcttgtgtatataagtataactgagagtttggtgtctgttgcttttagagttttacagaaaatcgcaagcatggaactcgactgcgtctttttctgatgtcgatgagaagaatcgcaagggtggtgatgccgaagatgatttcacacattccaggccagatcacgttttccgtggtgtgcacagggtattttgatgaaacgcgcactctttgtgaaaatgcactttgtttcttaagaaaagaattgtgacccttgttcatttatctgatacttgataggcaattatttgtggaaaagttggacaagtgccagtacagaaaatactaagaaacgggcatacagtaactgtctttactgttggaacaggtggcatgtttgaccagaggacagtaggtgctgaaaacttgccaatgccagctcagtggcatcgaatatctgttcacaatgagcagcttggtgcatttgccgttcagaagttagtcaagaattctgcagtctacgttgagggtgatattgagaccagagtctacaatgacagaattaatgatcaagtgaaaaatataccagagatctgtgtgcggcgtgatggtatgtatgctaatctgaaattttaaatgaatactctcgtttgttcaaatcattttcctgtagcaacactgaatagttgttttggctcataagccatgagacgtggctgaagcaatggaaaatatttttaggataggagtggcctacccaaattcagtatacatgtttgtctcgccttgaactgtggtcatataatttcctagttcttgtcattgtcactctctatagatgttataatgttctgctccttctttatctgtgtataagctttcgtgtttgtttttttaatctgtgcagggaagattcagttgatgcaatctggtgatagcaatgttggcaaatcattggaggagttaagggaaggattattctagttgtgaagcaaagggtgatcagcaaaagtaggcagagccggggaaatggaatgttttgttcgctcctcttgcgcaaagatctgggagtaatttttgttagtttgagcagtagtaagattacatgaaggtccacatgcacttctgtatccaaataatgtgcttcatgttcttttatgtcattttagcagatgacgataccgttctaatttagattatgtagtaaatcattctgtatcctttttttttcctttaccttgtctcttggaagaggacagaactggaggtatcaccatggtccaactttcatgcgtttgtgcttgtgcgtgaaagtcacatgaaagagcagttatgtttgctgttaatatggttactgtatcatctctaagattggtt

SEQ ID NO: 19802 - DNA, 1516 bp, Oryza sativa
  ref <308>: DATABASE ACCESSION NUMBER: AK070145
  ref <309>: DATABASE ENTRY DATE: 2001-12-06
agctcatcaaaaacgcctcgtggcgcaacaaggcgcactccaagctctcccacactgccaagtccatcctcgaccgcctccagaacccgccgccgccggcggctgcggcgcaggcaccgtccacgcccacctcccccacgacgcccacctcgtcgtcctcgcagccgggcccgctccgcagcctctcgctcgcggactcggagctgctgctcggcccgatcaactccgcgctcggctccggcagcgccaagctcgccgaggccgggctcgagctgctccacaggctgatcgcgcactcctacatccatggcgaggccgacccgtccgccgacccctcggcccagctcgtcgcgtccctcctcgatgccgcctgcaacgcgcttcacctcgacgacgagcacatcgagctcctcctactcaagacgctcctctcggcggtcacctccacgtcggtgcgcctccatggagattgcctgcttcgcgccgtgcgcgcttgctatgatatgtacctgggaagccgcagcgtggtgaaccaggccactgccaaggcgtcactcgtgcaaatgttggtgatcgttttccgccgcatggaggcagactcctccacagtgcccgtgcaacccatcgttgtggctgatgtgatcgagctgcctgaagctgcttctggtgcttcgcctgccgctgatgccaactttgtacagggattcatctcgaagatcattggagacattgatggtgcaatcacacctctggcacggacaacttcttcagcagctgcaggcgcaggtggagcagcggctcatgatggtgcatttgagacaagagcagcagaggaaggggcacatccagcagatttgcttgattcaacagacaaggacatgctagacgccaagtactgggagatcaacatgtacaaatctgctcttgagggtcgtaaggatgagattggtgtggagggggcagtggtgggcgctttggatgatgatgctgatgtgaggattgggaataaactgcgaagagacgctttcttggttttccgggcattgtgcaagctctccatgaagacaccacccaaggatgctccagctgatcccattgtgatgcgtgggaagatccttgctcttgaacttctcaagatattgcttgaaaatgctggggctgttttccggaccagcgagagatttctaggggctatcaagcagtatctatgcctctcgcttttgaagaactgtgcctcggcacatatgatagtctttcagctatcttgttcaatttttattagcttggtttcaagattcagaccaggattgaaggcagaaattggagtattctttcccatgattattctgagagttttggaaaatattgctcaaccaaattatcaagcaaagttgattgttcttcgtttcctggaaaaactctgtgctgattctcaaatcttggtagacatttttctcaattatgattgtgatgtacactcatcaaacatatttgagaggatggttaatggtctact

SEQ ID NO: 19803 - DNA, 3591 bp, Oryza sativa
  ref <308>: DATABASE ACCESSION NUMBER: AK070146
  ref <309>: DATABASE ENTRY DATE: 2001-12-06
gagaagttccagtgttgcagccaagtcggaagtcgccattcgtcttctctctctctctctccgcgccggcaaagcggccggtggcggcgccgacgagtcagcaagcggcagcgcggaagtcgacggccgcgagagtgggaggcggccggtcggtgatcgagtgcggaagtcttggtgaaggcccaccgcgtcgcgtccgtgtcctcctcgagccgcgtcgtcgtcgacctccttcaattccctcatggctcgcaacaaggaagcattggttttgctattggatgttggcccatccatgcatggcgttctgcaagaagttgagaatatctgctccacccttgtgcataagaagctagtttataataggagtgatgagatcggtgttgtcctttttggaactaaagaaacaagcaacgaactcgccaaggagcttgggggctataagcatgtggtggttgctcgtgatattaaagttgttgatgaagaaacaacaaatgctctgcaaaaccttccaaggggaacttcccctggtgactttttggatgctattgttgttggtttggatatgctgataagaaaatttggaaatatcaaaggaaaacagcgtatgtgtctagtcactgatgcacaacatccattaagagatccaccccaagggacaaaaaaggatcaggtggacactattgcagaccagatgaaaagacacgaaatcaagatggactgcattattttcagagaatctggagttcgtcacaatgctgtaatggatgaaaacgaccaattattataccacttcagagagaggtcagtaacaaaggtagttcatgttgacagcccaacgtcactcttaggtgctctcaggactagaaatgtacttccagttactgtcttcaggggagacttggaagtgagctctagctttaaaataaaggtgtgggtctataagaaaacatctgaggagaaattccccactttgaagaagtattctgataaggctcctgcaagtgataaatttgcatctcatgaagtcaaagtggattatgagtacaaaagtgttctagaaccagacacagtcgttccaccagatcaaagaattaagggatatctttatggtccacaagttgttcctatatcatccgctgaatgggaagctgtcaagttcaaacctgagaaaggtgtgaagcttctaggttttacagatagatccagcatatctcggtaacccatatccttcaaccttttatttggaataagattatgttctttggaccttgtggtcttgtattcactgatgccatttctacatttaatttcatgattatttcaagttgtttgaggtaacttgtttgaagacatagcaaaccaatccatgtgaacattcaagcatgaatagttagtttatgtactttatatcattggagattgagctgatactatgaaacaaaacattataaaataaattcttgctctagctgattacctgatccttgcaattatgcctaatataaatgtttaaagagtacatgtttcgtgttatgtggtgttgcatttgagtttaagctgtaggttatcatttatcatgttataaaaccccttgggatgaatatgttgcaagctggaattggtgaatggtttatgcatgaaaacaatacatgaatgcagtgctctgattcgatcaatcaatcataaatccttgcacgtaaagtttatgtttttatgtatagattacagaactcagatctgtactgggtcaaacttctgtttatccctaaggactgccagggggttcagcttatacaaaagctaatataaaatttcttttctgaaagtatctcatttccaaaatttgtaaagataaattgctgtaaacatgtttataagtttaatattaaatgtctttactatattgcagttttaagaccagatgttagtaacggtgacacagtccaccttttttactttaacaggcactattttatgaaagatgtgttctcctttgttccggaaccaggaaacacaaaagcagttgctgccgtttctgccttagctagagcaatgagtgaaatgaacaaggttgcaattttacgatgcgtgtggaggcaaggtcaagggaatgttgctttgggtgtattgacaccaaacatatcatcagcaaaaaatgttctggattccttttacttcaatatacttccatttgctgaggacatcagagagtttcagtttcggtccttcagcagcctgccatcatcatctcagcctaccaaggaacagcaggaagctgcagataacctggtaaagatgttagatcttgcaccacctggaagggaagagatccttaagcctgatttcactccgaatcccatgttggaggtgctattcttccttcagaatattgctatttatcaaaaccaatttagatattctgatatttttttctcatattatataccttaagctatttttcctcttcttttcactttttcattggagtatgctctgcaaaggttcttgtatgtatttgttttgcttctaagtttactaataggttctagatcacttgacatttttcttttaatgctccttttgtgcatattctttattctgttgactaaggttcacttgccacttccccctttagagattctacaggtaccttgatctcaagtcaaagcagccggatgcaaatgtcccacccctcgacaaatgtctaaagaagataactgaacctgatcctgatgtcattgattatcaagcaccgctaataaaaaaattaggcaatgtatttgagctgaaggagaaccccaagaaaaagaaagcacggacacaggacagattgacttatactggcgcagacgatcaggctaaattattagaagaaccttctgcagagaaggttggggtttcggaagctttatatcctccaaaaaagaaggctggggagattggcgatcataatcctgttcaagattttgaagccatgctgacacagagatctagctcaacgtgggttcagacggcaattgaagagatgcagaagtacataaccgctttaatacaggattcctgtgatcgggataatcaccaaaaggcactggagtgccttgttgctttacggaaggcctgcattattgaacaggaaccaaacgaatacaatggattcgtaacaaagctctgtcagaaatttaggccggctggtgataaaatttttttgcagcttctttcgtccaagaaagcttcgctcataagcaaagaagaagcacctgatagcgatgtgacggaagagatggcgagaaacttctgtctgaaacccgagccgtcctctcagtagccgagactgcaggcatggatgtggatggctttgagttctgaaggcctggaagctaggtaaaagaggaactggaagacatcgaacggccctagtactaatttctaacgtacgcctggttaaaatgttatgtagctcggtttttggaaagctctgtgtcatgtgagtgatgagcaacacgagctactattgttttcgaatggatatgtatgttgggatggaaaaatcccagatgaaatgtaaaagacttgcagtttgagatgtcc

SEQ ID NO: 19804 - DNA, 1293 bp, Oryza sativa
  ref <308>: DATABASE ACCESSION NUMBER: AK070147
  ref <309>: DATABASE ENTRY DATE: 2001-12-06
gaagtggtgaaaaacacacaagagagaaaagaggaaaataagcagaaagagatgccccggcggagggccctgcctcctcaccgtcgcgccaccgccaccgccaccgccatgcctcccgccaacctctccatctccgccccctccgccgccgccgcaccaccgcccccgctttacctccgccgcctcccgctcatcgccgctgccgcgctcctcttcctccttgtcatcgtcgtcctcgctgctgcccatccctacggctacgctccatggctagccaacgccgcaccagcagccctcctccgccgcccggtatccacaaccttctactcttttgacctgctccgagaatatccccacgatccatacgcctttacccagggtctcttgtatggaggaaatgacacttttttcgagtcaactggcctttatcacaggtcatcggtccggagggttgatcttaaaactggaaaagttttagttcagcatgaaatggatggacgattgtttggagaaggtctcacgcttctcaatgacaaattgtttcaagttgtttggatgaagaatcaggggtttatctatgatcgacataactttagcaaacgtgagagttttacccataaaatgagtgatgggtgggggttggctactgatggaaaagttctttttggcagtgatggtacttcaaggttataccagcttgatccaaagtcaattcaagtcatgaagacagtgactgtgaaatatcaagataatgaagtcccctatcttaatgaactggaatatataaacggtgaagtatgggcaaatgtctggcagacagattgcatagctagagtctcccatgaagatggcctagtggtgggctggatctttcttcatgagctgaggcaacacttgtggaattctggcaatacggaaatcgatgttctaaatggtatagcttgggatgaagaaaatcaaagattatttgtgaccggaaaattgtggccaaagatctatgaaattaagctacggcctgtagatgggccacaagatggatctgtagagaagctatgccccaaggcaagcttttatcgttgaggtgtagtggatctctctagggtgagaagagaagagaagagaagagaagatataggatatcttgtttttatatcagtatgttacaatgcacagatgtattgcatacacctcttaagtggaggtaattgattggcagttttcggagacttgtgttgtatctcgacaaaattgagtgtatttactgatctgatggtagctacttgcttcgtcttc

SEQ ID NO: 19805 - DNA, 1383 bp, Oryza sativa
  ref <308>: DATABASE ACCESSION NUMBER: AK070148
  ref <309>: DATABASE ENTRY DATE: 2001-12-06
gagtggaaatcagtttccactttcttccaaagccgaaaaatcgagagagaaagagcaaaaccctaaccgcggcgctccgcccccttccgccgccggattcctcctcctccttcgtccgccttcgccggcgccgccctgctccgaaggagcccaggccttgtcgccgcgtcgcttgccccgccgccggtttcagcagcagccacccccaccaccatgtcttctcaggtcgacaaccgtagccaatctgctggaaagcgtgcccgcaccgacggtgggcggcgtgaggacgactgggtttgccccagctgccagaacgtcaacttcgccttccgcaccacctgcaacatgcgcaattgcaaccaatccaggcccaccgactatacgaaggatatgcagaaacctatgcagacaccgccgccccatttccccatgtcagggggatacatgagcccagggacgccgccatccatgtacctcgggggtggtgctcccccttatggcacctccctctatggcggacctgctttaccacgttatggtattgctcagttccctgggggttctggatatccatatggctatggtggccgcctgccaatggggagcccctatgggccgccgatgcatatggcagggcctccatattctgctggatccatgatgggaccaggtggaatgtatgggatgcccatggacagatatagcttgggcttacctgctggtcctggtccaatgggcgcgagggctggttcatattccgaggaaggatcccagaagaagcctgcaggagctgggcgtgataatgattggaaatgccctaattgcaacaacattaactttgcattccggacagtctgtaacatgagaaagtgcaatacaccaagacctgaaaaccaggggtccaaacctgatggtgcaagaggtccaaaaccaaagatgccagaaggtagttggaagtgcgagaagtgcaataacataaactatccattccgcacaaaatgtaaccgtccaagttgcgaggctgaaaagccatttcagacaaacaatgctaatgagtcatctgctgatcaggacaatcagtgagtcctagaacagttatgagggtcaagaaggtccagcgtcgtcgtcaaggttcagtctgaatgtctggggtctatctgtgtcagtagtcgctgctgtatccccttgagaccttagttgagtcgtcgtcctaatggtaaacgttttggagtggcaactggagtcatggatttctttattgctacagattttggttaagaacatcccttgtgaatttgtcatatacttctgaagcttggttgctttgtcttggttactggtactctgggaaaatggcaatttatgatataaatttcaattagc

SEQ ID NO: 19806 - DNA, 1534 bp, Oryza sativa
  ref <308>: DATABASE ACCESSION NUMBER: AK070149
  ref <309>: DATABASE ENTRY DATE: 2001-12-06
gagcagcagcagcttcacgcctctcctactgcacattgcacctcgagtccagaggctgagagagctcacggggagaagcaaaccaaaagcccaaaggacttttctaccatggcgtggcaactcctcgccggcgtgctgctgctgcagctcgcggcgagcgcggcggggcagcagcagtgcctgtccgcgacgttccagaacgggcagacgttcctgaagtgcaacccgctgccggtgctcggcgccagcctgcactggacgcaccacgccgagaacggcacggcggacgtcgcgttccgcgccccgcagcagagcagcggctgggtcgcctgggggatcaacacccgcggcaccaccatgcccggcagcagcgtgttcatcgcctcgcaggacggcagcggctccgtgtccgtcctcatgaccgtgctggagaacaccagcccgagcctgaccaacggcagcctcagcttcgacgtgctgtccccgcccaccgccgactacaccaacggcgtgtacaccatcttcgccaccatcgcgctgcccaacaactccacgacgcagaacaccgtgtggcaggccgggccagggagcaccgggaacgtcggccagcacgcgacgtccggccccaacgtgcagagcatgctgaggctcgacttcagctccggccagagcaccggtaccgcctccaactccaggcggcaccgccgtaacatccatggcatcctgaacgcggtgagctggggcatcctgatcccgatgggcgccatgatcgcgcgctacctccgcgtgttcgaggccgccgacccggcatggttctacctccacatcacctgccagctctccggctacatcctcggcgtcgccggctgggccctcggcctcaagctcggcagcgagtccaagggcatcacctacagcgcccaccgcaacatcggcatcgccatcttctgcctcgccacgctccaggtgttcgcgctgctgctgaggcccgacaagaagaacaagtacaggttctactggaacatctaccaccactccgtcggctactccgccatcgtcctcgccgccgtcaacatcttcaagggcctcgacatcctcaagccggccagcggctggaagaggagctacattgccatcctcgccacgctcgccggcgtcgcgctcctgctcgaggccatcacctgggtcatcgtcctccggcggaagaagagcgacaagtcgtcgtcgccgtacggcgccaccaacggcaacgggcgcgcgtagtttgatcagcatctgatcgacgtgtgccttgcgctacggcctacgggtgtgtagttttgctgcgatgtgtgtgtgtatttgtcttctgctagctgtgtatcttccattttttgttactgcttctgtagactacgtagaggttcagagattatttcttttccttttttttttacattttcaggtctcacgatgacacatttgtatacattttttttcaccttgatgtatgattacctttatttatgcatacgtttgattacgattagatggc

SEQ ID NO: 19807 - DNA, 888 bp, Oryza sativa
  ref <308>: DATABASE ACCESSION NUMBER: AK070150
  ref <309>: DATABASE ENTRY DATE: 2001-12-06
tgtctgttcatcaatctactgtactggcctccttctcagctctcactattctggcacctacaattccaagcttatcacgacgatggtgaagggaggaaagccggtgatgctggtggggatcgacgatagcgaccatagctactacgcgctcgagtggacgctcaaacacttcttcgccctgggccagccgcaacagtaccacctcgtcttgctcacctctaagccccccgcatccgccgtcatcggcattgccggtctaggtacgacggagctgttgccgactttagaattggatctgaagcgcggtgccgccagagtaattgagaaggcaaaggagatgtgctcccaggtgatcgatgcgagctatgaggtgttagagggagacgcgaggaacatcctctgtgaggcagttgaaaggcatcatgcagatatgctggttgtgggcagccatggctatggggcatggaaaagggctgttcttgggagcgtgagcgactactgcagccatcacgcgcactgcaccgtgatgatcgtgaagaggcccaagcataacacgcatagctgaaaaacggaatcgcactcgtcatcaagaagatctagtgccatttctacatgttttcgagttctaattttatttctaaattgtgtattagttcgtgtgtgtgtgtgaataaatcgtgacatagagtgaccaccttattctgcaatctgcatattgcaatagaataattaatttagaaatgcctgatgagttagccattttagtacttggattttctcagacgatgtgcaagatgtctgaattactccctctgttaaaaaaaaaaatcctaggtgaagatgtgactcctccttatacaacgaataagagtggtcacttcctctcct

SEQ ID NO: 19808 - DNA, 1016 bp, Oryza sativa
  ref <308>: DATABASE ACCESSION NUMBER: AK070151
  ref <309>: DATABASE ENTRY DATE: 2001-12-06
gtccgctccaggctccagccgagtacccgcctcctcctcctcgctcgccgcggaatcttctggaagcttctagatccggccgctacgatcggcgaagaagggatggggcaggccttccgcaagctcttcgacgccttcttcggcaacaaggagatgcgggtggtgatgcttgggctagatgccgcggggaagaccaccatactctataagctgcacatcggcgaagttctctccaccgtccccactataggcttcaacgtggagaaagttcaatacaagaatgtggtgttcactgtgtgggatgttggtggccaggaaaaattgaggcccttatggaggcactacttcaacaacaccgatgctctgatctacgtagttgattccctggatagagagaggattgggagagccagagctgaatttcaggccattattaatgacccttttatgcttaatagtgttctattggtgtttgctaacaagcaagacatgaggggcgcaatgactccgatggaagtatgcgagggccttggtctatatgacctgaacaaccgtatatggcatatccaaggaacctgtgctctcaaaggcgatggcctctatgaaggattggactggttagcaacaactctggatgagatgcgagcttcagggcggataacttcaacatcatcgtcatgaagaataacaagggatagttgatccttgcgctatgtggattgacttgatgcctgcatcttgctttcttttccatttgatttcctcctctcctgttgtagctattggtcgtgaactgggcgaggctttttagtaaagctttgattcaggcaaaactgtagtgttacgaaagacaggtgacagtgatgcacttgcacttgggaggagtggttggtttacttactgaaagttcatcttttcgtggaagcgggagtggttgtaaatatatgaagctgctactgtactgatataattgtggttgctcttgaaccagttgtattcgtgaattttcagattcg

SEQ ID NO: 19809 - DNA, 750 bp, Oryza sativa
  ref <308>: DATABASE ACCESSION NUMBER: AK070152
  ref <309>: DATABASE ENTRY DATE: 2001-12-06
ggcacactgcttctcgctcccgctctgaacttaacgctgcaaaaaaaatcttggagtgtataactgtgtaagctttgctcaatggcggaggagaacaagtccggctccggcgacctgatggcgagcggcaaggtggtcgcggaggcgaccatgtcggtgttccagcagaagagcgtggagggcgtcgacaagaaggaggtcgccggcgccgccgcggacctgctgcactcggcgtccacctacggcaagctcgacgacaagccggtcgggcagtacatcgacaaggcggaggggtacctcaaggacttcagctccggcagtggcggcgccgcaccgccaccgccggcagccggagacgccgcagcgccgaagccagcggcggaggagccgcccaaggagcctgcgccggctgagaaggaggaaggcaagccaccgtcgtcgtcggaagggttcggtctcgacgacgtcatgaagggggccgagtcgctgatggagaagaagggcggcggggaggagagcgccggcagcggcggcgccgccggtgggctgttcaagatggcgcagggtttcatgaagtaggagagctctttggctggatatatagctgcatgcatgcttgtctctggattgtggctctgctttaatttgcttgttaattaactgatgatctgtatgatgttttgtaaatgtctctcagctctgttgttaattttgtgtggtgaataataagaagacagctactttgtgtgt

SEQ ID NO: 19810 - DNA, 1128 bp, Oryza sativa
  ref <308>: DATABASE ACCESSION NUMBER: AK070153
  ref <309>: DATABASE ENTRY DATE: 2001-12-06
ggacgagacttcacgccggccgccctgctcgtcgtcgccggcggcatctgcggcgcgcgcgcgtcatcctcatccccagctaagtggcctcaccgtcaccgagcgcccgcgtcggatcgcgtgcgggagagagcggggggcggagagatctggtgcgaggtcgagtcggggcgccggcgatggcggacgacgcgggcggcggcaggcgcgagtacagcatcatcgtgcccacctacaacgagcgcctcaacgtcgccctcatcgtctacctcatcttcaagcacctgccggatgtcaactttgaaatcatagttgtggatgatggaagccctgatggaactcaagacattgtaaagcagttgcagcaaatatatggtgaaaaccgtgttctgctgcgagctagaccgaggaagctaggacttggtactgcatatttacatggactaaagcatgcctctggggacttcgttgttatcatggatgctgacctatctcaccatccgaagtacttgccaagcttcattaggaagcaaaaggaaactggtgctgatgttgtaactggcacccgttatgttcagaacggtcgtgtccatggttggaatctcatgcgcaagttgactagcaggggagcaaatgttctagcacaaacattactacagcctggagcttctgatttgactggatcattcaggctatataaacggaatgtcctagaagatttaatctcctcgtgtgtcagcaagggatatgttttccaaatggaaatgattgttagggctaccaggaaaggttatcacattgaagaggttccaataacttttgtcgatagggtttttggaacttcaaaacttggtggatctgagatagttgagtatctgaaaggccttgtttatctgctgctcactacatagggaaaaaaccgctaggcgcttaactgtatcagacacaactcgtgatagaggaacttcaatttgttatatctacagttttgagttgcgtgaattactgattttctgacttgccagtgggttctcgtacagtgtatttggtgtgtaagtacactttcatgagcaagggcaagaacacaattgtaccatctatatatgaactgcagagaaagctttgggt

SEQ ID NO: 19811 - DNA, 1176 bp, Oryza sativa
  ref <308>: DATABASE ACCESSION NUMBER: AK070154
  ref <309>: DATABASE ENTRY DATE: 2001-12-06
gatcgtctctgcactcacactgcacaaagatgtttcccagtagtgtaaatatgcgggagcaaaataatatcataataatatcaatagccatgtccatcctcctactcgttgtgttcttctgtcggatgttgggtaacatggcgggcaagaacaagaggaagaagcaacctaagctaccacccgggccagctactatgccggtgttgggtaacattcaccagattctgatgaacaagccggtgttcaggtggatccaccgccttctcgacgagatggacaccgagatcctgtgcctccgtctcggcagcgtccatgtgatcgccatcgcctcaccggagatggcccgggaggccctgcgcaggaacgatgccgtgctgacttcccggccggtatcgttcgcgtggcgggcgttcagctttgggtacaagaacaccgttgggtcgacgggcgatcagtggaagaaaatgaggcggatgctcgcgtcggagatcctctcatcggccatggagcggcgaatgcttggccagcgcgtcgaggaggctgaccaccttgtcaattacatctacaggaactgtaataatggcactgtagacatccggcacgtaacgagacacttctgtggcaacatcatcaggaagctggtgtttggccggagacacttcgccttcggcgctggcaatatcggccctggccgtgatgaggaggcccacattgacgcgctcttcacggcgctagactacctcggcgcattctccatctccgactacttcccgtcgttggttctcaatggcctgatgagtacattcagacggctgcatgatccaatcataatggagaggatggaagaatggagggctcccaggagaaatggtgatgagaggagagaagttgccgattttctggatgtgttgatctccttggacgatgcacagggaaaaccgttgttgtcacttgatgaggtcaaggcagaaacgctggtaataagctctattacaccgtcatatatatatatttcaaactaggactatagatatgtcctcggaagaaaaatagtacgcttgaagtgcttacattttggtccaaatttctaatactagaaatgcttatattttacaattaattagtgaggtcttggtttcgttataggaaacaatatactatggtgtggttccgttc

SEQ ID NO: 19812 - DNA, 3697 bp, Oryza sativa
  ref <308>: DATABASE ACCESSION NUMBER: AK070155
  ref <309>: DATABASE ENTRY DATE: 2001-12-06
aaaaaaaaaaacagacaagggaaggaaaccctcgccaccacgcgccgccgccgccgccgccgccgccgccgcccgccgcgctaccacctgttgctcgtacgatcggattcaaattgtcgcttctttcttcttccacagcacaggacggggtgtagaagaagaagaagaagagcatcaagaggatgggttcactgcggcgggttgtgcacctggtgaccgcattgaacggcagcgccaacctccgccacatcgacacgtcgcgtttcttctcccgccggccgccgccgccgttcagcccgtcgtccatggcggtggtgacggaggaatcctccttgccggagccctccatgtcgttctacccagctccggccccgccggagggcaacggcgacatcggggtgatgctcttcggccgcgcccgcgacaggctgctggtgacggaccagtccgacagcgccgccatctacgacgccggcacgcacgccctgctcgcggagaccaccccgctgaaacccaagtactggccagtctccgtccctgtaggcgacgacatctacctcttcgacctgtaccccagggtgccctgcggcggccgccattgcttcgaggctgtcacggcggtggattcctcttcttcttcttactactcccgtgcgctcccaccgccgccattcctgtttgccccgggctacagccccaagcctatcgagtcctacacggtggtcggcggatcggaggtgtggatctccacggcgcgcgcgggcacctacgccttcgacacggttagctgcagctggagcaagcaggccgactggccgatgccgttcgccggcctagcggagtacgtccccgagcacaagctctggttcgggctctcctcctccaggagggacaagcacccgctctgcgccgtggacctcgccgccgccgcctcgccggagacggggccggagctgaccaacgtgtggatggagctgtcagtgccgagggaatggatcccggtcgaggccttccttgtgcaccttggctctagcaggttcttcgtggccagattcttccaagagctagtcgaggtgcgctgcgacttctcgcagcggttcgacaggttcgctgtcttcaccggcgttgagctggagcgcacctcccgtggtgagctccggatgatcaagcacaagtcggagcgttacagcatcgctcacaaagtcctctgccatagtgttccttgatttcacaacgtcctcatcgtacctatttcctccgtttcatattgtaagactttttagcattaccgacattaatatatatattaatgaatctagacatatatacatgtttagattcattaacatctatataaatgtgggaaatactagaaagtcttgtaatatgaaacggagggagtatatatatgtctggattcattagcatacgtatgaatgtcggcaatgctaaaaagtcttataatataaaacggagggagtatctatgataaggcatgtaaacaatcaattatttggttggtgaagatgagttagctggagtattttgaaattatgcaatttcttgtaatactctgtattttcaaacaggaaattggaaaatagatgctccctctttagttcattggcaaaaaagaagtgaatattgttttgttcatttggcctgtctctagactataatgaatactcaggagtatcattcattgcattgccatcgattgaattttcattacattgccaacattcgaatcacacaacttttaaagtttgcatgcagatgttttagcatggcattgtttcccgtctgttactattaatcttgggattgagttgagtctctgaatgtggcaattagtctagagttggtttttttaggttcctcaaaattgtgtatgtaatgggggtgttactttgctggtgatgaatacaatgacatattcacatccatataggcatcaggggcatttctttgctgagatatattaacatattcacatccatatatgttgggaataagtggcacccatgccaactgaaaacaccactttttaggttagatttgtcgcagtgcatcacgtttcgtcgtttctgtttgtcttgccattcaaagcatgcacctcaagttgtttcctagctgagtctatagaaggagctaggcagctagcctataaaagtgattagatttactttgattctttgaagaagacaatctcaatccattttattctcaagccgttgatcaactataattgttttttacatatagattgttctggttctcaaactatcctgaaaactttatgcatttttttctaatcttaattaaatcggtagcactcctgtctcccattgttccttttctttttttaatgtcactacctaactgaagcttaggagcaatagaacagaactttgaacttaggagcagtagaacagaaggcgctggatggatagaactgaaccgtgagcttaggagcaatagatcagaatgtgctgtatggttgggcctcctattgtaagtcaatttcttttaaaaaaaattgtttatgccttcatcgattactttaacatcctctatgccatcctggttaaaacagattgagattgtccggtgttccatgtgcgtgtgcactgggagtggctttgtcagaattcttgttcgacttgatctttggcttaagtgaatctaatgtcaagcaatttatgtgccaccctttctctaacatagtggtagtcaacttcaacatgctttggttctagtgtggaattattggataagctgatataggttgcatcaagattgtcacgccataagcatggtgttctgttcaggtatactccaatctcaactagcaaagactgacctggctactgtgtgctggtttcttgagctccatgagaccaagtttttgccaggaaaagctgcaaatcgtccagtagaacatgtgtcattgaggcatctggatcaagctgcatcagtaattgcgctgattaattttgtagtttccttcttgtctgataacccatgatatatgatgattcagatatcttattatcctctttactgcagaccaatgtatatgaactgcaacaattggcaacaacgaccctccagtacagtaacttgttcaggtgatggaagggaagcttcttagcccagttgggcaatttttctgaagttaacataggttggttattgaacaacattcgtcatcctaacatggttcagcagcaactccacaccagacaagactccagttcttccatccgtgactcttcaagagacccaagcttcaaactgccatgtgaatcgatcggtctgtcaacaagcggaggcgtccatcaaccgtaggatatgattgttggctgcagccaaaaattacaaaaaaaaattgatatgtttgcactgaactggagattaagcagttaatctgttcttcagattacttcaagccggtgaagcaaagaggcaattatgaataccatcacatttcattaccaggattagtggtgtgaaaaaatagcatgagagccttgcatgaatgatgatccatcaaccatatgattgttgcagcaaaaatcacacaattttgtttgatgtgttcgcactgaactgtttgatgtgttcgcattgaactggagcaatctattattcagattactttaagctggtaaagcgaacaggacaagacttaatc

SEQ ID NO: 19813 - DNA, 2038 bp, Oryza sativa
  ref <308>: DATABASE ACCESSION NUMBER: AK070156
  ref <309>: DATABASE ENTRY DATE: 2001-12-06
gacccacacttgagttgcattaatattgtgcttattgttgctactcaaagacccacatatctaataatccaagacaagccatggtcaatatcgaaggcgatttacacatgaccagtggggaaggagaaggtagctatgccaagtactccaggcgtcagacaattgttatagatgaaactaagccagtcatcgagaaagctataatagaagtgtacaaggctattctccccaaaactatggtcattgcagacttaggttgctctgcaggaccaaatacgatgttcttcatgtccaatgtcatcaacatcatagcagaccactgtactaagttggatgaacatgatcctatcgaacttcagttcttcctaaatgacttaccaggtaatgatttcaaccaactctttcgatcactcgaaaagatcaagacctcaactacgatgtatcacaagggagattcgcttccatcatactacatatccggtttgccaaaatcatattactctagacttttccctcgtcagagtgttcatctcttccactcctcgtattgtcttcattggcgctcccaggtacgattattgatataaaaatgttgttgggaacatatcctatacacacaagtttcccgtaatacactccatacacagcaactaacaaatatcacagaaaattatatgaaaaattcggcacatactttcaatagtattgcacctatatgtgaaatcttatcttcaaatttattatattttagctgtaaaaaaatagagaaaattctaacagctttgtactctgaaaattgttagatttttcacttttttgttacagctaaaatataatgaatttgaatatgagactttgtcactttgcatatatgtgtcatcctattaggagtacatgtctattttttcgacatttgctagttggtgtgtatgggaaacttgtgtgcataggatatgtttcccaaagttgtttatgcattattgcatatatctgacgtatatacatgatgtgtaccaatcttgcatacatgtgatattgcttttaatttgtagctaacttgagctgtgaaattttctaaattaagtgatgtgtacatataggtgccagagggactagaggctggtggaaaatctctctcaaataaggacaacatatacatcagctccaccacaacaccattagtagtgaaattattcaaagaacagtttcgaaaggacttttcccttttcctcaagctccgccatgaagaactagtaaacgatggacacatggtgctaatattttttggacggaaggatgaggatgtatacaatggaagtctcagccatattttgggatgtgtcgcaaagtcactagaatcacttgtttgcaagggccttgtgaacaaggaaaagttggaatccttcaacctacctatctatgggccatcagatgacgaagtaatggaaatagttatggaaagccatatgtttgacttggttcacatgaaactctttgaggcaaactgggatccttatgacgattcagtagatgacgttgttcatgacattgccagcagtagccaaaatatcactacgggcattagatctgtgctggagtctttgatagcaagtcattttggagaaagcatacttgacgtgttgtttcaagagtttagaccccttgtggcccaacaccttgagagggagaagacaaagtatgccgtcatcgtcatgtccttgaagaaaatatagtagcacgtgtggtccatgaatgtcctctctcttaattacgagatgcttttaaagagatcaaacacaatatggtgacatatatcgtaataagaacacttgtgtggttttgtttccctcctttcaaccatttgcaatattgcataatgctcatattctgtaaaactctagctaaatggattgtttctccattgtttagctatatatggtgtttggttacttggctatattgatttgcctcggcaagtatctataggttaatttgcaaaatgaacttcaacatatatatacaaataattataccgtgc

SEQ ID NO: 19814 - DNA, 3981 bp, Oryza sativa
  ref <308>: DATABASE ACCESSION NUMBER: AK070157
  ref <309>: DATABASE ENTRY DATE: 2001-12-06
gcgtaagccgcagtgaggccgagctatccttcctctccttttcctcctcgcacacagctctctcagatccaaagccgtggagaaatcgcgcgaatccctcgcctagatgcgcgacgccgcttgctgctacagctgccgccgccgccgctgctgctagggttcttgcggagatgcggggtgtcgagtcgggtggcggaggcggcggcgcgtcttcttcctcccccgccgccgcaggtaattttgatgctgggcagtacgccttcttcgggaaggagccactggagggactcgagctcagttgcttggaggatggcggcggtgatggcaatggcggtggattcagcgggccagaagatgggctgtaccggctctcttctgttggagaagagattgataatctgagtaacttgtcagaaattgatgatcttgcgagcacttttgcaaagttgaaccgaagcattagtggaacacggaatcctggtgttattggtgacagaagatccatctcaagaggaagttctctaactgttgattgggctgaagatgctgagtttcccaactgggtagatcaagacatattagagggtgaggaacttcaggaaagtaaaagatggtggtcacagtcacgttctctggggcagcaaggggatgccaaaccattgagccgaacatcttcatatcctcaacaaccattgcagcaccgcgcaagtgaacctatcattgcaccacaatctcctccatttacatcctttccacctccaggtgctagatcaccttatactgctcaaggccttacacgtcatgggagcattccatcagttggtgctggtctacaaatgggttctccaagcatgtcacttccaagttcttcatatcatatggctggactatctcatggactaccatatggagggagcgtgtcctttggttctccaaatcttcctggaagcaatccaatacaaaatgattggccaaaccaagccaacccgtatgctgtggatcaatttaatctacttccgaacatgttacagaaacaaatatcacttccaaatagcccaatgtcatcactgctattttctcaacagcagcagagattggcacaagttcaagtccagccatcccatcagaattacctaaatttaccacctcacctattttaccaacatcactccccagagttaacaggaaggtttgattctatcagcaatgttccttcattgagagacaagaggtcaaggtcaggaaggggaaaacacagcacacgtttttctcaaccattgactgatactggtagtcaaaatggtgatagtggtggactaaaattcaggtctaagtacatgtcatctgaagagatcgaatctatcttaagaatgcagcattcagcaagtcacagcagtgatccttatgtagttgattattaccatcaagcttgcatagcaaaaaagggtgccagttccaggcaaaaggccaattttgccccaacatcaatgaaagacttaccttccaagtccagatctagcagtgaccatcatgcatatcttcaggttgatgctctagggagggtttctttctcttccatacgtaggcctcggtctcttcttgaagttgaccttccttcatctggtgatggttctcatgatcagaagtcttctctgaggcccctggagaaagaaccaatgctggcagctagagtcactgttgaagatgccatctgcctacttcttgaggtggatgatattgaccgtctattgcagtctagccaggcacaagataacagtttccaactgaggcgaagacggcaggtcctccttgaaggtctagctacatcacttcagcttgttgaccctcttggtccgagcaaatcaagccattcatctggattggcccctaaggatgatcttgtttttcttcggattgtttctcttcctaaaggacgcaaacttttgtcacggtaccttcgacttcttacccctggaagcgagttgacccgtataatatgcatggctatttttcgacatctgaggtacttgtttgggggtttaccatcagattctagtgcagcagaaacaacagttgctcttgcaaagactgtttcatcttgtgtgctccatatggaactaggtgctcttagtgcttgccttgctgctgtcgtatgttcatctgagcagccacctctgcgtcctcttgctagctctgctggtgatggggcttctcttattattaaatcagtactggaccgagcaaccgagttgctgactgaccaccatgctgcagccagctatacagtgtcaaaccgaactctctggcaggcatcatttgatgctttctttggactcctgacaaaatactgcctcagtaagtatgaaagtattaagcagatgtttgtcatgcagtcaccatgctctgtaactggatctgaagtctcgaaagcaaccagcagggagatgccagttgagttgctacgtgcaagccttcctcatacaaacgatcagcaacgccagctgctgcttgattttgctcagcgaacaatgccagtgaccggtattaatcccactggggcaaatggtgggtacatcacctctgagtctgttcctggttgatatagctgaagatgccaaagggtcgatcgcaaatgcttaaaaggactcgatgcacttgtcttgcagatggcaattcatatatatctggagacatgcatgcccttcataagatgtgagcttggaagaaagttccatttgctcagggaaaaactagccttcttcagattgtgactttaggtttcagattaatctcgtagaccaacgatctcccctttctgtgggtcatttatatagcacccacctgatatgcatatgtacgtacactgttgtaacactatgctgtgatgaactagccaactcgttgggggcaaaatttagttttaaaaaaaaaaaaaaaaaaaagacccgagtgaaaatagagaaaagccggcattcgttgccagggcgttcgttgccattgtcaagcttcacaagctctgctactcactctcgtgtttgtgtgtctccgatcttggccatttccaacacgcacgggaggaggacaagacgaggatcctcttcttgtccttcgtggacgacgcgccaccgaggccgttccaccacggcgacgtctaccagcaggtggaggtggcgccacactacccgatgggattcaaggcggcggcggtcgcgccggatggcgtcccgccgagcttgctgaggttgaagggctggcaggtgagcaagacctcgcgtacgagctacgacggcctcgccgaccacgcgcactgggtagactggccgctccgccgccggatgccagacctcgacggcttcggcatcggcgcgggaggcggctcgccggccgccgtcgtcggcaaatggtactgcccgttcatgttcatcagagacggcgagcggcggctcaaggaccaggtcaaccggtgcatgttctacgagatgacgctggagcagaggtgggaggagatatacagctgcgacaacactcaccggggcagcatcagcggcaagcagccggatgatgaggtcaaggtgaacgtgacggtgcgccggtcgacggcgctgctaggcggcaccggtgcagtagtgcaagaaggtgggcctcaggaggtcgacggggtgatgtggtttcgaccggcggcgccgccgccgaactctggcgcggcaggtggagttggggtggacatggtggtgtgggagaagatgaagtgggagctggagagaggagggtgggtcgacggtaatggcgacgtggagagtatcgagagggtggagaggcgtgaggcgctgggtcggtactgggacaaaccaaatgggtatgagcaaacgatgtactactgcaactatcgaattttaattgtttctgttaatgtatgatagcttaaagagagtcgttacatattactatatctgtaacagttgtttaaatcaatcgttagag

SEQ ID NO: 19815 - DNA, 847 bp, Oryza sativa
  ref <308>: DATABASE ACCESSION NUMBER: AK099127
  ref <309>: DATABASE ENTRY DATE: 2002-08-28
gatctgaagagagaaattctcagcttatagtcaggtgaggtctgagctgaggttgagagatggcacaggcaatggcgtccatgaccgggctgtcgcagggcgtgcagctgccggccgggcccaggcgcgccggcggcaggtccaggctcgccgtcgtcagggccgacgccgccgccgccgacgtccagaccggccgccgcgccgtgctcggcctcgtcgccaccgggatcgccggcggcgccctcgcgcaggcggcgctcgccgaggccgccaagcccatcaagctcggccccccgccaccgccctccggtggactccctgggacgctgaactcggaccaggcgagggacacggacctgccgctgagggaaaggttctacctgcagccgctgccgccggcggaggcggcggcgagggcgaaggagtcggcccaggacatcatcaacctcaagccgctcatcgagaagaagcagtggccgttcgtcagggacgacctccgcctcagggcctcctacctgcgctacgacctcaaaaccgtcatcaactccaagcccaaggacgagaagaagggcctcaaggacctcaccggcaagctcttcgccaccattgacgggcttgaccatgcagccaagatcaagagccccgaagaggcggagaagtactacacgttgaccaaatctgctcttggcgatgtcctcgccaagctaggctaggatcggcataatggccatatggggtttcggtgtttttatgtttgttcatatggaaccggcaatgtaccctccatgttgatattgtatcagcaagcacttacgtatgattcaatcttgagttgttgttgacggct

SEQ ID NO: 19816 - DNA, 1807 bp, Oryza sativa
  ref <308>: DATABASE ACCESSION NUMBER: AK070158
  ref <309>: DATABASE ENTRY DATE: 2001-12-06
gactcctctcccccgccgccgccgtccgaccatccgaccaccgccgccgtccccctcgacgccgaccaccccttcggccgaagccacctccactacttcccgccgccatggcgtcggaggagggggaagaagcgaacgccgcgtcgtcggcggaggaggtggggaggaagaagccgccgcggcacaaggggaagcacgacaagccgaagccgtgggacgacgaccccaacatcgaccactggaagatcgagaagttcgacccctcgtggaacgagggcggcatgctcgaagtcagctccttctccaccctcttcccccagtaccgagagaagtacctgcaggaggcgtggccgattgtgaagggcgcgctgaaggagtttggggtcgcttgcgagctcaatctggtggaaggatccatgaccgtttcgaccacgcgcaagaccagggatccctacattatcgttaaggccaaggagctgataaaattgttgtcgaggagcgtccccgctccacaggcgattaaaatactcaacgatgagatgagctgtgatattatcaagattggtagtattatacggaacaaggaaagattcgttaaaaggagagaacgtcttctgggccctaatttatctactctcaaggccatcgagattttgactggctgctacatcttagttcagggaaacactgttgctgctatgggttcctggaagggattgaaacaagtccgaagggttgtggaggactgcataaagaacatcaagcaccctgtgtaccacatcaaggaactcctaattaaacgtgagctggccaaaaatcctgcgctagccaatgaaagctgggacaggtttctcccgaagtttaagaagaaaaatgtcaaacaaaagaaaccgataacaaaggagaagaagccatacacaccctttccacctcctcagcaacctagcaagattgatcttgaacttgagagtggtgagtatttcatgagtgacaaaaagaagtccgcaaagaaatggcaagagaagctggaaaagcaatcggagaaagctgaagagaacaaaagaaagagagaagctgcatttgttcctccaaaggaggacactgcaactccatacgaatctgccaagtctaccagcaacaacgacgagattgctgatatggctaagtccctaaagaagaaagcaaaggaattcagaaagagtgaagcacaggaaaatgtgagactcgagtcttatgttgcaagtaatgaagggtcacgcccaaaaaagaagcacaaatcgtccaagtccaagtaatcgcaacctgaatgaaccatgacccccggttagtgtgacaactttttctagccaaatcatgctagcagcatcccattcaaagttcctgatggcgattgaacaaaatttgcggccttttggctctctgcttgttgtaaaagtagttgtcatctgtatgggttgtgtaactgtttgtgcccaatatgccgtggagtagctctgatctgcttgtctccttggggtagctctgatggctcgtgatgagagttgagacagcttctccatgtagatcagagctacaacgtgatgtagacatgagcatcttcgctggtgcagcagtctgaactgtcatgtcgttgccttgcctctttgtgaaagtcacaaagacaatgcatcatcgacaaatttacacccagcaacggtctctgcctcgtcgatcgcctatttgccttttctacctagaactcaaatgactgaaactgaaactgaaagccaatcaatcatatactgaaaacctgctagtttgttgctct

SEQ ID NO: 19817 - DNA, 1714 bp, Oryza sativa
  ref <308>: DATABASE ACCESSION NUMBER: AK070159
  ref <309>: DATABASE ENTRY DATE: 2001-12-06
gaattccccagctagcaaccgccggccacctctctctcccaattatcctctcctcctctgcttcatctccaccacctccgatcgagatcgagatgctcccctcaacggcaatggcgttccatgtcttcctcatcgctgcgctgctgttgctgcctctccccgccgccttctccaaggccgtgcgcacccaatcccttctcgccaacccgctctccccggatcctatcactcaggagcagcagctcagcctcgccgcgccccgcaccaacgcctccacgctccacttccgcctcgcccaccgcgagcacttcgcgctcaacgccaccgcctccgatctgctcgcgcacctcctcgcccgggacgccgcgcgcgccgccgccctgcttgctgcacccaacaatgccacgcgcccgcgccgccgcggcggcttcgcggcgcccctgctgtccggcctcccgcaggggagcggtgagtacttcgcccaggtcggggtcggcacgcccgccaccaccgcgctcatggtgctcgacaccggcagcgacgtcgtctggctccagtgcgcgccctgccgccactgctacgcgcagtccggcagggtcttcgacccgcgccgctcccgctcctacgccgcggtggactgcgtcgcgcccatctgccgccgcctcgattccgccggctgcgacaggcgccgcaactcctgcctctaccaggtagcctacggcgacggctctgtcaccgccggggacttcgcctccgagacgctcacctccgcgcggggcgcccgcgtgcagcgggtggccatcgggtgcggccacgacaacgaggggctcttcatcgccgcgtcgggactcctcggcctcggccgtggcaggctgtcgttcccctcccagatcgcccgcagcttcggccggagcttctcctactgcctcgtggaccggacctcgtcggtgaggccctcctccacccgctcctccaccgtaacgttcggcgccggcgcggtggcggcagcggcgggcgcgtccttcacgccgatggggaggaaccccaggatggcgacgttctactacgtgcacctcctgggcttcagcgtgggcggcgcgcgcgtgaagggcgtgtcccagtccgacctccggctgaacccgaccaccgggcgcggcggcgtcatcctggactccggcacgtcggtgacacggcttgccaggcccgtgtgcgaggccgtgcgcgacgcgttccgcgcggcggcggtggggctccgtgtgtcgccgggcgggttctcgctgttcgacacgtgctacaacctgagcgggcggagggtggtgaaggtgccgacggtgtcgatgcacctggcgggcggcgcgtcggtggcgctgccgccggagaactacctgatcccggtggacacgagcgggacgttctgcttcgcgatggcgggaacggacggcggcgtctccatcatcggcaacatacagcagcaggggttccgggtggtgttcgacggcgacgcccagcgcgtaggcttcgtgccaaagagctgttaattacagtactccactacggagtattagtattactaagcaagggtgttaaaatcgaactctctttttttttcctttttgtgaatcgattcactgcttaatttgtactatcgggtatcgttaatttgttaatcaaagcctcctatgcctttggattttggcaggagggagctgcatgt

SEQ ID NO: 19818 - DNA, 1021 bp, Oryza sativa
  ref <308>: DATABASE ACCESSION NUMBER: AK070160
  ref <309>: DATABASE ENTRY DATE: 2001-12-06
gcccttcgccattgcagactccctctcacgccgccgccgcctcgccgctttcctctctctccaccgccaccgccaccgccaccgccggcgcgtactcgagcaacgttgaggcaggagttgggataggtatctgagttgaggtgaaggacgggagcgatggcggaggcggcgccgattggcctgtcgtgggcgcccaagctgccctccctgccgacgaccagcggcgggaagaaggacacgggagccagctctagcagagcgcaggggtcgctctggaagcccgcgagcgagctcgtcgacgggctcttcgtgccaccgagggacccgaggaaggccaacaagctggccaggaagaacgtcaaggacacctccggcaagggctggttcgacatgccggctcccaccatcactcctgagttgaagaaagatcttgagattttgcagctgagacatgtaatggacccaaaaagacacttcaagagggcaggaaaatccaaggcccttccgaaatacttccaagttggtacagttattgagcctgcatctgagttcttctcaagtaggctgacaaagagggagcgcaaaacaacattggttgatgagctcttatctgatcaacatcttaagaactacaggatgcgcaaagtaagggaaattcaggagagccgcactccaggaggcagccagaagtggaggaacaagggcaagaaaacactcaaaagagccaaggataggcggaaatgagtttttactgctgctactctcactcagtttaccatgaggaagagatgactgattattgggagctaaaggttgagacaaccttcaaattgcgacaaaattagattgtgataccattgtaatgtgggaaattcatgcaatatgatggatgcattagctggtggagctgagctagattgtcggttgctgtatctccctcttttcatttatgagcccactgtttcaggtatgctgtacctggatttcagagtaaaagtaccaatgtattgcttggtctgcg

SEQ ID NO: 19819 - DNA, 2185 bp, Oryza sativa
  ref <308>: DATABASE ACCESSION NUMBER: AK070161
  ref <309>: DATABASE ENTRY DATE: 2001-12-06
ggctaaatgctaatccatcatcattttatgcgctaatccactccagatcacgccgctaatcgttatccaaacgaattaacaacaaatcagtcgcgcgtttgaaacgagtccactccacctccatccagatcagtgtatataaaccgccgcgccgtttgttcgtgctgattctctctctctctctaatcagtagtaccccagatcagtttgttgctttgctgcttcttccggttccaatctgagaggggggattcgcgcgggaggcgaggcgaggcggcagccatggtggggcggagctccctcccggagggttccctcttcctcggattcgacagctccactcagtccctaaaagctaccgtgctgaacaacgaattgataatagtagcttcagatattgttaactttgattctgacttaccgcactacaaaacagaaggtggtgtttacagagatcctgcagatgatggccacatattttcaccaacaataatgtgggttgaagcctttgaattgctacttgagaagctaaagccaaagatcaactttagcaaggttgtggccatttcagggagtgggcaacaacacggcagtgtttattggaagaagggtagtcatgcggtgttgtcttccttggatcctactaagagcttgttatcccagctgaaggatgccttttctaccatggactcaccaatatggatggacagtagcacaactaagcaatgcagagaaatagaaagtgtagtaggcggcgcattggagctatcaaagttgacaggatctcgtgcctatgagaggttcactgggcctcagatccggaagatataccgaacagttccgcaagtttatgatgatactgagagaatatctttggtgagttcgttcatggcatcaatcctggtggggaactatgcaagtattgatgagactgatggtgctgggatgaacttgatggatataaaccagagaacctggtcaaagactgttttagaggcaacggctcctgggcttgaagagaagcttggaaagttggcaccagcatatgcagtagctggtcgaattgctccttattttgtagaaaggcttcagtttgataagaattgcttagttattcaatggtctggagacaatcccaatagccttgcaggtttaactctgaatactcctggtgaccttgcaattagccttggtactagtgatactgtttttgggataactgctgaagctaaaccaagtcttgaaggccatgttttccctaaccctgttgaacctgatggttatatggtgatgctgtgctacaaaaatggttcattgacccgagaagatgtgcggaacagttgcgcggagaaatcctgggatgttttcaacagttatctagagaaaactccacctctaaatggcggaaaattaggattctactacaaagaccatgaaattctgccgccacttccagttggcttccatcgatacattgttgaaaacctcaatgatgtcacatccaacaatctggtggaacgtgaggtggaagaatttgatccaccatctgaggttcgcgccataatcgaaggccagctgctgtcaatgcgaggccatgccgagagattcggcatgcctaaccctcccaagcggatcatcgcaaccggtggcgcatcctccaacgagcgcatcctccactcaatcgcgcagatctttggctgtcctgtctttacagttcagagacctgattctgcctcgcttggcgcggcactgagagctgcccatggctggctgtgcaatgaggaagggagcttcgtccccatctcctgcatgtaccagggtaacctggagaagacctccttgggtgcaaagctcgccgtctcaaccggagagggtgtggaggacaaggagctcctggagaagtacacggtgctcatgaggaagaggatggagattgagaggcggctggtggagaagattgggcgcgcgtaggtagcagcattgcaaagctgctgtcctcgagtcacagttaattagagggaaatgaaatcattggtagaaacttatttataatatatagttagtagtgtatcaagatcatgttattatgttcttgtgcacggaataaataataaatgtaaatttgcaaactaaacaagctcgtctgttctttctgttcatcaattagatgaaactttaaatcttc

SEQ ID NO: 19820 - DNA, 2383 bp, Oryza sativa
  ref <308>: DATABASE ACCESSION NUMBER: AK070162
  ref <309>: DATABASE ENTRY DATE: 2001-12-06
ggcctttagtggaaaaagctgctccttttttcgcttcttcctccgctcccatttcaatttcgtgcgtgtggctttctcctctccgcgttttggtttcccgcgcgcggaggagggaaagattttgccgtgttcttgccggcggcgagccgccatggaggcggccgaatccttggagtatgagctgcagaaggaggtctccaacatcatgatccagagctacattactagcatgcgtcgagagttcgagacaaagttatgggagaatcagaactgcattagtaccttgaacaaaaactggaaggaaaagatatctaagattgccgcactgcgagatgaactcagtactatttacagtgttgtatcagcttcagaatctggtgtgttttcttctcatggtagtcacgaaaaggtcgaagagctcaactttttgaagatgaaggatgataacgagtcatcaatcacagagagaactacagattcaggtgagctcatgtttgatatcccggacttctcactcttaaagcacatgccaagtgaagaagtcacaaattttctaaaatcagaatggctgaagttgcgaagacagcacgagtctgaattgcatgagaaaacagaagagttgtttaggctaaaaagggaatttgcgaaagatatagctttgttgccttctaggaaagagagagaacttgaaatcatcaaatcaaagttgcttcaaagcatttcaaaattggatgaaatcaccttgagagaagataacccttattgtgataattatgatggtgccgaggtttgcggatttgaggacagaatcggctctttacttcatgaaaatgaacaactacaaggtttgctagctgacaaaaaaatggtggctaaacatctgtctttacaagtattagatgcagagaggaaaatggcacagcactcgttgtccgagttaaaacttgtgaaacaagttgagaagcttagccatgaacttgaagatttaaagattgagagccacattaaagatttattggagctgtcgacattaagagaagtttttgataattatgagaatcatattgatgatgctaatcaggaggagaccttcctcagagagttgcttatagaaaaagaagagcagttgagtattatgtatgaagacagacagaagctaaagtatgaaaacaatcaacttgtagcaattgcaggatcaacattaatgcagcaccatgagcaagtcaacttggttaatgaccttaccaattttagggagaaggtgtgcgagcaagagttgttgatcttagagtccaagagtgagtctaattcaatgaagagtagcttgtatgaggctttgcagcaaattaatgtatgcaagcaagagatacatggtctgactgacaacttaactgccatgtctattgctttggaggaagccaaagaacagaatgcctcacttgatgccaccatccaggaaatgaagaaaacatcggcgccaagcattaacagtcataagggacaagcagggcacctagaatatgcccttgttagtatggagaagttatctaaatcatacagcgattttgaaagcagattggctcaaagtatgaagagaaatgaaattaggttgactaatataatttgccagtttaacccactggtgcagcaagttgctgtattaaagaaaaaagaattctggtataaacagatactcgagattaaatgctctaatctccagaaagcagaagctgaggttgatatacttggggatgaagttgatgctcttcttagtattcttgggaagatctacatagcacttgatcattattctcctgtattgaagcattatcctggggttacagagattttgaatctggttcagaaagcattgaaaggagaaagtatttagtaggatcaggaaaaaccttaacactattcatgaaaaggcttgacatggatagaattatgactgagatttttcaatacttcagttacctgattgccgtaggcaaattttttttgcattgtctcacagggaagaaagattaagatcttaacacacaaaggcaaagcatagtaaactagctagctaccattgttccattgatagggttaccaaccgcatctgttgatttatatgattgtatcagtgttcagttagtggtgttgtgagtacagtagtacaggcttatagggtctatttgtattggttgtagtttcaggtttcactgtgagtagtttacttgtctgcatgcaacaaagtgcagcttgctatagttatagatggttttgtcagtgatcttttttagatggctttgtaaagattctttgtggaatggaaggcagtaggtaggagttgtaatatcaggtggctaattaatgaaatctgtgtattcagttg

SEQ ID NO: 19821 - DNA, 767 bp, Oryza sativa
  ref <308>: DATABASE ACCESSION NUMBER: AK070163
  ref <309>: DATABASE ENTRY DATE: 2001-12-06
ggaaaaggctcccattctctcgcagcctctcctccatctcggtcgatcagagaggaacaaagctgagtcttagaggaaattaatcaagtgaggttggttgtctgaatgagctttgcaatccgcagctctgagcctgaattctggttcttgatcccgtcggaagaggcagcagtagcagtcgcagcacatcggctggtggtgatggatcagaggagaagcggatcagcttatcgtcctaagcggacacatatggcggcggcggaggacgagcaccggcggccggggacgtcgagccgccgccgggtggcgccgacgccgacgacgcagacgcagacgcagacggcgcccggctacttcaccgtcgagctggtgatggcgttcgtctgcgtgaccgcgtcgctcgtgctgctgccgctcgtcctgccgccgttgccgccgccgccgtcgctgctgctggtggtgccggtgtgcctgctcgccgtcctggtggccatggcgttcgtcccgctcgacgcgcagagcaacgtcgtcggctcgtcttgcttgtagatagagaaaatgaaattcttttcttgctttttttttttatcttccacagaccacagttcatttaggattttaggttagcgtaaagagacggttagttctctattgctagattagtggggacgatgagtttgtaattactgggctgtaattgattactgctgatccgatagatcgacccgggctaaacctgcaaaacacatgcccttctgaagaagggg

SEQ ID NO: 19822 - DNA, 1301 bp, Oryza sativa
  ref <308>: DATABASE ACCESSION NUMBER: AK070164
  ref <309>: DATABASE ENTRY DATE: 2001-12-06
tttatccctgataagataggcacagacctgcctatattgtcacaatttttctacagagcataaaagttggtgcaatgtgaatgcacgtgcaatcactgaccaaactaccaaactcatgctccttagtagttctatcttcaggttgggtgcaataactgattaatttattttggtgatttattgtaattaagattgaagctgtgacaagaaggattttgaggatcacttcaactgacggagcagccaaaatacttgttttttcaagctggaatgatgttcttgatgtgctagagcactcccttgccgctaacaatatctcttatgttcggatgaaaggaggaagaaaatcgcaaacagcgcttgcccagttcaaaggtctggcaagtagtataagtggagagaaagcaaagaagtcattttccaagatgcaacctgctcaagtattgctaatgcttatccagcatggtgcaaatggtcttaatcttttggaagcacaacatgtaatattagtggagccgttgttaaaccctgcagctgaggcgcaagctatcagcaggatccatagagttgggcaagacaaaagcacgtttatccaccgttttattgtgaagaatactattgaagagagcatctacaaattaaacaggggcagagctgtttgctccacgatacaccgtaaatcaaaaaatttcaaagatgagcttgttttgacactgaaggatattgagtctttatttcctgtggcaacacttgatcagccttcagaacaggagaataagaattacggtggggcaggtgggcatatgagaagtttacctccatctgttgcagctggcttagctgctgaaaggaggttattggagcaacatgacaaccagcattaagttatcagctgacttattctttcaactggaactcggagaggcaatgaaagaggttgaaataattgatgctgtagatattttagttaattggatttatcgattgccttcttagttctaaattatgttaaaattacagaaggtagggatatactttggtctggagcttctcggatcattatattagaatctggcatcagtgatagaatgtttaggacacccccgagcatcgggtatgtacttaaggagatgttgtgaaatttagttagttagcctgacagaagcatgtgtatcattgtataaaacccgccgtcttattttccttttgatttttgataggtaataaatatccttaacatgtgtacatgtttatgaacattgctttagtaaatgaaagatcagttcagatcatttttggtc

SEQ ID NO: 19823 - DNA, 1324 bp, Oryza sativa
  ref <308>: DATABASE ACCESSION NUMBER: AK070165
  ref <309>: DATABASE ENTRY DATE: 2001-12-06
gatttcaggagttttaatttttgctcagaaaaggttgtcttgattgcaaaatgagcaatattcctctcaacggtcaccaaaagctccatcacacttttcttcaaaagaaaggcactaaattctggtccatctatctaaatctaaccaatttcagaactacaagtcttgccggtcctttgaattctgaaggtcaccctgactcgggtcgttgtgcttatctctcgactccacattcttctcttgatgaagcaatagcatatttagattttcatgtaaagagcaagaaggcaaagggatatgaggaagttcctgcaataaaagttgaagaagatatcgtcaagattgattttaacagcattatctatgatgagaaacttggcaaacgagtcaattcattggagcatatttcagattattctgctgaggattcagccgatgaagatgctcaggatattcatcagtcaagagatggagttggaaattttccttctttgagaccagaacctcagtcttcaaaatttgaattcaataacaataatgattatcaaaattcgaatcgaattaatgagaaggaagaggatcaaatgcagagttcaacagaagaagttgatgaagaacttttgaattttcctttgggccagccaatcagagagatgaaagaccagaagctttcagtggagaagttgaggagtgcaaatgtgaaagggttgtacatgacaccgtatgtatctggcgttcgatgtttgtggagtggatttgaggtatttttgaatgcatcaaagcaatacgttcctccaagcgagtttcgaaaatatttaccaggagggccgatagaaggagagtttgtgatgggaaagaatagtagtaagagaataaaggatgccttaaaatgtaaaagtatggatgaatggaaatatttgaaatttatcgcttatgatgctcctcaggtgaaagctccctttgaagaaagagtgaagaagttgagaaaagtgctgaagaagaagaagaacccatatgttgttttgcaagaaccaattttgtgccagagcctggatcatttaaatgaggagattacaaagcagttaagagctgggaataaaggtgtgttgttaagacaatcgcaaggaaatgttacacagtttttaagaaaagcaactaaagtattaacagcagaggaagaaaaacctctttcccaattaatataagatgaattacgagaagttctatgatctttttttgttattaaactgatttattgaataagaattcatgtaattgtttaggatacaattctatgtaatcattttggcagaaaagcaaaagg

SEQ ID NO: 19824 - DNA, 1229 bp, Oryza sativa
  ref <308>: DATABASE ACCESSION NUMBER: AK070166
  ref <309>: DATABASE ENTRY DATE: 2001-12-06
gacaagccgacggagaaaaatatctctcttctatccaccgcaaggccaacgcagagcgcgactcgccgtccgtcagcggtggtcgcggcggccggctacaagatgatggcgtgcagggccctcgcgctcctcccgctcccggcgccctcccgtctcccccgcccgcgcgccgcctcgctcgcgcggctcgacgccgcccgccgccgcgcctctgcctccttattggtccggtgctgcgccaaccccgccggtcccggaggccaggaggatccgccgcaggacgccgtgctcaaggccatctcccaggtagcgaactctaaaggacgggttgcacagacaacaaatgttgtcatgggtggtactgtgacagatgatgcaactgatgaatggcttgttctggataagcaggtaaatacatatcctacagttagaggatttactgcaattggtactggaggagatgattttgtccaggccatggtggttgcagttgaatcagtactggaagaacaaattccaaaggctcagatttcccataaagtgtcgtcgaaggggaaatatgtttctgtaaaaattgggcccattcctgtggtttccagcgagcaggtccaagcagtgtataatgccatgaagaaggacgaaaggatgaaattcttcttgtaaacattaacagtacagtattattcttgtaactctagcatattgccacacgattggccatctttataagcaaaagccaagaaatttcaccatttcttggccaaacattaaaaagatggattcccactttagttgaatagcttaaatgagaggccacatttcctatttactgggaatttgttctgttacctactgaaatttactggccaggttgggcatgtttggaccatactttcaggaggacctcagtatcacgcagctccatggggttttctgtgaagatagctgcttggcttggtcgatctgacctcgggaacattgatggaaatctgatgcattttggaggtatcgtatctgttccggtcgacctcacactcacaggcagcaatttgctaaactttgaacaggagtgtacgtcatcgtccaagggtgaatctaatctccagtgatatccataaaataaaaattctccaattattggaatagtttgtcgagcaaaaagaaggcgtgtatgtatgtgccgaaagttgaaaggaaaagacaccggaatctgcttggcattttatctc

SEQ ID NO: 19825 - DNA, 1846 bp, Oryza sativa
  ref <308>: DATABASE ACCESSION NUMBER: AK070167
  ref <309>: DATABASE ENTRY DATE: 2001-12-06
ggcatccaaactagcaacttaattaggcacctaattaactccgacgatcgatcgataattaagaatatggaggacaacaagctgatactggctctaggcctatcagtgctgttcgtcctcctctccaagctggtatcatctgccatgaaaccaaggctcaaccttcccccggggccatggacgctgccgctgatcggcagcctccaccacctcgtgatgaagagcccccagatccaccgctcgctgcgcgcgctgtcggagaagcacggccccatcatgcagctgtggatgggcgaggtccccgcggtgatcgtgtcgtcgccggcggtggcggaggaggtcctgaagcaccaggacctcaggttcgccgaccgccacctcaccgccaccatcgaggaggtctccttcggcggccgcgacgtcaccttcgcgccctacagcgagcggtggcgccacctccgcaagatctgcatgcaggagctgctcaccgccgcccgggtgaggtcgttccagggcgtccgagagcgcgaggtggcgcggctcgtgcgtgagctggccgccgacgcgggcgcgggcggcgacgctggcgtgaacctcaacgagaggatcagcaagctcgccaacgacatcgtgatggtgggctccgtcggcggccggtgcagccaccgcgacgagttcctggacgcgctcgaggtcgccaagaagcagatcacgtggctcagcgtcgccgacctgttcccgtcgtccaagctcgcgcggatggtggcggtggcgccacgcaagggcctcgccagccgcaagaggatggagctcgtcataagacggatcatccaagaacggaaggaccagctgatggacgacagcgccgccggcgccggcgaggctgcggcggggaaagactgcttcctcgacgtcctgcttcggctgcagaaggaaggtggcacgccggtcccagttaccgacgaaatcatagtcgtgcttctgtttgacatgtttacgggggctagcgagacatccccaacagtattgatttggatcttggctgaactcatgcggtgtccaagagtaatggcgaaggcacaagctgaggtacgacaagctgctgttgggaagactaggatcacagagaatgatattgttgggctgagctacctcaagatggtgatcaaggaggccttgcgactccattccccggctcccttgctgaaccctcgtaaatgtcgtgagacaacccaagtcatgggctatgatataccaaaaggcacatctgtgtttgtgaatatgtgggcgatatgtagggaccctaattactgggaggatcccgaagagtttaagccagagaggtttgaaaataattgtgtagattttaagggtaataactttgaattccttccatttggctccggacgtagaatttgtccgggtataaaccttgggctagccaacttggagctagcattagctagtcttctctaccattttgactggaagctacccaatggaatgttgcccaaggaccttgatatgcaggagacccccggaatagttgcagctaaactaactactctaaatatgtgccctgttactcagattgctccaagcagcgcagaagatgcatcataagagataatacgtcctccaagacagcacatatagtagtttaactacatagaaaataaggtgttgtgaaaaaaaagggtttatatatatgtaccctatgtattctcaagttgctttgccaggcagactggcctatttgtgtagctattctcgttacatggtatatgtgatgtcatttgaaaagtgtaatgctattgttaccacttccataaaaacaattttctgc

SEQ ID NO: 19826 - DNA, 1395 bp, Oryza sativa
  ref <308>: DATABASE ACCESSION NUMBER: AK070168
  ref <309>: DATABASE ENTRY DATE: 2001-12-06
gaatggccatcacagtgtctatctatcttgtgaagatgccaatctacttggagacgagaggcacatcgagaatctcactggtagtgcatcacatcagaagaaggacgcactcttcttcttcttctcgtctccgattccaacgaggcggcggagcagagcagaggcgcgggatggcggcggcgcaggggagcggagtgccggcggcgctggcgctgagcagcggccacacgatgccgtcggtggggttgggcgtgtggcggatggactcccccgccatccgcgacctcatccactccgcactccgcatcggctaccgccacttcgactgcgccgctgattaccaaaacgaggctgaagttggggatgcacttgcagaggcattccaaactggacttgtcaagagggaggatcttttcatcacaaccaagttgtggaactcagatcatgggcatgtggttgaagcatgtaaggatagcttgaaaaagttgcggctagattatctagatctctaccttatccacttcccagtagctacccgtcatactggagttggtacgactgctagtgctcttggtgatgatggtgtgctagacattgataccactatctcattggagacaacatggcacgctatggaggatcttgtttccatgggactggttcgcagcattgggattagcaactatgacatattccttaccagagattgtttggcttatgctaagataaagcccgcagtgaatcaaatcaagacacatccctacttccagcgcgactgtcttgtcaagttctgccagaagcatgggatcttagtcactgcccatacccctctgggtggctccactgccaatactgagtggtttgggtccgtctcatgcctcgacgaccctgtcatcaagtctctggctgagaaatatggcaagacaccggcgcagctggtgctccggtgggggcttcagaggaacacagtggtgatccccaagacatccaaggaggagagattgcaggagaactttgcggtcttcgatttcgccatctccgacgaggacatggagaagatgagatccatcgaccggaagtaccgcaccaaccagcctgccaagttctggggaatcgacctgtttgcttgatgaattatgagtctttagcacgaacaataatgggggcttttctactgtccctgggagcttcttgtgcaatcatttttctctgaactgaaacttcttgtgctgaaggatgaagttgttgggatcgtgtgaacttgaattgttattcaaagggaaaaaaagagtgtgaacttgaattgtatctatatttcgtgtatttgcgcttctgcagcccgcctaatcaataaatttttagcatccctgctaagtatcatgaaatttcatatcc

SEQ ID NO: 19827 - DNA, 1038 bp, Oryza sativa
  ref <308>: DATABASE ACCESSION NUMBER: AK070169
  ref <309>: DATABASE ENTRY DATE: 2001-12-06
gaggcgactctcggccgcactccgcccactgcgagtctgcgacggtgcgacctctctacctctctctctagtctctccccccgacgagagctcccccctcgatggcgtcgcagagcaccaagcccgcgcaggccgccgccgagccgtccccgccggcggccaccgcagcagcgggggaggcgccgccggctccgaaccccgcgtcggccgccacgccagcccaaaaccctaccgctgccgcgggggcggccgctggcggggccacggatctggagaagaagatgcgccgcgctgagcggttcgggacggccgtggtgatgtccgaggaggagaagcgcagcagccgcgccgagaggtttgggactggatcttcaaatgaaaaggcggaggaacaaaagaggaagtccagggctgagagatttggccttgcctcatcttctgctgacgaagacgctaagaaaaaagctcgtttagaacgatttggtcagagtacaaatgttgacaagggggaagaagagaaaagaaaggcacgagctcttaggtttgcagaaacatctagtggaccatctcaagaaaatggcaaagactgctccaagccgacgcaggacgcggccactgtggcaggcacggcataatggaagcactccctgccttttgtgagatctcggacatggcccttacttttggggtgaagccgtagtttgtacaacactaacgacatcagtggcatcatgttttctcctagccatgttgagtgctatttactgtgttgacttgcttacggtacttccctagcagtgtagcttgacttgctgcttggtttgggataatactgtacttttgttacctccctcttttaatgaccatggctccttaggtatgtaccagtagtaacttatgttgttgtagttagcttttaagacgttatcgtattctaagttttagatgcttccttcgtgttacaaaatgacatacgcaacaatgccaatgtcttggcagcggggcatgtgaatatctgatgatgcatttcgttagtgc

SEQ ID NO: 19828 - DNA, 1329 bp, Oryza sativa
  ref <308>: DATABASE ACCESSION NUMBER: AK070170
  ref <309>: DATABASE ENTRY DATE: 2001-12-06
cagctcgtcagctcccatctctcctcgactcctctcttctcttctcctctcctctcctctccaaccgatggctctcgtccgccagcgacgccacctgccgcacctcaccctcccgctcgatcacttcgccctccgcccgccgccggcgccgcagcagcagcagcagcccgcagtcgcgccgtccacctcctctgacgtccgcctctcggacttcgagaggatctccgtcctcggccacggcaacggcgggacggtgtacaaggcgcgccaccgacggggttgccccgcgcagcagccgctcgcgctcaagctcttcgccgccggggacctctccgcggcgcgggaggccgagatactcaggctcgcggcgtatgccccgcacgtcgtgaggctccacgcggtggtcccgtcggccgccggtggggtggaggagcccgccgcgctggcgctcgagctcatgcccgggggttccctggctgggttgcttcgccgtctcgggcgcccgatgggggagcgccccatcgccgccgtggcgaggcaggcgctactcgggctcgaggcccttcacgcgctccgcatcgtgcaccgcgacctcaagccgtcgaacctgctcctcggcgccgacggcgaggtcaagatcgccgacttcggcgcgggcaaggtcctgcggcggcggctcgacccctgcgcgtcctacgtcgggacggcggcctacatgtccccggagaggttcgacccggaggcctactccggcgactacgacccgtacgccgccgacgtgtggagcctcggggtagcgatccttgagctgtacctcggccacttcccgcttctccccgtgggacagcgcaccgactgggcggcgctcatgtgcgccatatgcttcggcgaggcgccggagatgccggccgccgcgtcggaggagttccgggacttcgtgtcgcggtgcctcgagaagaaggccgggcggcgcgcgtcggtcggcgagctgctcgagcacccgttcatcgccgagcgggacgccgccgatgcgcagcgctcgctcgccgcgctcgtcgccgaggcggagcagagcggcgatctatagccaatcgagccgccggttaaattaactctgcagatttaggaaccaatcagagatgacgtgtacataatctctgccacgtggacgaacagctttgtcccgtgtgtttttttcttcctctcttttcacttcttgccatccaaggatttgtttgttttttaagttcgttcttggccaaattacaaattgcaagacacaattttgtgcaatcgtaatgagagactaaagagtctagttcaattgtc

SEQ ID NO: 19829 - DNA, 926 bp, Oryza sativa
  ref <308>: DATABASE ACCESSION NUMBER: AK099128
  ref <309>: DATABASE ENTRY DATE: 2002-08-28
gcccgtttcttctcacatcggcgagttcgcaacctcctccctccaggctccacttcccagacgaatcggcggcagcggcggcggcggcggtgatggagtgcgttatcggggtcgtcggccgcgacttcgcggtggtggccgccgacacatcggcggtgcagagcatcctggtccacaagaccgacgaggacaaggtgatggtgctcgacagccacaagctgatgggcgcgtccggagagcccggcgaccgggtgcagttcaccgagttcatccagaagaatctccacctgtatcagttccgcaacaacatcccgctcagcaccgccgccaccgccaatttcacccgcggcgagctcgccaccgccctgcggaagaatccgtactatgtcaacgtgttgcttgctggatatgattcggatgttggtgcctctttgtattacattgactacatcgcaacattccataagatcgaaaagggtgcctttgggtatggctcctacttctgtctctcgctgatggacaagttatatcgtccagacatgtcagtcgaggaagctgttgatcttgttgacaagtgcattaaagaaattcggctcaggttggtcgttgctcctcaaaacttcataatcaagattgttgataaagagggtgctagggagtatgccaggcgtgcatacaccgacagtccaccggaagctgcaacatcagaagctgcaactgtagcagcctgagttgtatctgccatatgggtgtgaaccttaggtttccgagtacaattgctatgtaatcacaagtactgggatctgagaactttgttgcaaatttacttcctcttttatttgtgttatttatctgtttaactgtttcatgttcgtgaatgctgtgcaactggattttatagacatctttctagttcctcctgttcc

SEQ ID NO: 19830 - DNA, 2515 bp, Oryza sativa
  ref <308>: DATABASE ACCESSION NUMBER: AK070171
  ref <309>: DATABASE ENTRY DATE: 2001-12-06
gactcgcatcgcatcgacctcctctcgccttctacgtaccttgccaatggcggtctccacctccaggcgcggcggcggcgtgcttgcggcggtggtgacggcggtggcggcgctggcgatgctgggcggggtggcgtggggcggcaacccggggttcacgtgcgggccggcgtcggcgcagaaggggttcgcgttctgcaacgcggcgctgccggcggagcagcgggcggcggacctggtggcgaggctgacgacggcggagaaggtggggcagctcggggaccaggcgcccggggtgccgaggctggggatcccggtgtacaagtggtggtcggaggcgctgcacgggctggccatctccgggaagggcatccacttcggcaacggccccgcgcgcaccgccaccagcttcccgcaggtcatccacaccgccgccgccttcgacgacggcctctggttccgcatcggccaggcgatcggcaaagagggtcgggcgttctacaacctggggcaagcagagggtctggccatgtggtcccccaacgtgaacatctttagggacccacggtggggccgtggccaggagacccccggcgaggaccccgccacggcgagcaagtacggcgccgccttcgtcaagggcctgcaggggagctcgttgacaaacctccagacctccgcgtgctgcaagcacatcaccgcctacgacatcgaggagtggaagggcgtctcacgctacaacttcaatgcaaaggtgacaccgcaagatctagcggacacgtacaacccgccgtttaggagctgtgtggtggatgggaaggcgagctgcatcatgtgtgcctacaccctcatcaatggcgtcccggcgtgtgctagttctgacctcctcaccaagaccgtcaggggagaatggaagttagatggttacacggcgtcggactgcgacgcggtcgccatccttcacaaatcggaacacttcacgaggacggcggaggaagccgtggccgtcgccctcaaggccgggttggacataaactgcggcgtgtacatgcagcagaacgcggcgtcggcgctgcagcaggggaagatgacggagaaggacgtggacaaggccctcaagaacctcttcgccatccggatgcggctgggccacttcgacggcgacccaaggggcaacaagctgtacggccgcctcagcgccgccgacgtctgcacgccggtgcacaaggccctcgccctcgaggccgccaggcgcggcgtcgtcctgctcaagaacgacgcccgcctcctcccgctccgcgcccccaccgtcgcctccgctgccgtcatcggccacaacgccaacgacatcctcgccctcctcggcaactactacggcctcccctgcgagaccaccacgccgttcggaggcatccagaagtacgtcaagagcgccaagttcctccccggctgcagctccgccgcctgcgacgtcgccgccaccgaccaggccaccgcgctggccaagtcctccgactacgtcttcctcgtcatggggctcagccagaagcaggagcaggaaggcctcgacaggacgagcctgctgctccccggcaagcagcaggccctcatcaccgccgtcgccaccgcgtcgaagcgcccggtcatcctcatcctcctcaccggcggcccggtggacatcacgttcgcgcagaccaaccccaagatcggcgccatcctgtgggcggggtaccccggccaggccggcggtcaggccatcgccgacgtgctcttcggcgagttcaaccccagcggcaagctgccggtgacatggtacccggaggagttcaccaagttcaccatgaccgacatgcggatgcgccccgacccggccaccggctaccccggccggagctaccgattctacaagggcaagaccgtctacaagttcgggtacggcctcagctactccaagttcgcttgccgcatcgtctccggcgccggcaactcgtcatcctacggcaaggcggcgctcgctggccttagggcagcaaccacaccagaaggcgacgccgtctaccgcgtcgacgagatcggcgacgaccggtgcgagcggctcgggttcccggtcatggtggaggtgcagaaccatggccccatggatggcaagcacaccgtgctgatgttcgtccggtggtcgagcacggatggcggccggccggtgaggcagctgatcgggttcaggaaccagcatctcaaggtaggggagaagaagaagttgaagatggagatcagcccatgcgagcacttgagcagggcgagggtggacggcgagaaggtgatcgacagaggatcgcatttcctcatggttgaggaggatgagttggagattaggttccaggattgagttttagatggaagattatttccttgttttttaaattttggttttgtttatgtcttttgagatgatacataaaaggagatccaatggattgatattaaattaatagagaaggaaaagttcttttgtcgg

SEQ ID NO: 19831 - DNA, 4213 bp, Oryza sativa
  ref <308>: DATABASE ACCESSION NUMBER: AK070172
  ref <309>: DATABASE ENTRY DATE: 2001-12-06
gattctccatggacgagtaggtagctctcgtgagcttaatttacagcgcgattgccgtcgccggtgcccgccacacctctcggagttgtgcggatggctgcgatcgttttgctgctcttccttgtcgtgggcttgatgccggtttccaatgggcagacgacgcccttctccccgcgattctccgtctacctcgcgtgcggcgccggcgggaacgtcgtcgtgacgtcggactcgccgcagcggactttcgtcccggacgacggcgagctgtccgggaagtccgcgaggttcagcaaccccgacgcgagcccgccgtcccctctctacgccgcggcgcgcgcggggacgagcggcttctcgtaccggctcagctacgctgccgacgcggcgcccgacggcaacaccacgctcgtcctccgcctccacttcttccccttcgcgtcgcagtccggcgacctcctctcggcgcggttcagcgtctcggccatggggaggtacgtcctcctgcctccttccttctcgccgccgcgcgccggcgtggtgagggagttcctcctcccgtccgatggctccggcgagttcgacgtcgccttcacgcccgaatcaggggggctcgccttcgtcaacgccatcgagctgttccccgcgccgcaggagcttctgtggaagttccccctgacggcggtcaacaccgacgtctcgccgtcgcatcaggcgctggagacgctgtaccggctcaacgtcggcgggccaacggtgacgccgacgggcgacaccatgtggcgaacatggctccccgacgactcctacctctccccggcgacggtctcggcggtggccagcatccagggccagatcatcttcgaccgggcgcagggctacacgcagatggtcgcgccggacgccgtgtacaagtcgcagcgcacgacgaactcgaccacgtcgaacgtgacatggacgttcgccgtcgacggcaacagcagctacgtcgtccgcctccacttctgcgccttcgaggagctcagctccgtcatcggagaaggcgtcgatttcaatgtttatctgatgcaagccatgggtacccgggaattgaaggccaaggactacgcgacgctgagcagtccgacccaagctttctacatggactatgtcgccgtggtcccgaccgccggcgagaacctcacggtgagcatcggcagggcggcgagcagcgacagcaagaagacgatactgaacgggctggagatcatgaagctcagagccgttgatatgactccggcgagctcgtccggcaagacgagcaaggtcgtcgtcgtagccgtgaccgcggcggtgctcggcgcggcggttctagcaggtgtggcattgtgcgtactgcttgtgcggcggagacagcggcgggcgacgctgcctgtgccggaggaggaggagaaggagagcgtggggacgccgtggtcgccgttcacgccggacggcgagggctcgttcggcagcgccgtggtcacgccgcggaggatgaacatgaagctccacatcccgctcgccgagatcatggtggcgacgggggacttcgacgacgcaaacatcctcggcgtcggcgggttcgggaacgtgtaccgcggcgtgctccgcgacggcacccgcgtcgccgtgaagcgcgccaagcgcgcgtccaggcaggggttcccggagttccagactgagatcctggtgctctccagcatccgccaccgccacctcgtctcgctcatcggctactgcaacgagcggtcggagatgatcctcgtgtacgagctcatggcgcacggcaccctgaggagccacctgtacggctccgacgccgcggcggcgacgccgccgccgctgtcgtggaagcagcggctggagatctgcatcggcgcggcgaaggggctccactacctgcacaccggccactccgataacatcatccaccgcgacgtcaagtcgacgaacatcctcctcggcgacggcttcgtggcgaaggtggccgacttcgggctgtcccgcgtcgggccatcgacggggcagacgcacgtgagcacggcggtgaagggcagcttcggctacctcgacccggagtacttcaagacgcggcagctcaccgaccgctccgacgtctactccttcggcgtcgtcctcttcgaggtgctgtgcgcgcggccggcgatcgaccagagcctcccgcccgacgagatcaacctcgcggagtgggcgatgcagtggagccggaggggccggttcgacaagatcgtcgacccggccgtcgccggcgacgccagcacgaactcgctccggaagttcgcggagaccgccgggaggtgcctcgcggactacggcgagcagcggccgtccatgggcgacgtggtgtggaacctcgagtactgcctccagctgcaggagagccagccgagcaccgagacggcgctggacttggacgacagcggcgcgcacctgccacgggacatcgtcgtggcgaggcgagtggcgccgctcgcgcccgatgcttcggcggacgccgccggagacgacatgagctggtcggagacggcgagcttcacggcgacgggcagcgtgttctcgcagattatgtcccgcgatggtagatgagcagagtagtcgcctttataatgaggaatctggtggcgcacgattacaaaaggaggtcaaaagccacgacacaatggcaggaaatttttaaaatgttccaagattttggttaccttttcaatacgaatttaaatcggatttgatgccaattcgagaggattttatctgttcagtgtgagttggagttcgaatttgaatagaatttcctctcctttgccgagagcaccgctgccaggagctttgtagtaggcgcttgcccttcgggcccagataactttttttattttaagatattgattacctttcaatatgaattgaaatcgaatttgatgctaattcacgaatcacaaggaatttctctgttcagagtgagttcgagtttgaagatgaatagaagcaccgttgcctggatctttgtaggccgtggaccgttcggccgagattagttttggcccataaaaacttgaggcccatccgagggacactcataactgatctccgcgtcaccaatctcaaagcacagacaccctcttctccagttctccgcgactcctcgccgccgccgccgccgccgcctgatctccccggaatttatcgtcggagagacgagatcccggcgccctctctctgctcccacgccgtcggagtaatttctccgcgggggacccgatctccagcttcagataccgcctccaacgtctcgctcttcctgcttagatagatctcgggctccccgtacctcgtacctcctagggctaatggatcagaagggtttcgacggcgataggtcggagagtaggctctatgtggggaatttggattttagggtatcagagtctgacattatcaagatgttttctccatttgggaagattatagctgaggatttcttgtggcacacacgcggcccgaagcgaggcgagccccgtggctatgccttcgttcaatacaccaccaaagagtgagcatgcaggaagcacagttggcgaaggaaaagatgaacggcaggttggtctgtggacgccctgtggtggttcacctggctagtgagaagtgtttcgtggactccggaaattcccacagagcaatgaaggacaagaaactggcaggtggttcaggaagcaaatcggtacagactgaccgtgccgcgaagatagctgccataaagcacaagttgaaatccttagaggatgagggatgcagtacaaaaagaccaagatttaagtcagatgacttgccgggcagcggcaagcaatctgataaggagtgctgagatgagattgttcaggatcttcagatactcttcttgttctggtgattttgctgaaggtgctcctgactgtaaaattttagttctgttatgttagacaagtcacaggtgtaacactttatagtttatcacatttgtacaccaggctgtatcatctacctgcgattaacacgaacgatttgttggtggaaccattgtggcattctagctttttagcattaagttccagcctactatttatttgttcaactgaattgcatcatgtagtactcataattagtttattcagttttgtttaaactgttgaaattgctt

SEQ ID NO: 19832 - DNA, 3289 bp, Oryza sativa
  ref <308>: DATABASE ACCESSION NUMBER: AK070173
  ref <309>: DATABASE ENTRY DATE: 2001-12-06
aaatggaagctttattgctataaacttgaaatctccctccaagtagagagaaacgcaactcacatcgatcccaagctaattaaactgccgctgcgccgcagtatgaccacccatcacgacccagcagcagcagcatctgcaccgatagtgcggatgctgctccttgtcctgctacaaatccagctcgtcgccgcgctctcgcttctcccgccggcatcagcaccaccgccggccgctctcccatgccgtccggaccaggagtcaccgctgctccggctgaagagctccttctccgccaccgacatgtccacggcggctttccggtcatggcgacccggcacggactgctgccgctgggacggcgtccgctgtggccacggcgacggccgcgtgacctccctcgacctgggcggccgtcagctggagagcagaggaggcctcgacccagcaatcttccatctcacatccctcgagtatcttagcctcgccgacaatgacttcaacgggtctcctctcccttccagcggctttgagcgtctcacagagctcacccatctcagccttcgcagcaccaacattacaggcgtggtaccagccggaatcggccgtttggtgaatttggtatcccttgatctctccacagactttgagataatcgacacatttgatgatgtctatgtttttaaaatgaattcgagtctcgatgcccaacagctcgctgtgccaaacctggaaagcttagtcgcaaaccttagcaatttaagggagctcaaccttggcttagtaaacttatctgaaaatggcgccagatggtgcaacgctctagtcgattcctgcccaaaacttcaggttcttcgtttgtcttgctgtgctctctctggcccaatatgtgcaacacttccccgtttgcactcactttctgttattgacctatcgtttaatagtttgcccgggctaattccagatttctccaactttcctaatttgactgccctccaacttagacgtaatgaccttgaaggatttgtctctccattgatctttaagcacaagaaactagtaactattgatctttaccataatccaggaatatatggtactttgccaaacttttcatctgatagtcatttggaaaatatatatgttggtggaactgaattcaatggtataataccaagttccatcgctgaactcaaatctttgaagaatctaggcctaggagcaactggcttttctggagaactgccctcatcaattggaaacctcagatccttgaagtcattagagatttccggttttggactagtagggtccataccatcatgggttgcgaacctatcctctttgactgtgcttcagttcacaaattgtggcttatctggatcaataccatcctctgtcggtaaccttaggaatttgggaaaactactattgtataattgcagcttttcaggaaagataccttcacaaatcttgaacttaacacagctagaaatactctcgcttcattcaaacaacttcattggcacagtagagcttacctcgatgtggaaactactagacctgtttgtcttggatctttcagataataatctggtcgttgtagatggaaagggtaattcttcaacggcatccatccccaaactaggagcgttacgtttatcaggttgcaatgtttcgaaattccctaatttcttgaggttccaagatgaaatcgaatatcttgatctttcatataaccatatcgatggagccataccccaatgggcatgggagaattgggtcaaaatggacatactatccttgaagaacaataagtttacaagtgttgggcatgacccttttcttcctttaagtgatatgaaagcacttgatcttagtgagaacatgtttgaggggcccatacctatacctcgaggatatgcaactgtgcttgactactcaggaaacaggttctcatctataccatttaagtttaccaattatctcagtgatgtctcgtttttcaaggccggtagaaacaatttctctggaagaattcctccatccttttgtagtgcaatgagtttacagctccttgatctctcatacaatagctttgatggttcaattccttcttgtttaatagaggatgttgacaaactggaagtattaaatctaaaagaaaataagcttcgtggggaatttccggacaatatcaaggaaagttgctcatttgaggcactggatttcagtggcaatttgattgaagggaaactgccaagatctctggccgtttgcaaaaacttggaggtccttaatattggaagcaatcagattaatgattcctttccatgttggatgggcacacttcgtaaacttcaagttcttgtgctgaaatcaaacaagttttttgggcatgtagcacagtctctgggggaagaaaaaggtacatgtgaatttcagagcgcaagaattgttgatctagcatccaacaagttctctggcatcttgccgcaagagtggtttaacaagttaaagtcaatgatgatcaaagattcaaatttgacattggtcatggaccatgatctcccacgaatggagaaatatgattttactgttgcactcacatacaaagggatggacatcacatttactaagatcttgaggacccttgtattcattgatttatcagataacgcattccatggcagcctacctgaagctataggtgaacttgttctgctaaacgtgctcaacatatcacacaactcactgacggggccgattccacctcagcttggtcgtttaacccagcttgagtcgttggacatctcatcaaatgagctttcaggagaaatcccacagcagttggcatccttggacttcctcacagtgttgaacctgtcctacaacaagctggagggggaaataccagaatcgcctcatttcttgacattctccaatagttcatttctggggaacgatggtttgtgcggtcgtccactgtcgaaaggatgcatcaacattacatctctgaatgtgatcccttccaagaagaattcacttgacgttttgctattcctttttgctggattgggattcggctttggatttgccctttcaattgtggttatatggggaattcccatcagaaagcggtctcgagtaaggcagagagccctctgaattatgtatcgaagtaaacttttctgtaccaaggtcacttgcagacatgcagtacatatgtaatctaaactatgtaacatgctattgttgtcgcaagctgatattaaaaaatattgcgtcc

SEQ ID NO: 19833 - DNA, 1617 bp, Oryza sativa
  ref <308>: DATABASE ACCESSION NUMBER: AK070174
  ref <309>: DATABASE ENTRY DATE: 2001-12-06
ggatccggccgctgcatctccggattcgagcggggggcgttgccgcggtgcccggatccggaggaatcgcgccgcggcgggttttctagggttccacaccgtcgcgcgtcccggcgggtgttcatgaaggccatggggtacaataacccctacgattccagcgggactgacgacgatctccctccaacacaaaatagaggattaagagtgcgatcttttagtgcgaatggcagggcatctgttatgccattttcttacattaggccgcacggtgatttggagagtgaaatacatcaggttgagcaagaggcgtacactggtgttcttagagcatttaaagtgcaatctgatgctatatcctgggaaaaagaaagtttgatcactgaactcaggaaagaattaagagtctctgatgatgaacacagggaactattaaacaaagttaatgaagatgtggccatccgcagaatgagggagtttagacagggaggtggatccctgagtgcacagcatcgtggcagcagaatttttcatgatacagaacctggcccagctgcaaagaggcaaaggacacccctttctattccttcacattctgctggcctccagtcccctgcgatgccttctccctcagttccttcatctacaaagtggggaccattttcaggaacaaagggcaagaagactaggacgaatacaccactcgctgtgccatccgcggatccaacttcattgattaaccggaaaatttatacaagatggccagatgacaataacttctatgaggccactataactgactataatcctgctacgggtaaacatgctctcgtctatgacatgggcacagtagcccagacttgggagtcagtcagacttagtgatttggcacctgaagatataatatgggaccttgatgatcaaggcatctcaaatcgagatggttggggtcctcatcctgggatgaggaggcacccaggcaacaacggtacaatggcaatggcaagtaggggaggaggaaggttttctcgaaatgagcctactaaggatagtgctcctccccaaaatggaattaacaggaatattggtcacattgatgtacctaacactcgaagtgttgtcatagaggtggagagggttttgtccaatccaaatatgggtgagatcgaaaaggccaagaaacttttgcaagaccaggagcagtcattactcgatgctatagccagacttgacgatgcatcagatagtgaaagtgaagatatggccgtcggggcccaaatggtttctgctggtgatcacatgggcaggaacggcgttgcttgttagtaacaactggcaaagtgttggattttgaggattgtgtttgtgaaagcgcctgtgtagatcaccggtcaaaagaaatcatcgatggggcattggcatgccaaaaatggatgtactgaacatgtccctgagaagggcctcttcttaggctgcgaaaagttcaggtcacaaggcgcagggcgcctttccttcaatgataacggtggctgtatttgccctctaacatacttgaaggaactctaatcatctagaaatgattattaacattccaaaactgttaaaccctttgccacc

SEQ ID NO: 19834 - DNA, 1019 bp, Oryza sativa
  ref <308>: DATABASE ACCESSION NUMBER: AK070175
  ref <309>: DATABASE ENTRY DATE: 2001-12-06
gagtgccgtgtgaactttcagtgtgtaataaagccaagatacaggagcgataggctccgcggcgttcgtcgccgaaactccactgttcatcttcaacctccagccattcttgtgtgtgagagaaagagagctctgttcttgtgttcctaggctgattccaacagcgaccatctcgactgccacggcggcgacgccttcggcgtggcgctggtgggcaccgacgtcgcgggaaccacgcacgccgccctctactcgtcggcgaccgacgcgtggagcggcccggcctccattgatcaccaccccgacgccttcgtccaggcgagaaggccaagcgtcctcgtggggaacgcgctctacttcctctgtgacaacaacaccagcatcgtcgagttcgacatggccacgatgacgctgtcggtgatcccctcgccgccgctaccggaggatgtgcacggcgctctcctcatgacggcggagggtggcgggctcgggttcgccgccgtgctggagcggtccaacctccacctgtggtcgaagtcgatggatcaatgggagcacctcgaagatgtcagggacctcaagacgctgctcccccggggttcaatctccatgatgaacaatgtgttgatcggcttcgccgacggtggcgttcgtgtggttgtcgtcaggtcgtaccatggccccttcatcgttgagctgggatcaactggaccagcgagggtggccttgaggagaagtggaatctacgctgtatttccctacacgagcttctgcactccagccgccgccacgacgacagaatgatccatccgcttacatgaaactgctgatgctggcttcctgcagagctgatgcttgaagtgctttcttctgataggcaattttagcaagaaaagagttcactaatggtgatcgatttactcagttttgtctcccattttgcagtctgattgagaaaagagttttgtcaattttagcaaccagaagaattcacaaatggtaatcttggtcatgttagt

SEQ ID NO: 19835 - DNA, 2635 bp, Oryza sativa
  ref <308>: DATABASE ACCESSION NUMBER: AK070176
  ref <309>: DATABASE ENTRY DATE: 2001-12-06
ggccagaccgcctctttcctctcccctctccacctcaccgacggcggtggcggcgtcctcgatggcggaggcggcgcggtggcctcgctggcggaggtcctcgaggcggcggctcagatctggacggacggcgacgcggcggcatacgtggcggcggcggcggctcggtcgacgacggcaacctcggcggttgcctcgtcgtcctccgcagatctggagcggcgcacgcggtggtggtggtggtggtcgtcgtcgtcgccaccgacgcgccgtcgtcgtcgccgccgacgccgcgtcgtcgttgcccgcggtggcgcacgccatccccgccagcccgactctccctcttcccggcgcgccgcctaccccaacgtcgagcggcggcgacatcctcgggacctggcgaagaagcggcggcggctgcgcagatttggagcgtcctcgccgtcctcaacgacggcggcggcgccgcggatctgaagacgtggcggcggtggcgcgtcctcgccccgccctcctcaccgacggcggcggtggcgtgtcctcgccccaccctcttcaccggcgacggtggcgtggattggagctggcctcggagtcgcgcgttctcgtcctcgcatctctcatcagtgggccccgcgctctactttttaagcgaggttctcgttccttcgctggtaaccgaagaagctattgaagctatgggacacacaaactttttttgccagcgaggacgaaggaacgctccatgtagacgaagtaacgcccactgtgaagggccttacaatccccttttaaattttttttacaataacctgcagcagaagttttccaaattaaaaggcaggataataaatggttaacaaaattctagatcgaacgaacatcgttttcatataagtggcatctttttttttctttttaccattttaattaatttatttatatataaaatttaatttttctaattccgttccttgcctatattatgattgccactaaatagttaaaatctataaatatggaaattcctaagtgacctgcaaatcacttctgtaaaaatggcattgtttcggatcatttccatcacagtttttattacccatccgttccatattgtaaggctttctaacattgcttatatttatatttatgttaatgaatttagacacatacatatagcattgcaatgctagttatggaaaaacatttttaaaactgataaaaaatggttaaagcaggaacataaagcatctgtgagtgttgggttcggcggtgagcctcccccaacagtgttgcgaaccaaagcgaggttttttcgcgggtctcagaaggggaagcagccaagcttttcccgcgtcccgcgacgagggttttgggtccgccgccacccaccgccgccgccgcccgccagttcgaaagcttgagagatagatggaaggcgaggatgagtctccttctcctggagagaatgagttgcctttgtgggggcatgttaagatattggatgggttcgctcctcgctgtggaacaaacatgaggttcctatgcgactattgcagttgtgtctttcgtggaagctattccacagtgaaggcacatttgcttaaaatttctaaacaaggtgttccagcttgcccaggagtgaccttcaatatcttaatgaaactatccagtgaagttgatgcagcagaagattcaattctaatccaggtgcgtaaaaaaaggaatgtaacagaatcttgtagcagtgactattctggtgacgaaccagaatcttgtagtagtgactattctggtgacgcaccgtgtatgggcaaagttattgtacaagcgaaaagaaagaagggcagagctgaatgtcgagataacttcgatgctcagtttgcaagaatgttctattcttcaggttactaccttaaacttaaaaacttgtatattttccttttgggaacatgcataagtttgcacataacagggtactctgtttatgttgtatccatcgcccttcactttttgttttatcttagcaggcttgtccttcaactctgcaagggacccatacttccggagttcattttcttttattttgaagaatattattcctggttatgttcctcctgattgcaaaaggttgaagacaactcttctgcaaaaagaaagggctcgcattgaagacttactaaaacccatcaaaagcatgtggaggaaggcaggtgtgacgatagtttctgatggttggtcagatattcgacagcgctcacttgtcaacattctggctgtcaatgaatgtggacccatttttctgcaagcaattaacaatgaagatgaggtgaatacaaaggagtacattgcagagaagctcattgctgttattgaagaggttggtccagaaaatgttgtccaagtgatcacagataatgatcctgtttgcagagctgctgggctgctgattgaagaaaaatacgatcacatccaatggatgccttgtattgctcatactttaagtcttgccttgaaggatgttttttctcctaacaatactggagatgttgccttcaaagatagccattggatttctgaagttgtagaggatgcaattatgatcaagaatttcataataaatcataccatg

SEQ ID NO: 19836 - DNA, 1706 bp, Oryza sativa
  ref <308>: DATABASE ACCESSION NUMBER: AK070177
  ref <309>: DATABASE ENTRY DATE: 2001-12-06
gatctccattcccaacccaaacccccgcaaccgcaaatcccgcgctgctagtgctacctagggttcgcctccctcctccctcccaatggccggccctactcctcctccgccggaggaggagccctcctccccttccctgcgcctgcgctgcgcggtgcagcactacgagtggggccgacgcggggaggcctccctcgtcgcccgcctctccgacgccaacgccgacgaccacggccccgaccccgcgcgcccctacgccgagctgtggatgggcacgcacccctccgcgccctcctccctcctcgccgacggcctcctcagggactggctcgcgcgccaccccgccgcgctcggccccgccgtcgccgctcgctggggaggcgacctcccattcctcttcaaggttctgtcggtggccaaggcgctgtcgatccaggcgcacccggacaaggacctcgccgaggtgctgcacgcgctgcgtccggccacctacaaggacggcaaccacaagcccgagatggccatcgccgtcaccgagttccgcgtcctctgcggctttgccggtatccaggaacttaaggacgttttaagaactgtgcctgaagttgaagaccttgttggacctgaagatgctgccaagcttttgtctgtgaaagagtaccatggtgtcaatgaagtaaaatcctgtctgcggtcagcttttactaagctaatgacagctagtaaagaagcggtttctgaagcaattacaaaattgatttttcgcctgaatgctgagagcaaggtaaggaccttaaccgagaaagaaaatctagttttgtcgctggagaaacaatacccagaagatgttggtgttctatcagcatttttcttcaattatatcaagctcagtcctggtgaagcactttacattggtgccaatgaaccacatgcatatctatccggggaatgcattgaatgtatggccacttcagataatgttgttcgtgctggtttgacacccaagtacagagatgtgcaaactctttgctctatgctaacatacaaacaggtctttccagaaatcttgcggggggttcctgtacagccgtatgtaagaaggtacacccctccgtttgatgagttcgaagttgactgctgctcactaccaccaggcgaactggttgtgatatccccagtgtcaggtccatccgtctacctagtgatggccggggaaggcgagatccaggtagattccatgccaaatggtgaaaagtctaaacaaggtgatgttttcttcgtgccagcatacaccgaggttaagttctctgcctctggtcctgagtgcatgcagctgtacagggctggggtcaatagcagattcttcaattaatttagtgactgctgaaagagttccacacacaattgctgtaggtaaaaggtcagtgcttacaaaatacaagtgaaatgatatgactagttagcaaaagttaccatatgtactgtataggtcaacaaaagaataagtcaggttccttcatatcttgattatttgttcttccaaagaggtctataccatagcgttcctcacgcatccagatccatctgaatggagaggattacagagaataactttcagccattctattctattacattgtagttcagaactaaaatgtgaactggtctcaagctttgacaccgaatatagttggaaatacttacag

SEQ ID NO: 19837 - DNA, 2200 bp, Oryza sativa
  ref <308>: DATABASE ACCESSION NUMBER: AK070178
  ref <309>: DATABASE ENTRY DATE: 2001-12-06
gctctctctctctctctctctctctctatccagccatggccgacgagcccctcgacgccgcggcggcggcggcggaggcggagacccccgccaccgccgccgctgccgctgccgcctccccggcgctcctcctccggccgcggcgggtggcgttcgagcacgggctcctcccgatccccaagctggtgttcccggagggcacgctgacgcagaccctggcccagacgaaggagcgcctcatcgccgcggctgggggagacggagacgcctccgcggccccgcgggtgggcgccgcggcgctcgcggaggcgctgcagatcccgcgggagctggcggcgctggtgctcgggacgctcgccgcggtgctccccgcggaggaggaggcggaggacgccgacctccgcgacgtgctcctcttcctctacatccagtcctacaagcgcctcgtcccgcgcgcgcacaaggattcgcccgcggtcaccgacgtgtggccctccacctccgccttcgatggctacctctccgcgctctccccgatccagcttgtacgcagtaacagtcgccggtttatgccttcacaagcagatgaagaagctcatcaattatcttatctgcaaaagcatatggtcaacattctgagtcttttggcagattctgttgatggagagggcgatgagtctatggtattgacagcagagacatttgagcatctcggatttttatttcagttttctgaagggactcctttaagccaagtggctacattttttgcaaattctgatccagacatgcctgctgcacctgttcccgctgctcaggttcatgattggattctgcagaatatagctgcttcattagaaaatacagcagaaaaattgacagcaaaggaaaacagccaacagagtgcatctgatcctgatgtgacaatggctgaggctgtcacaaattcaagaattcatagcagttcaccaactggaactgctgttccaaacaatcaaggacactaccgaaatacaactttcctggagggtttctccaaaacttctgtagtgaaacaagcatcagatatcaaagggcattcaataaaggttttgaactgccatgactctgttatctacatattagctcctgttaaatatgccactgtctatgggtgttctgacactactatcgttcttggtgctgttggtaaggtggtaaaagtggagcattgtgaacgagtgcaaatcattgcagcttcaaagcgaatttgtatcgccaattgtcgtgaatgtatcttctacttgggagtaaatcaccaaccgcttattgtgggtgacaaccataaattacaagttgctccattcaatacttattatccacaattgggagaacatttggtgcaagttggtgtggattctaacatcaacaagtgggaccaaccttttgtgctgggagttgttgatccacatgattcattatctcatcctgcaggggtttctgatgtccaagctgaatctgctacttgtctagatcctgatctattcaccaactttttgattcccagttggtttgaggcacaaggacctacaaaatataatccatttacattgcctgaagtttattgggcatcccaaaggaaaaagcatgtttctctggaagatattcaaaagaatatccgagaattggagcttgatgatactcggaaaaaagaattggcatctgcccttcatgcccaattcaaggactggctatacgcttcaggaaatatccgccagctctactgtttgcaaggggaataaaagcatctggctttcttcaacattcattcgcatgtgcttatatgctccttgaagattatgtaccttcacccgattcccttcaactccgtccatccaaccgcattgtccaagctgactctccaactgagcctgatccacctgttcttcaagccattgttgttttctttttagggaagaatgtaaagaaaaagcgcgatgcctatttttgccaattaattttgatcattcggtatgtgatgattggtggatggactgcaccttgggtttttgttgttgtctttatttatatatcctcgataaaatttgcgaggatgaatagggattactccctttcttttgaaaataaacatttttttcgcttatctgatgaggccatatactgtatttgtactctttatatctgggagaagattgcagtc

SEQ ID NO: 19838 - DNA, 1196 bp, Oryza sativa
  ref <308>: DATABASE ACCESSION NUMBER: AK070179
  ref <309>: DATABASE ENTRY DATE: 2001-12-06
gatcgtaagcagaagaagcgcgctgtccactgtccacacccgcacacgccgcttcccaccacggcggcgctaaaccctttcgaaagaatccccaaatctcccacgctccaaagcccgaaaccctagctcctgttcacatggcgccagggctccagcgcttcaccgacatcgccggggacggcgggccccgcctcgacgccgcctccggcgaggagctcctccgcatggaccgcgccgcctccgtcgccctcggccgccgcgcgccggagcccccgggtaccctgttcgtcaccaccaggagggtgatttggcttagcgagacggagaagggccaaggctatgcggtggacttcctcgccatcacgctccatgctgtgtcgcgcgacctggaggcgtacccctccccttgcatctacacgcagattgacgcagaagatggctctgatgaggaggctggtggatcagatttcgaagcaaatggtgatctgcagctagcaaaagtctctgagatgcgcattatactttcagaccctggtcaacttgatgcacttttcgatgtcttctgccattgtgctgaactgaaccctgatcctaatgctgtgcgcaatgaagagaatggctggtccggtggtgaaaatatggctgagggtgggtggattcatggtgatgaagacatgattgatggaaatgatcttgaagcccacatgttctttacgaacttgataggccaaaatggtctacatgaccttggtcgttctgtacgtgagcttcaaattgatgaccagcgtttcgaggatgctgaggaagaagacgagatccaagaaaatggacattagaagcagaatgttcattttacttgttccgttccttgaggggactatgtcattggttcgtctgtagattaccactgatgctgcttggttcgcaatacttgcttcttctacttcctttccctctttcttgttctataggatcaacatctctagggagcatcgatggtaacttttgtgagaaaaaggtcttgctgctggtcaagaatgtaacttgtagagcatgatggtgaatcgagtgaaattagttcgatacttttgatctgacagataggaggggaaatcgggaaaagaaatatgttctcttttcccttgtatatcatggcactgttgtgttatcatttaggatttaaagatttaaatgcc

SEQ ID NO: 19839 - DNA, 2225 bp, Oryza sativa
  ref <308>: DATABASE ACCESSION NUMBER: AK070180
  ref <309>: DATABASE ENTRY DATE: 2001-12-06
gttatccagttccagttattggcgatgctgccgaccccccgccgcgtcaagaacaaagcaccggcgcccgtgcagctcacggccgagcatctcatccgtgaggcccgcgaactgcacggcgatggatcggtgaccgtctgcctgccggcggagtccaagaagaggaggatcgtcgatgccgacgagctcgccgagcaccggctcgagcgacgcgcacggttcgaggccatcgtccgccgagccggcagcggtcgcggaggatgcggcgacgcgtcgtcggagtggatgaggtacgcgcggtgggaggagtcccccggcggcggcggcggcgaccccgcccgcgcgcgatccgtgtacgagcgcgcgctggccggcggcgcgccggcgtaccgcgaccatggtgtgtggataaagtatgcgcagttcgaggctcgtggcggccgcgtcgggcacgcgcgcaacgtacttgaccgcgccgtggcgatcctcccgcgcgctgaccgcatctggtcggagtacctccgcatggaggacctcctcggcgccacagacaacgcccgcgtagtgttcgataggtggacgtcttggcgccccggcgccgatgcctgggccgcgtacgccgcgttcgagctccgccacggcgagctggaccgtgccagagccgtgcacgagcggcatgttgctgctctcccgtgcgccgacgcgttcatccttttcgccgagttcgagacgaaactgaagaacctggaccgcgcgccccgcgtgtacgagcacgccgggagcctgctcgccgccgccggcgacaacgacgacaccgccgtgctgctcgccgcgttcgccgacttcgaggagcggtgcggggagccggaccgagcgcgtgcaatataccagcacgcgctccgtggcgagccgcccgagccccgcgccgaggagctgcgcgagaagctcctctctctcgagaagcggttcggcgaccgccatggcgtcgaggacagcatcgtcaccaagcggaggtcccagtacgagcgcgcggtgaccacgaacccgctgtgctacgacgcgtggttcgacctcatcaggctggaggagagcgccaacaccggcgacgcgaaccggatcagggacctctacaggcgcgccgtcgccaacgttccaccggcggcggcggcggcggagaagcggcattggcggcggtacatctacctctggatcaactacgccctcttcgaggagctcgacgcggaggacgtggcgcgcgcccgcggcgtgtaccgggagtgcctcaggacgatcccacacaagaagttctccttctccaatatctgcgtcatggcggcggagctcgagatccgtgacaagaacctcgccgcggcgcggcggctcctcggcaacgcgatcggcgtcgcgccccggccgaagctatccaggaggtacatcgagatcgagctccagctcggcaacgtcggccggtgccggattctgtcccagaagttcatcgagcacgctccgagcagcagccacgtatggagaagctacgccgcgttggagaagaagctgggcgagaccgaccgcgcccgatccgtatacgacctcgccgtctctcagccggcgctggacgccccggagctagtgtggacggactacatccagttcgagatcgacgccggcgagctcgacagagcgaggcagctctacgagaggcttctcggcaaaacacaacacctcaacgtgtgggtgagctacgccgagttcgaggccacggcgtgctccggcggcgccgccatcgccgggaacgcggcggagaaggccgagcgggtccggaggtgccgcgccgtatgccgaagagcggacgaacacttcaggggatgcgctgatgatcccgccatgaaggaggcaagggcgatgcttctccaacaatggctggcgaaggaggccgcgttcggcgacctcggagaggtggagccggtcgagaagaagacgccgagaagggtgaagaggaagaggagtctcctcgccgacggcaatggcggaggaggaggatgcgaggagttcttcgattacatttttggtgatgaagaggatgcaacggcagcagctggcttcaaactgatgaaagctgcttacgaatggaagaacagtggccatgttattacttattagagtgtaaatctttctgttctaacaaccttgttgtatgttattgccgtggaattagtttgttaagc

SEQ ID NO: 19840 - DNA, 1967 bp, Oryza sativa
  ref <308>: DATABASE ACCESSION NUMBER: AK070181
  ref <309>: DATABASE ENTRY DATE: 2001-12-06
gatagaacaaccttctcttcccttccctcacctttcgcgttcacctcagctcagctcgtctctctgactctgatctcgccgtcccgagttcgccggacacgcacgcacgcggccacgacggcggcgatggagggcgccctgctctgcgccgccaaccacgcgccgctcacgcccatcaccttcctcgaccgcgccgccctcgtctaccccgaccgccccgccatcgtcgcctcctcctccgggctcacccgcacctggcgggagacgcgtgaccgctgcctccgcctcaccgccgccctcgccgccctcggcgtccaccgccaccacgtggttgcggtattcgcgcagaatattccggcgatgtgcgagctccacttcggcatcccgatggccggcgccgtcatctgcacgctcaactcccgcctcgacgccgccatggcctccgtcctgctccgccactcggaggccaagctcatcttcgtcgactgcgcgctgctcgacgtcgcccacgacgccatccgccgcatctcccaatcgggcgccacgcctcccgtcctcgtcctcatcagcgagctcctcgacgacccatccgatgccaagctcccgtccggtcgtgtcgactacgagtacgagcacctcgtcggcaatgccgggtcgtcgccggagttcgcggtgcggtggcccgccgacgagaacgagccgatcgcgctcaactacacgtcgggcacgacgtcgaggcccaagggcgtgatctacagccaccgcggcgcgtacctgaacagcctcgccgccgtgctcctcaacgacatggcgtccacgccggtgtacctgtggacggtgcccatgttccactgcaacgggtggcgcatggcgtggggcgtcgcggcgcagggcggcaccaacgtgtgcgtccgcagggtcaccgcggccaccatcttcgacgccgtggcgcgccacggcgtcacccacatgggcggcgcgcccacggtgctgagcatgatcgtgaacgccacggcggaggagcagcggccggtggcgaggagggtgacggtgatgaccggcggcgcgccgccgccgccgaaggtgctgcaccggatggaggagcaggggttcctggtgatccactcgtacgggctgacggagacgtacggcccggcgacggtgtgcacgtggaggccggagtgggacgcgctgccggcggaggagcgggcgcggatcaagtcgcggcagggggtgcaccaccacggcctggaggtggacgtcaaggaccccgccacgatgcggagcgtgccgcgcgacgggaagacgatgggggaggtgatgctgcgggggaacacggtgatgagcggctactacaaggacggcgcggcgacggcggaggcgctcgccggtgggtggttccggtccggcgacctggcggtgcggcacgaggacgggtacgtgaaggtgctcgaccggtccaaggacatcataatctcgggcggggagaacatcagcacaatcgaggtggaggcggcgctgttcagccacccggcggtggaggaggcggcggtggtggggcggccggacgactactggggcgagacgccgtgcgcgttcgtgaagctgaggcccggcgcggcggcggcggcgaaggcgggggtggtggaggaggagctgatggcgtactgcagggcgaggctgccgaggtacatggcgccgcggacggtggtgggggtggaggaggggctgccgaagacggcgacggggaaggtgcagaagttcgagctgcgggcgcgcgccaaggccatgggcaccgtcccggcggcggcggcggcgaagtcgaagaggagcaagctctgaatgaatttgtttgcgtcagctgctgacgactgcaatgcaacttcgatgcagcatgcgtgtgtgtgcctgtggaatctcgagacaacaaccaaagaaaaaaaataaaaaaatcatgatttgttgtg

SEQ ID NO: 19841 - DNA, 2969 bp, Oryza sativa
  ref <308>: DATABASE ACCESSION NUMBER: AK070182
  ref <309>: DATABASE ENTRY DATE: 2001-12-06
gatgaaagtgctccatccctaatccacccatcttcctcccggacgcacgcaccgccgtccccccgccgcccaccggattctccaccacctgcgcgccgcggccagcgccgcagtagaccacccgctcgtgtcctccttcaagacgctaggctcgtcttcttcaacgccgcccggccaccttgccctcccctgcgttccctgccgcaatgccgctgcctttcctcgaagccagggccgccgtcaattcgccggcaagagtcaccctctaacaggcggtggccatcgccgatacaaacttcggctagatccggtgagcccacgagagaaagaagggagggggcgctagctagcagaggaggagaggaggcggcgtgcgctggtgagaggtggcatcgcatcagatccttcgccacctgcgcgtcgcggccaatgacgccgtgatgaaccacccgctcgtgtcttccctcaaggtgctgcgccgactcgtcttctcccccgccgtcgtgcccgcgccgaggttgagggaacgtacgcaagcggctgctgtgcaggctcgatgtggagcgcggcgcgagggctgcggccaagcggcggcagcgatgtcggcgatggtcgtgcgggcctaatgtggtggcagggcagggcggacgaggaccgacgatctgggatcaacacggcggcagcggtggctggggcactaggcactggccacggccatgtgaacccaatgtggcagcaactgccgcgccgccgaaggccatgtaaatttgtgctccgcaaaggctccatgaggtgtaggctccacatatgtgaaaacgacggcggctggctctgctgcaaggtttgtgcaattcattctacaattcattctacaatgcatatcttgcagctaggaatcatgatatttcttttaaataattaccattatgtctctcaaaaaaaagtatgcagtatttattgccaataaccttgatttgaaaagggtgaaaatagtttttgttacatatagttatgagttacatatttaaacgcactttattaagtgaaaaaggattgctctgcactggacgcgtttcagattagaagttcagatttgcaagatgcggtttatgggctttcattccattctgttcaaggaacttattttcatggttgctgtcggtctgaatccataaaactcttctatgagatgtagcttactttttttttttgagtcatgtcattgtatcatgcttgctctattaaaatttccatcctcattagctaatagaaagcagatcgtccgatttgaatctgatttccatcgtcaagaaaagcggtgattcacaacctatactcatctactagctagcttaacttatcagaaaattggaaaggacctttatcaaaagctgtgatcatttcctcaacaatgtatgtctatatcttagataatctatattcatgtctttgataatctacaataaatctaactactaaacttaagtaaaacaaagttatggctacctattatctatacatatatatattccaatgcttgtgatatacatactattacaatttcatcctcgatctttaaattctaacttgattaggcactatgtcatactttggcagagttgtaatatcactgaactgaaactttcatatgacaaaaatggccattaatttgtatagatcagctgctgctgcagttacagtgcatctatatgtcatggtgctgtttggctggtgctttaatcagtttgttacatgctgaataaaatgtcatgatctttgtacatgctgtcaaagttgcaaattttagctacatgctgccaaaaaatttcatgatctgtgactctgtgtatgtgctgccatgatgaaattcctaagctgctggatttccaatttctttgttcccctactcaatttagaagaagtaagagttgtggtcaaagtgaaggagcgttctcagaataaatgtgctctactcttttttttttaatcaattagtttctctggttttgttttattcaattccaatattatggcatggcattgatagctcaggaacaacatcaatattcgactgaaactaactacaatatacttgctaaagtgcatatctgcagctaaaacaagcaaaaaagttttggatcttaacgaacaatcatgtaaatagcttatataactgctaaattttattcacataatgctaactaaatttaagttccaaatgccttgctatgttttctttttctttctttcttttttctattgcagattagtgtagcggcttcctgaccaaaggtgtaaagcatcactgctatcaaagtcatttgactgatatctgattgacgtcctcaacggttgacacatactcatcggtcaagtcctcaacgtacatggagttgaataagtttgttgcaatccattagcaaacaccaaatgcagagttagttttttggtggtacaagatggttatgcacatgagcaagagaggcagagagcaagtgaaggggcgcaagcaacgatgtatcacacaactcacactcactggtgctttgtccagcaccaaacctcagcaccagatttttgtgccaataatcacatcagcttgggagatgtcttcctgatgcggtgggcaaaggtatcgagggccatggaaccggttgatagcccgaggagcaagagggatttacaggaggtggaggacagggaacgcatcgcagacttgttctgtacatgtttattagatcattgtgacagagtgacatgttgcactatcaagtaccaatagttggttgggattggaatgatcaaaatgagttgttcatgttttagaaggctgtgtgtttctccattttagtttagatttgagaaggttctaggtttttcctttaaccttttcactctgtttctcgcccaacataactcagtttttctccttttcactctgtttaatttatcaatttctaaatagtgcc

SEQ ID NO: 19842 - DNA, 2575 bp, Oryza sativa
  ref <308>: DATABASE ACCESSION NUMBER: AK070183
  ref <309>: DATABASE ENTRY DATE: 2001-12-06
gatcgactcaaaccgaatccgctcggctcgcatgggcgaccgccaccgctgtcttctgtcggcgccgccctcgccgtcgacagccacagtcgctgccgccaccgggagccaaaatcggcgccgccgccatcgaaatcgattcgatttctctcctttcctcctctcgtgtattttccggccaccgaaaaccctatctcttccaaaaaaatccccaaatcggcgccggctgctgggtctacgggaggtcgccggctgctgggtctacgggagggcgaggcctgctggggaccttgactgccgcatcggcaggggcagccggccggcggtaggtggcagcggcagggcagcatgccgcagcagcagcaggccatggctgtcgcgaggcagaccctcttgttgcatgctatggctctggctctagctatgtcacagcgtgaacaggccctataccgaagctgccgatggaagaaagcaatgtcatagctgcagcacaacagaggtacattttttttgagaatttcagaacattccaaatagaaaggtttaaatttattattgaacttgcagttgtgtaattgtttgtggagttttgattagtctaaaataacaccgctgatactagagtatgttgcacaaaatggtacacgctcaattgctctggacagactattgaaaatactaactccttatattaaaggaattagaacaaagtcattgatttcgactagtatcttggaaggtgtaacatccattagtttatctttttatccttcttctgagcaccccccaaaattgcagctaacttccttctaaaatattttatatcttcctgcaaaattcataaaggtatttgttagatagaaacaatcaattgaggacttgtaaagaagatgcaaaaatatttagtgcatcttacatgcgtgtattccttcgacaacctattgccttgccagtgctccatgttttttagtacaaagagcccacatgagacgctggaagaattgaattatattagagaagtgataacatacatttaggtagtgaaaaaaactattattgtagtggctgcataacatacagatctccttgtaatggcaaattctgtatgaccgtgacttcccaggaagtaatatgatggtcaggccattgtgttgctatgtgcttttcttctggttccaacagctgaaaatattgttgtaatccttctagctgttttgtgagaaaacgtcattactgcggtatgttcatgtcctttttggtttatttctaagtagaatacttacaacttttcttagttccttgcgttgtgtggatgaattcgccatggagtcaagcacttggatgatgcggcgtttggcgtgtatgactgccaggtaccgatgtttttcttttatgttcatggggaggaaaatctgtacaaagaaatcatttgtaggatatattagtagtataaacttgctgaaaatttgatagtattgtggcataaatattaccatatcatgctttagatatctatttgccgttgctttagccattgcccgatcgatgatgtctttggaaacatagtgttcgccatctctttgtagcaaccttgttattaacggtttctctaggaacaccgtaccttctgccctagtccctgtaccttccttcatatctttctcacgtagacaagtaacgtatgcatcgattatttaaaagtagaggaaaatggcaggttatgattgtgctagtagttgcatgagagaatagtttcacgggttagtaaacttacgtgatcatccaaatagctcgtacttgattcagtcactggattagtcagaatttgcattgttttttgggaaattgagacatcatcgatatgcaccactagttgtgattctggtgcactcattatacttttaatggtttcctcatcttctgcggtgcacttgaactctgccattgaagttaaatctgtaagtgaactgcaacacaaaaattaagcagagtaggatgtgatgataattataggacttttaccattggatattaaattctttgcttgcgcattctttggtttcttctttgtagcccctaaattgtagatgaaatcagaatttgatttaattgttgatttacgcaatcttcatgttgatcctgaaagtgacttggcaatgacgggcgtttgagttggtgggtttggtttctgctattcaattggcattttaaaaataattagtattaaatttgacagacactgaagaagtaagatgttgtcttaccttttttttaattatatgtgtttctttgtcgaaacttttgcaaacatttggcttagagttcttggaagttggtattgtcttttcctctttgaatgcagctattatgttggtgagtgattgaatttggttatgcatggactgttgattctgcttcatctccttcatctcctttccttgctcttctatcagcatgattagttttcgggtcagtgactcagtttctggcctatcctgcataatatgtgtttgttaagttttgagacatatgctgttgtaattcaaataaatagtaacaaaagtataattttttg

SEQ ID NO: 19843 - DNA, 1210 bp, Oryza sativa
  ref <308>: DATABASE ACCESSION NUMBER: AK070184
  ref <309>: DATABASE ENTRY DATE: 2001-12-06
gtaggcccccggccaagtgacgagcaaaacccacccaaaaaaaaaatacagcggagacgcgcgacggcggcgcagttccccgctccgccgctccgtgctccgacctccggcgaccccgggcaccggcgagtggccccgacggccatccagcttgtcagcattattaggcctcgaaacctaccttccacatccacgccattcttctccgcctcctcctcctcctcctcctcctcgggttcatcggcccgggtaacctcgcggagagcatcgcccgcggcgtggcggcgtcgggcgtcctcccggccaccgcgatccgcaccgcgccacaccgccgccccgagcgcgccgaggccttctcatccatcggagctcacatcttggagaccaacgcgcaggtagttgatgacagtgacgtgatcgtcatctctgtgaagccgcagatcgtaaggcaggtactggttgagctaaaacccttgctgtcagaagaaaagcttctggtgtccattgctgctggcatcaagatggaagatctgcagggttggtctggtcatcgaagatttattagagtaatgccaaacacccgttcagctgttggacaagcagcatcagtgatgtgtttgggggagatggctactgagaatgatgaaaaccgtgtaagaagtttattcagtgccattggaaaagtttggacagctgaagaaaaatattttgatgctgtaactgggctaagtggtagtggcccggcttatattttcttagcaatagaggccatggctgatggtggagttgctgctggtcttcctcgggatcttgcacttggtcttgcatctcagacagttcttggtgctgcaaccatggtaaacaagactggaaaacatccgggtcagctgaaggatatggtcacttccccggcaggaaccaccataactgggatacaagagcttgagaagggtgcattccgtgggacgctgataaatgccgttgttgctgctacaaagcgttgccgtgaactttctcagagttaatcctcttgttagttgttagtccattggatgtgcgactctgcgcacgatttcccctagggaagaggatgtgcgaatattgatatttaaacctgatgaggctatcagcaaattttgcttgtagttttatccgaataatttgctgcactttagtggcacgaaatctggatgatgttagattgatactc

SEQ ID NO: 19844 - DNA, 2495 bp, Oryza sativa
  ref <308>: DATABASE ACCESSION NUMBER: AK070185
  ref <309>: DATABASE ENTRY DATE: 2001-12-06
ggggctttagagagagaaaggagagagagagagagagagagggagagagaatggccgcggcggcgcgggaggaggaggaggcgtcgacggcggcgaggagccggcaggagagcgagggggaggaggaggaggtgatggcggtgctggacttcgacatgctgtgcgcctcggtggcgctggcggcggagaggaggaaggattcggccgcggcggcggcggccacggtggaggccggtggtggaggaggcggaggaggaggaggaggggtgcagaggatgtgggaaggggacgtggtgctggattgcttggaggacaggcgaatcgcgctcgaggccgcgtgctgcccatgctacaggttcggcaagaacatgcggagagccaatcttggatcttgcttccttcaggtaaggataacactctcaccatcatatgtccatattcgtccatttctacctgtactttttctttgaaaagattctggtcaaaaactgctctcgaggtaaacatgtaaaaccacctgaggttacttgctattgctattgataggaactaggaaaacctcctatttggaacatgctttgagtcaattttagaatgtaccattaccactggtgaatattattacaccgaatagattttttcatcactgatgtattgcctattagggctgagaaaaaaatgtttgttgtgtacttgtgtattttgaactgtgcatttctgtatttttaccttcttgcttctttctttagtttacatgtaatctacaagccataggtttatgttgtaatttctcttgttataccactgacagtttcttgaaatgcgggcccttatcagcaaagtcgtcctttccatagtcctatccttgagttgttaatgcaggacatgtttgacttgtcaatgtgtgctacatttgcttacacaattatgtatgtctgtggcatgtcttaaacctagtcagcctgataagcatcatgctttttttatttcaaattgtgattcattctgtataggataagttctagtgagatgttctttacttatattatatggtactgtgaatcagactgcacgttggacttgccaatattttactcatttaatagccatttcagtcttgaaatactaaatataaattgctatctcagttcttatgtaaaaaatgttattggaatttattgcatcactctatattacatatgtgcatcaattttcttgaaattatcctttgttcataaatctgacagaagattaaaattgtttcaggccatggtttacttaatttctttagtggctattctggttagcctaatcgccttttctgtcacaaggcataatatatatttgtatatgggacttagctctgttctcttgatagcaatctatactggttacttccgaagaagaatcaggaagcagttcaatatcagggtacgtatttcttggcattaccatttttcatttaaagcattgaaacaggttgttattgtgcagcctagtattagtgcttaactgcttaatgcagttggttgtctcttcttttcatttgcatcacacagtatggctatgaatgcttaactcaaacaaatgaaaactaaatcctgctggtcttgatagtttggactttggatacctgccatagttatgttgtcaacatacgggtagatataaatatgagcacttcaatttaggaattgccaagcacaaagtttggagaaaatccagccatctcattgactgtctttttttgtgattaagctgattgtgcaccttcgtttcttttccttgacttttttttcctgatacagggcactgatagcagtctagatgactgtgttctccatctcatttgtccttgctgtacgctatgccaggaggctcggacgttggagataaataatgtccagtgcggtgtctggcatgggcggggtgataccatttgtttaggaagcaacggtgaaggaaataaggcttttgctgctctacacaagtcctcttttgtgcctataaaatctcctgaggtgtgtggcatggacagaacatcaaatggtgctaatgagcatgaaccactcgtcccatcagatctaccagagcagtaggataatagcagttggcagttgtattgcatatacccttttgcacaaattcgaattgaaatggtgaaaattctcaagagaattggtggactgtccggcaagaaaataatctgtactgcaattacaggcctgtttgttgtatcaagcctgaaaatttgtattggcgctggcagcaaccatatgtgggtgataggtgcaagtgcaactgggttgttgtaaacttaggtgatagttctcatcgtgtatttggttttatttagtctcaagtcggtatctatattatatcatgatgctcaaggcttatgatgaatccaagtgtaaatttttctggctgttacatagtgtttcaacttccaactttcagggacaaattgacatgaatcaaatgaaatgtcatcc

SEQ ID NO: 19845 - DNA, 908 bp, Oryza sativa
  ref <308>: DATABASE ACCESSION NUMBER: AK070186
  ref <309>: DATABASE ENTRY DATE: 2001-12-06
gactcggtgcgtgcgtgggtcacttgatcactgaagcgcaccagctaagctcaccgtcttcttcctcgccgtcgccggaggccggagcaatgccgacggtgcggcggcgccacccggacgtgcacgtgaaggcgctggagggcatcgtgtcggccaacaccttcttcacggtggccgtcttcatcggcatcaccggcaccatcacgccgtcgtcctcgatcccccccaactgcgtcgccggcgacgacatcgccagcaacttcttcctcttcgagatcctctccttcggcttctacctgctctccagcctggtggcgcagggcatgaagctggccgtcaccctcctcgccaccgacgacttctacggcgacggcgagcagaagcccccgccgtccgacgactgcgaggagatgcccgcgtggcgcgccgccgcgccgcgggagcgccgccgcgccgtgctccggttcgcgcggccgatgatgctgctcgcggcgggctgctccatcatgggtaccttcttcctgctgctgtccatggtggacgccatccagctcaagttcggcctcgtctcctgcaacatccccctcgccgtcggcaccaccttcgcgctcgccgtgctcgtcgtcgccggcctcgtcttctacggcgccaccgtcgcctacgcgctcacgcactacctgccctgatcatcaatcactccactcatcagttaaattaattagttactcctccttcctcttctgctgcttaattattttcagttttgatttttgcatgaaatgtacagatgtctttgatttcttggtcagatgatgatacgaatgagagagacttcatcatattaagcgtcgatatgattggattcttgttgttttcgtttgtgaaaagtggtgcgaaagagtaggttt

SEQ ID NO: 19846 - DNA, 1121 bp, Oryza sativa
  ref <308>: DATABASE ACCESSION NUMBER: AK070187
  ref <309>: DATABASE ENTRY DATE: 2001-12-06
gatccatctcaccaccaaaaaaaaaaggaaaaaaaaacaaaacacaccaagccaaataaaagcgacaatgggatcgctcaccaccaacatcgtcctcgccgtcgccgtggtggcagcgctggtcggcggcgggtcgtgcggcccgcccaaggtgccacccggcccgaacatcacgaccaactacaacgccccgtggctccccgccagggccacctggtacggccagccctacggctccggctccaccgacaatggtggcgcgtgcgggatcaagaacgtcaacctgcctccctacaacggcatgatctcctgcggcaacgtcccaatcttcaaggacggcaggggatgcggctcatgctacgaggtgaagtgtgagcagccggcggcgtgctcgaagcagccggtgacggtgttcatcacggacatgaactacgagcccatctcggcgtaccacttcgacttctccggcaaggcgttcggcgccatggcttgcccggggaaggagaccgagctccgcaaggccggcatcatcgacatgcagttcaggagggtgcgctgcaagtaccccggcggccagaaggtcacctcccacgtcgagaagggctccaaccccaactacctcgccgtgctcgtcaagttcgtcgccgacgacggtgacgtcatccagatggacctccaggaggccggattgccagcgtggaggcccatgaagctgtcgtggggcgccatctggaggatggacaccgccacgccactcaaggcacccttctccattcgcgtcaccaccgagtccggcaagagcctcatcgccaaagacgtcatcccggtcaactggatgccagacgccatctacgtatcaaacgtccagttctattgagatcggacggaaacgatcctcctaatttatttccctattaatttgttcaaatggtttccttctataacctatatttttcccgttgttagaaatggttccatttcctcctacagcttactttaagatagttgcgcttgtatatctgcgccatcttgtaagttgtaagatgctgaagaacactatgaattctgagcatctgattctccgggaagatttactatgataaacaacagtttgatttacg

SEQ ID NO: 19847 - DNA, 1149 bp, Oryza sativa
  ref <308>: DATABASE ACCESSION NUMBER: AK070188
  ref <309>: DATABASE ENTRY DATE: 2001-12-06
gaactccgatttcctcgccggcgcagcgccgcaggttgggtttcttcctgcgcaagttggtgtcgccgcgagctgaagccgagccgtccgctcgttctctcgcttcgctcgctcgctcgcgtccctcccaaattcccccaaaataattggaaccccactccgccaccggtgcggccgcggcggcgccgagatcggagagagagagagatggtggtgcggcggctgggcggcgccggccgcgcgctgctgtcccgccaggcgctctcgctgcccaacctccgccgccgcgcgtccaactcctgggccgccgtgcgcgacaccttcttctccaccaaggaagtgttcgagagccaccgcgtcgtgttcaccgtcggcacatccatcgcctccgtcctcaccgcatgggccggttattctttgcggcacatgcaacaatcaaggattgataagagacttaactcaattgaacaatctctgaaggatactcacaaagtcgaacatgaagagattaaaaagattgtcacttccagtaatatcagcactccagcctgtgtagccactgcattgacaacttcagttgtcgggtatgcgctagggtggcggggtggagcctggtacgctcggagaggcttccgaagagagcaacagaagctgatgggccaaatcaattcacaccacagatggcactggcggcctttcagtaaactcaaaaacagactcagaaggaaccgaccagcggccaagactgtcgaggcccctcggttgacaggcgaaagcaccatctgaaaatgttaacagtaactctcaggcagcaggatgtgcatgattcctctgaaatacagatgaacatcgatgcccatgtgcctgagaatagaaaccaaagaagcctgttcatatgactggcagacgttccaaattttgcaggattggaacatccttttcaataagattaggatcggaactagggagattatcttcctaattctcataggaaaatgccttgcgctgatgttaccgtttactactagccaggctgatatttgtcatttttgtcatgctgttttccctttcaaaatgtgcctgcctcgtcgaggcattgcacctgtaattcgtcgatggacacatgagaatgcacaagcatttgttggc

SEQ ID NO: 19848 - DNA, 1338 bp, Oryza sativa
  ref <308>: DATABASE ACCESSION NUMBER: AK070189
  ref <309>: DATABASE ENTRY DATE: 2001-12-06
gaccttctctcctcgctctctctctctcttcctctctcgcttcgcttttctcccccaaatcggatcgaacaaaattcgtaaattaatctcataaaaacacacacgaagcgaacggattcgaagagagcttaacacgagacggcttcgatcgatcccgttttggggagctaatcgtgtggtttttgttggattgttttttttgggtgttaatctagggttagggtttcggatctggacgattagtccccaaatccatccatgaatgaccccatgatgcggccaccggcgcagcagccgccgctgcagtaccagatgtggccgccgccgccgccgccggtgatggagttgccggtggtgttcgtcggggtgaagccggtgaggccggcgtggaagcgggtggcgaggcagccggggtggaagcagcggaaggcggcggcgtcggcggcggcggtgggggcgaggtggggcggtgcggcggcgccccgcaacacgacgtcgtacctgatccgggccaagcgggcggggggcgtggcgtcgctggtgtcgccgtgccccgtcacgccggccgtgctgccgacgccgcagctgtcgccggcgcgcgaggtggtggtggagatggccaaggagaagtggggcgtcgacgggtacggctccatgaagggcctcatccgcctccgctcccaggccgccgacgccggtggcctccccggcgaggactccggatccggcgagagcgacgtggaggagcacgtcgaggtggagcgccgcctcgaccacgacctcagccgcttcgagatggtgcagctccccgtcgcggccggcgactgcgaggacgacgaagacgacgacgacggcgacgaggcccgcaccgcgcggctggaggaggagaacctgaccctgcgcgagcggctgttcctgatggagcgcgacatggacgacctccgccgccgcctcctcgccgtggaaaccctctgccgcgaccgccaccgcgacggctgcgtggtggacgctgccggcgtcgtcgccgaggggacggtgctctccgagagcgtcgccggcgccgacctcgccggagtcggagacgacgacggtgacacggcggcggacgccatgaaagcgtgaagcagacaagggcttgtactactcaactgtacataggtttccgggtttcccctgtgcagatgttgatgtgaagagtaggcagaagcagctttagcttagaaattactcttcttctttgcatccttcctgtggtttaatcttgatttttgttattacttgtttagcagcagcttgatcatctctttgtagtactagttcggttccatttcttcttgt

SEQ ID NO: 19849 - DNA, 2118 bp, Oryza sativa
  ref <308>: DATABASE ACCESSION NUMBER: AK070190
  ref <309>: DATABASE ENTRY DATE: 2001-12-06
gattcccattccattccccaaaccaacccaacccaccaccaccaccaccggcgccgccgccgccgccgcctccccctcacccccattccttcctcgccgccggcgccatgcccggcgcggcggtccacgcggtggacccacggggcggcgcctccccgccccccgtcgccaaggcggaggcggcgacggctgcagcggcggcggcgggagggtgcgagccggcgcggaaggcgggggcggtgaccatggagcacgtgctgctggcgctgcacgagacggaggcggagagggaggcgcggatccgggagatgttcgccttcttcgacgtggacgggcgcgggcagctggactacgcgcagatcgaggccgggctcgccgcgctgcagatccccgccgagtgcaagtacgcgcgggagctgctccgcgcctgcgaccgcgaccgcgacggccgcgtcgggtacgacgacttcaggcggtacatggacgacaaggagctcgagctctaccgcatcttccaggccatcgacgtcgagcacaacggctgcatcctccccgaggagctctgggacgcgctcgtcaaggctggtatagagattgatgatgaggagcttgcacggtttgtcgagcatgtggacaaggacaacaatggaattattacttttgaagagtggagggactttcttttgctatatcctaatgaagtaaccattgagaatatttatcatcactgggaaagagtatgtcttgtagatataggtgaacaggctgttataccagaaggcataagtaagtcggtcaatgcaagtaaatatctgattgcaggagggattgcaggtgctgcatctcgtactgcaactgcacctcttgaccgccttaaagtgatcatgcaagtacagactacacgaactacagtcatgcattcaattaaggatatatggagccagggtggcatgttagcattttttagagggaatggattgaatgttgtgaaagttgctccagaaagcgcaataagattttatgcctatgaaatgctgaaagaatatattatgaagagcaaaggagaaaataagagcgaagttggtccttctgaacgtcttgtagctggtggtttggctggtgcagtagcacaaacagcaatttatcccgtagatttagtgaaaacacgactgcagacttattcatgtgtggatggtaaagtacctagtcttggtgcattgtcaagggatatattgatgcacgagggtcctcgagcattctatagaggtctggttccatctttgcttggtattgtcccttatgccggaattgatcttgctgtatatgagacattgaaagacgtatccaagacatatatcctgaaggatagtgatcctggtcctctagtacaactgggctgtgggactgtatcaggagccttgggggcaacatgtgtttaccctttacaggttatcaggacaagactgcaagctcaacgagccaattcagaatctgcatatagaggtatgtctgatgtattctggagaacgctacagcatgagggtgtttctggattctacaaaggaatcctaccaaatcttcttaaagtggtgcctgcagcaagtattacctacctagtgtatgaagcaatgaagaaaaatctctcccttgattgaattacggagctgtttggcaaatcggccatcatttattgacatggctgactgtagagataatgacgatacatgattttactggttaagtagctacttttttgaagtgcaagacggtgccttcaggacagaatttgaagctatggtggcatctctcttaattttcatttcccagaaatgaagcgataaccatcagatcattgagacatctttgctggcgtactggtacaattcctaactgtcatgttatatcacaacagttatacttgacatgcccttctgttctttataacaactcctttttgtacatacacaactactttatgctgctgcacatacttggaagtgaatagtgaacaacatagcttatattagcagccacagcgactagagctgatgatgtttcttaggagttagcttatgtaattatgcttaatcagcaagcttgaaaactgagcattttgtc

SEQ ID NO: 19850 - DNA, 880 bp, Oryza sativa
  ref <308>: DATABASE ACCESSION NUMBER: AK070191
  ref <309>: DATABASE ENTRY DATE: 2001-12-06
gagttcgcagcaccgaggcgatattccccgtcccccatcattttctcccatttcttgatttcttgtcattattattattactatattccccaacacctagattcccttccctggtggttgatcgatcgatgcgcccagcccacatggccgcgtgccgatcgccatcatgacattgccatggcggtgatcgccgccgccggaggggagggggacgcgggcgtcatcgcgcatgtggtggtcgacgtcgacgagagttgtgcggcggcggcggatgatgatgatcgcagccggcgcccgagcacgggctgcaggatttgccacctcggcggcggcggcgacggcgagatggcggcggagagcgggagcgggcggctggtgaggctcgggtgcggctgccgcggcgagctggcggcggcgcaccggcgttgcgccgaggcgtggttctccgtcaggggcaacaggcgctgcgagatctgcggcgagacggcggagaacatcaccggctggggcggcggaggcaaggagttcatgaagcggtggcacgcgacggcgggcgtcgacgtcgaaggctcctccaaggcatgcagcggcttctgcaagagccactcattatgcaatctcttgattgcgtgcttgatcattgtaatcgtcttgccatggttgctccataatcatgtgctttgagatcctctaaattgccattttggataaatcattttcagctattcagatgagatggctattttagggtgtgtttggttcacagtcatgcatggatgggaccatattttgttggatacgacgatccaattttttatttggtttatatagatatagcgatccaatttcttgtttggttgaatgaatatagcatggatgg

SEQ ID NO: 19851 - DNA, 2914 bp, Oryza sativa
  ref <308>: DATABASE ACCESSION NUMBER: AK070192
  ref <309>: DATABASE ENTRY DATE: 2001-12-06
ggtccctcccgtcccccgtctcgccctctccctctccttctcccgcctcgcgtcgccgccgccgccgccgccccgcgcgccgcccctcctccctctccctcagccatcctcctcctccgccgccggtccattctccgcccttcaccgcctccgttgccggccaccactgcccccgtccacgcctcgcgtcgccgcccccatccccgtccccgccccgtcgctagggtttcgtcacgagcgacctcccgccgtggaagcttccaccttcctcctcatccttgtcctcacggccgcggcgttcgcggcgtaggcggcgggggacgggtgcagcgccggatgcgagctcgcgctggcctcctcatcctcgagcgcctccaccccaatactttcttcgtcctcgcctcgtcgcgtcgctctgtcttctcccctccctgcctcttcggttgatgtcttcatttcttcccctttcgtgcgaatgggaccaacggcggatcaagcgagggcgccgcagatcgactggcggcacagcttctccccatcctttggtgctgcattgctggtatcatcgtcgtgtttcccgctgttggtgcgtgtctcacggagaaagaatggattggagtaaatcagcagcggtgtggattgtgctctgacctcggcaggggcggatacaagaacacagcgatgagatccggtgcggtttgtggcggaccaagcatgtcggccgatggagatggttctctgcatctacgcattccccaccaacatgccgcccttcagtgattgttggggccaaacctatggtggctagtcgctgaggtggtgtcattaatggaggcaaagagtggcaagtggtgaccaaagcggaaggacctggtgtgttgcgcgtgcgccggccactggcggtgcgaggccacggcgacggtcatgctgccattatccaaggcagtgacagcatgtattgacgaacgcaatgtgcttgctggccgaatagacatgaacacatatcactgagagggagtgaaacagtgttgacgagtagcctgcttttgggtgatagaaatagcattgtagtagggtggtaatagcaagaagccgaaaggtaaggatcaggctataacgttggggcattggcaactcaattaaaaggggtagggtagttgtctggttgttcatgttctgatttaactcattagtgttgtgctaaatggaaggtcaagctgctctacatgcaggcaagaacagacaagcctgaaaatttttgtggcaaattcttagctcaacctgaaattccgaagctgaaatctgtattcagtcttcaactctatgctccgacgacgctggcgccggctcacgacttctggctgctgcggtgtgtgagagatcactcagtagcaagcaaggaggcccaagcatgccacttgtccagccttttatcagagatgagatgcttcccagtgggttcttgatccgacctagcgatggtggaggcagcgtgatacacatcgttgatcatatggacctggagccttggagcgtgcctgaagttgtgcgacctctgtatgaatcttctgccttggttgcgcagaagatatcgatggcggttgcctacaaagatacccgttctgtgatcacaggatggggaaggaagcttgcggctttgcatgctctgagccaaaaagctcaccacaggcttcaatgaagttctcaatgggcttgcggatgatggatggtccgtgatcgagagcgatggcatcgacgatgtttgcatctctgtcaattcatccaaagtgaccggttgcaatgcaacattcagcagtggactcactattgtcagtaccggtgttctttgtgccaaggcatccatgctgttgcaggatgtctctcctccatcactactgcaatttttgcgcgaacaccagtcacaatgggctgacggtgaaaccaaacttctgcaatttacccatgtctcgtcttggaggattcagtggtcaggtcatacttcctttagcacacacttttgaacctgcagagttcctggaagttatcaagctaggaaacaccagaaactaccaagatacactggtgcagatcgatcaccggcgacgagagacactctcactgaacgaagctacctagcttaattacctagctactcgatcgatcatcagtctagatatggcggctttgaacggtaaggtggtggtggcggtgatggtggtggcgatggtggtggcggcgccgggggcgtcggcggcgatcacgtgcgggcaggtggggtcggcgatcgcgccgtgcatctcgtacgtgacggggaggggcggcctcacccagggatgctgcaacggcgtcaaggggctgaacaacgccgcccgcaccaccgccgaccgccaggccgcctgccggtgcctcaagaccctcgccggcaccatcaagtctctcaacctcggcgccgccgccggcatccccggcaagtgcggcgtcaacgtcggcttccccatcagcctctccactgactgcagcaaggtcagctagatcgattaatcctgcttggaccgaccgatcgatatatcgatcgatgctggctcgcagttgatcaactagccaaaataatagctacagtaaaaataacagctggggcatatcaatgcagcgctggtcatctctctctctatctctgtatactttatgttgcacgctccgtgcgtgcatgctatcttaattttcttgactctgtacaccgctctgtgtacgtgtaatcctacgttgatgaattgcatcttgtccagacttggacctagctaactacgtactccagcttggcagcttcttgccgaggcaatctgtagtaatttccttgttacattcccctgtcccctctactccctctatcccataaaaacaaacctaatatact

SEQ ID NO: 19852 - DNA, 2437 bp, Oryza sativa
  ref <308>: DATABASE ACCESSION NUMBER: AK070193
  ref <309>: DATABASE ENTRY DATE: 2001-12-06
gagtccccggcagtgcacgatcccatccctcccgcatcggcaaggcaccgccgcgccgaccgctctccgcaccgcgacgcgacgcgacgcgaggcgaggcgaggcgagcatgaagcccctgggcgcgcacggcgccgacctgctctgcggcccgcgcgtcctccgcgctgcggccctcgccttcgcctgcgccgccgccttcctcgtcggctaccactggtccgactcctccccgcgcctgctcttcttctcctccaccgcctcctcctcctcctcgccgctcctctccaccggctccccttccgtcgccgtctcccccaacgccaacctctccttcgacccctccctgatccccacccctgccgcctccacgccgcctgcttctcctactgccaatgcctcgcccccaccttcgctgccgccgcctcctcctcccctccgcccccctccccctcccgcccgcctcggcatcgtcggcgaggacggcgcgatgcgcgacgacttcgacgtcgtcgtcggcggcgccaacgacaccgatctggccgccaccgacgaggccctgccgcaggagccgaccgacgcgggccccgccgtcgggagcagggttcggattgggaggttcccggtttgtcctgagagcatgagggagtacataccctgcctcgacaacgaggaagagatcaggaggctgccctcgacggagcgtggcgagcggttcgagcggcactgccctgccaaggacaagggtctgagctgcctcgtgccggcacccaaggggtataaggcacccattccttggcctcggagcagagatgaggtatggtttagcaatgtacctcacacgcggttggttgatgacaaaggagggcagaattggattagtaaagctaaggataaatttagatttcctggaggaggaactcaatttatccatggagcaaatcaatacctggatcagatttctcaaatggtaccagatattgcatttggctctcacactagagttgccctggatgttggctgtggagtagcaagttttggtgcatacttactttcacgtgatgtgttgacattatccatagctcccaaagacgttcatgagaatcagatacagtttgctcttgagcgtggtgtgcctgcaatggcagcagcatttgcgacacaccgattactatatcccagtcaagcatttgacttaatccattgttcacgctgccgaataaattggacccacgatgatggaatcctgcttctggaggttaatagaatgctcagagccggcggttattttgcttgggcagcacagcctgtttataagcatgaagaggctcagcaagaagcatggaaagagatggaagacttcactgcaagactctgttgggagcttgtgaagaaagagggatatattgctatgtggaggaaaccattaaataactcatgctacatgaaccgtgaccctggggtcaaacctgcactttgtgatcctgatgataatccagatgatgtctggtatgtcaatctgaaagcatgtatcagccggcttcctgaaaacggtgatgggctgactccctttccatggcctgcacgtttaatggagccaccaaaaaggcttgaaggtgttgaaatggatgcacactcatcaaagaaggagcttttcaaagcagaaaccaaattttgggatgacattgttgaaggttatattcgtgtttttaagtggagaaagttcaaactccggaatgtattggacatgagggctggatttggagggtttgcagctgcattgattaatcgtaaacttgattgctgggtgatgaatgttgttcctgttagtgagccaaacacactgcctgtaatctatgaccggggacttcttggagtggctcatgactggtgtgaaccatttgatacatatccaaggacatatgatctgctccatgcgtttagcctattctcgaaggaacagaaaagatgtaacatctcaagtatcttgctggagatggatcgaatactcagaccaggcggtagggcttacattcgtgacctaaaacaagttgtacaggatgtcaaagagataacaaccgccatgggatggcgatccatcatgcgtgacaccgcagaaggcccgtatgctagcaggaaggttttgatgtgcgacaagccgatggtgcgttagccgatcaggctggtccagagcaatgatgcgagccctggttttgttttccggagccttttgaactgactaccacagctactacggactggagattgacatctgtttcaatacatagggataggtgaatgccaaagttgtaactaatcaatttgattcgtcattcgtttgtacaacgactgatgtagcccctaacgattggcttgtttttgttgtatcatccacacaacagtaattatgaataggagttaggaaggtttttgagcg

SEQ ID NO: 19853 - DNA, 1930 bp, Oryza sativa
  ref <308>: DATABASE ACCESSION NUMBER: AK070194
  ref <309>: DATABASE ENTRY DATE: 2001-12-06
gagcttaatctcgagcgcttcgagttcgatctctcgtgaaggggacgacgagggcattgtctccctcctcgcgcgcgcggagtcgccgccgccgccgcctcgtcctcggccacgcggaattgcgtgggtcctggttgtggaagtcaggaagtgaagaagaagaagaagaagtgaactagtgaagcctggggcaagccatgatggagaggtcgctgatggaggcgctggctacggcggcgcagggaggcaccgtggggacgtcggttttcgacatgctcaagtacgccgtgctgcccattgccaaggtgtttaccgtctgtttcatggggttcctcatggcctctaagtatgtcaatatcctccagccgaacggccgcaagcttctcaatgggcttgtgttctcgcttctacttccttgccttatattttcccaactgggtagagcaatcacaatcgaaaagatgctgcaatggtggtatattccagtaaatattgttgtaggtgcagtgtcaggctctttgattggctttgtggtggcttctatcatccgaccaccttatccatacttcaagttcactgtgattcacattggaatagggaatattggaaatatacctctggttctcattgcagcattatgtcgagatcccacaaatccttttggtgactctgataaatgtaatgaagatgggaatgcgtatatctcatttggtcaatgggttggtgcaattattgtttacacatatgtgttcaagatgcttgctccaccacctggtgaatcctttgatagcgctgaagaagatattcttccaattaaggcatctggagataatgtggtgcctgaaaaagggaaatatccaacaagcactcgcactagtactgtacctgaaaatgagcctttgttatcttctgaaggtgataaaaatgtttctacttctctaggatcgaagataatgggcattgttagaagcatggttaagttcctaaaagacaagcagcttcttcagccaccaattattgcctctgtttttgcaattgccattggtgttgttccagtcttgaagaattttgtcctcactgatgatgcacctctgttcttcttcacagacagctgtctcattctaggggaagcaatgatcccttgcattttgcttgcagtggggggcaatcttgtcgatggtcctggtgaaggaagtaacaggcttggtgtgcggacaaccgttgctattatttttgcacggctcatcttggttcctcttgctggggttggcatcattgtgttggttgataaacttggtttcattcctaaagatgacaaaatgttcaagtttgtcttgctactgcagcattctatgcccacatctgtgctgtcaggtgctgttgcaaacctgaggggctgtggaaaagaatctgctgctatcttgttctgggtgcacatctttgctgtgttctccatggcaggatggattattttgtatttgagcttactcttctaagtacgtcataccctgatgctatactgcacaggaacgtccataagatcaaaatatcaccagatataccagaaaaagatagtaccatgacatgtacattagccagtaaaccatggcgacagcctgaaggatgggtgcccgacatccacccacgcacatacatgaatgccaaaatcaaaatatttgcctgcaagctcatgccagcggttcctagtatgcatgtgggtcatgtagccttaactagcattggtacttccagatccagtgatatcagagtacatatgtgatctctccatgtgcttatagatctgggaacctgcagatctgaagttctgaacccacagttttcattcacttttaatcttttgaatctgaaggagagggagattcatgattcatcaccgtaccaaaaaaaaaggtgagagatttctatagtg

SEQ ID NO: 19854 - DNA, 1762 bp, Oryza sativa
  ref <308>: DATABASE ACCESSION NUMBER: AK070195
  ref <309>: DATABASE ENTRY DATE: 2001-12-06
gagtcgctcactcacactcacactcactctctctctctctctctctctctctcgacatgagaggcgccattgctgcggcggtgtgcgccgtgctgctgctgctggtcggcggcaatggcggcgggtggtcggcaatggcggcggccaccatggaggaggacaggatcgtggcgctgcctgggcagccgaacgtgagcttcgcgcagtactccggctacgtcacggtggacgccgccaggaggcgggagctcttctactacttcgccgaggccgagctggatccggccaccaagcccctcgtcctctggctcaatggagggcctggctgttcatcagtgggagtgggagcattctcagagaatgggccattcaggcctagtggcaatgtgctggtgaggaatgagtatagctggaacaaagaggctaacatgctgtatttggagagccctgcaggagtgggcttctcctactccactgacccttccttctatggtggtgttggtgatagcaggacagctagggacaacttgagattcttgcaaggctggtttgccaagtttccgcagtacaagggcagggacctgtacattacaggagagagctatgctggccactatgttccgcaattagcgcagcgcatggtcgaattcaacaagaaggagaagctgttcaatctgaaaggcattgctctgggcaacccggtcctcgagttcgccaccgacttcaactcgagggccgagttcttctggtcgcacggcctcatctccgactcgacctaccactccttcacgacggtgtgcaactactcgcgctatgtgagcgagtactaccatggctcgcttagctcggcctgtgacactgtgatgacccaggtggccagggagactagccggtttgtcgacaagtacgacgtcaccctggacgtttgcgtctcgtcggtcttgatgcaatccaaatccctcgcccctcagcgagggagcagggagctggacgtgtgcgtggaggacgagacgatggggtaccctgaaccggaaggacgtgcaggaggcgatgcacgcccgcctcgaaggcggcgtgcccaagtggacggtctgcagcagtgttctggagtacaagcagctggacctgcagatcccgaccatcaacatcgtcggcggcctcgtcaagtcgggcgtcccggtgctggtgtacagcggcgaccaggactcggtgatcccgctgacggggagcaggacggtggtgcagcggctggcggggtggctgcggctggggacgacggcggcggggtacagggtgtggttcgaagggcggcaggtgggcgggtggacgcagtcgttcggcggcggcgcgctgtcgttcgccacggtgaggggggcgtcgcacgaggcccccttctcccagcccgagcgctcgctcgtcctcttcgccgccttcctcgccggccgcccccttcccgactccttccagtgacgtcgtcccgaacgacgatgatcacgtctcatgtcaagcgcggaggtgcattgttgttgcgttgcaaatgcgtacgagcgatttcgtgtgcgccaccgctatatatagtactccgtattgttgctgggaatcgaattgtttctcggagaaaatctcatctggaaaatgctgatgtggggtggggaagatgactccatgccgggtttaccttgctctttagttcaaaatagaagtaactaacgtttgttacggagagtactccctccatccaataaaaaaccaacctagcact

SEQ ID NO: 19855 - DNA, 3051 bp, Oryza sativa
  ref <308>: DATABASE ACCESSION NUMBER: AK070196
  ref <309>: DATABASE ENTRY DATE: 2001-12-06
ggacgtcatcccctctgccccatcgatcaccagttcgccggcggctgccttcctcttccccgacctgcgttcttccccacccaccacctgtgattgtagggttgccccgtggtggttgccgctgattatagtcgtcgtccagctatctccatcggtcaggctgtcagcgcgctggccgtacccaacaaggctcccgattgttgccctggtcgagcggctgccatctgccagcccgtctgctctggacggctgcctccatcctcggttttcttcatttgaatgatgtcagcctcttctgggccatcaacacctaaaccagctcgcaagcgcaggcaacccgagagagcttttataccttcaggttagctccaagccatataaatttttatttctacatttgaaaccattttcctattgagctctcctatttgtcaacaaatgattctgttgtgccatatctatttcctggggaatattcctagcgatggcgttgttctgctggctgatgacgccctctcccatgttggtgatttccctacaagttttcatttgccatcaaggcgctctatacgtcgaagactacttgctcagtctgctggatttccccacccggatcctataacagctgctcaatcatgtcgaaagcgtaagctctctatggctgccaaatcatctagagaaattaatagtaccactgaaatgatagagcatcggacgcatatccatgtgctacaacggaatgttcgacaacgaaccagtctatctcagtcatccaccttggttcctatcaattgtggccatacacaaccttttgcaactgtcgatggagaccatttgctcatcaattatcgtggttttgctgatgtgaacctgatgctcgacatgtcaaatcagatcactcatacagtatgatgctcgacctgctgttcgactcactaatgcactattttctctccatcaaggcttgggcccccatgtcacacttgtccatattgtggggctttcttttggtttgaggagcgtgtccgccgagaacagcacagctcatcaccaatatacaatacatgctgtaaaggtgggattgtcatcttacctccatataggccacccccagaacctttgcatagtctactcacaggagttaacagatcattgtcagcccatttttttgagaacattaggttctacaattcgatgtttgccttcacatcgatgggtgtaaatgtcattgattctatcaatgatggacgaggcccatatgttttcaagattagtggccagctctgccactgcattgggtcactcataccaaaagaaggaagacgaccagagtatgctcagttatatatctttgacacagaaaatgagattaggaataggatgaatgttggaacctatgcaaataggagtttttgtcctaatgaggatattgtggctggacttatagacatgttcaacacccacaatcctattgtccacctatttaggacagctcgtgatagattggctgaaaatggtgatgatcgatacatcataagattatttggtgatcccgacaagcatggtgatatatttagtgctccagttgcatcagaggttgttgggttagttgttggtgatgtaggtataagtgatgttggccatgaccttattgtgcaggaccaagcgggtcatttacaaaaagttgaagaaaagcattgtaaatttatgtcaatgcaatatccaattctatttccatatggggaggatggctatcatgaaaatatcacataccgacgttgtgctcgatcacaagctatcaaaagaaagaaggctactatggttgaatactttgcatataggcttcatgacagagctgatgacttcaatactcctatgcgctgcaagagaggaacctaggcctatgtcatagatgcctattgttgtatggaagaatctcgcctgagtcactgcagatccaagacatttcagcttaagtatagaacagcttcattcagtgaggtatccactatggtccattcaggcatcacagaagcatcagatgccgggcagcgagttatattgccttcttcttatattggggggccaagatatttatatcaaaattacttagattcagttgctctatgtagaaaatatggttgccctgatttgtttatcactttcacatcaaattccttatggtcagaggtaacacaagctttggctatcatccctgggcaacactcagcagataggcctgatattattaatcgtgtattccatgttaagctacacctcttcatggacgacatcgtaaagaagaaattttttggccctgtcactgcagttgtgtacacaattgaatttcagaagcgtggacttccacatgttcacatcatattgtggttagataagagtggtccgttgacacctgctgatattgacagactaatatcggcacagcttccagatccatccattgatcgagttggttatgatgctgttgcggcattcatgatgcatggaccttgtggtgatgcaaatccgcattgttcatgcatggttgacggtaaatgctcaaagaattacccgaaggaatattctgagaaaacaacaatcctgccaaatggccatgtaaggtatgctcggccaaaaaatgatataattgttgccaaaaatagaatttctcttgataatcggcatgttgtcccccacaacatcgatttattagtcaaatatgaggcgcatatcaacgtggaaagagttaatcgtgatggaatggaaaagtatctattcaaatatgttgctaagggttttgattgttcgagggttagtctcaagcgcaagcgggcatgtgctggaactaatgagattcatgactatttagaatgtagatgtatagcgccgaatgaggcggcatggcgtttaaatgtagatgtatagcgccgaatgaggcggcatggcgtttacttcagtttgagattcattatactgatcctgctattgagcgtctccatgtacatatgccattagagaataatgttacattcacagaggatgataatctgg

SEQ ID NO: 19856 - DNA, 1292 bp, Oryza sativa
  ref <308>: DATABASE ACCESSION NUMBER: AK070197
  ref <309>: DATABASE ENTRY DATE: 2001-12-06
gatccgaaagcaaaagcgactcgtcacagctcaaacaagtcaagagcgaatagttcttgctgatctgttgtttgattactttagttctcgagaggctttagctgaatccatcgatcgatcatggaggatgagaggaacacggagagccaccagggtggcgaggctgcagagcaggtggaggtgaaggacaggggcctcttcgacaacctccttggcaggaagaaggacgatcagccggaggagaagaagcatgaggaggagcttgtcaccggcatggagaaggtctccgtggaagagccaaagaaggaggagcaccacgccgagggcgagaagaaggagagcctcctctccaagctgcaccgatccagctccagctccagctcgtcgagtgatgaggaagaggaggtgatcgatgacaacggcgaggtggtcaagaggaagaagaagaaggggctcaaggagaagatcaaggagaagctgcccggccacaaggaccatgccggtgagcatgctcctccgcccgcggcgacgggcttccccgcgccggctccgcctgcatccgtggtgacggccgcgcccacgccagctcctgctcccgtggtgactcacggcgatcaccaccacgacaccgccgtccccgtggagaagatcgagggtgatcacgccaagacggaggcgaccctgccacgtgcacccgaggaggagaagaagggcttcctcgacaagatcaaggagaagctgcccggcggccacaagaagccggaagacgcaactgctgtgccgccgccggccgcctcaccggctgctcctgccactactccggcgccagcacacccaccgccggctacagaggaagtgagcagcccggatgggaaggagaagaagggtatactgggcaagatcatggagaaactgcccggttaccacaagggctccggcgaggaagacaagaccgccgccgccgccaccggcgagcacaagagcagcgcttaattggggcgtgtgtgagaccaggccatggttggaatttggaagtgtttggcgtgtgttagtttggtgctttttctgcactgcagctttgttaagttcgtgtcaagattggtcaaggcctggtcagcgaagcccgatcagtgatcgaagtttgtgtttcgtgtggggtacgggcttcagtttgctatagtcaagtactagatgttgagtttgtttaattattattggcactcttgtattggttttgggctgggcattctgccttggtattaatgatttctgcccagaatatattgttgcct

SEQ ID NO: 19857 - DNA, 1309 bp, Oryza sativa
  ref <308>: DATABASE ACCESSION NUMBER: AK070198
  ref <309>: DATABASE ENTRY DATE: 2001-12-06
gggactctcccgatccttccccaactcggcgtcgcgccgcctcaaccgaagcaaggagcaaagcggggattcagaacgggaaggagaaggtccggttcgtccgctctcgagctcaagtgtcagttgaagtgttttgaaagtcatggcggagcatttggcttcaatatttgggactgagaaggatagggttaactgccccttttacttcaagattggggcttgccgtcatggggatcgttgctcccgtctgcacaacaggccaactgtgtcgccgacaattgtgcttgctaacatgtatcagcgccctgatatgatcacaccaggagtcgatgctcaaggccaacctattgatcctgaaaagatgcaggagcactttgaggatttctatgaggatatctatgaggagctgagcaagtttggtgaggttgagaccctcaatgtctgtgataaccttgctgaccacatgataggcaatgtgtatgtccagttcagggaggaagaacaggcagtcgctgcgcataatgcccttcaaggtcgcttctactcagggcgcccaataattgttgagtattcccctgtgactgatttccgtgaggcgacctgtaggcagtttgaggagaacagctgcaaccgtgggggctactgtaattttatgcatgtaaagcagattggcagggagctcaggaggaagctttatggggggcgatccaggaggagccatgggagaagccgcagcccaagcccacgccacaggaggggcaatcgtgaccgtgatgatttccgccgtgaacgtgatggttatcgtggtggtggtgatggttaccgtggcggcggcggtggcggtggtggtgacggttaccgcggcggtgatagttaccgtggtggtggtggtggtggacgcaggggtgggggcagcaggtatgacaggtatgatgatggaggaaggcgcaggcatggcagccccccaaggcgtgcaaggagcccagtcagggaaagcagcgaggaacgcagggcgaagattgaacagtggaaccgtgaacgggaggaaaagccttgaacgaaagcagtgatatctctatggatggccggttcatgccttcatggcaatcactatccgctggagtcgtggtgtgctgctatgttctaagtggatatttagtgtgtgtcgtttggtactcatgcttggctgagtaacccttttaaatgcaggattctggattctatttacattgtgtttcgtttgacgtgtaaaccgccgtttgtttttaaatatgcaatattggatcttttgtcagtctattatcctgtc

SEQ ID NO: 19858 - DNA, 2003 bp, Oryza sativa
  ref <308>: DATABASE ACCESSION NUMBER: AK070199
  ref <309>: DATABASE ENTRY DATE: 2001-12-06
gtccctctcgcgttttcctccccatctctcctcctcctcctcctccgtgtctccgccggtggtgccccggcgagctctcctccgccgcctcggcgcgccacctctcctctcctcgcgccgcgggggagaagccgaacgggcgccggagacacggcgcggattgcctcaccccccttagtggccgtatcaactatcacccttggtgcgcggcctcctcgcgcgcgcgggaacggcgatcgtatcggggtcggatcggattggaggggagaaaaactcatcaagtaattgaaggtggtgaatacacttttacggggcattatcatcgttcctaggttcagctgcaaaaagttaaagcaaattgccaaagatgacatctgaagagaataaagctgttgcacataatgaaccactacccatggagcagacattaagctctggtgctaagcgtaagcgtggtcgtccacggaagtatgagtacggcatgcatgaattaccatatagtgtgcagcacattcagagcgtcccacctcttcacagcacacaagatagctcaaacatccgacaggatgggatacagatcaaccatacatcaggtggtagctttggccctaatataggcacaattcaggctttgcctacaaagcaaggcccagctaatagatccagtggacctagagattctgtcaatctggttaagacttctctcagccaagcctccatttatactagtgctcctttgcaaggtaattcagtcaaagatgatattgttggcaagtattttgttggtaagatgtcgaagaaatttcctgggttttctctgattacggtgaaagtgaaggacaatcaggttctcaaaggttggattccagatgaaaataacctccgcccaataacaccaaaagatgatcttgccccagatctccctatgcttcgaccaagtcaagttcgaaagaggccatctactgtttacagacaagcttctggtcctattccagtccccttggaggatgttacatttgcaaagcctctacagatgaggaggcctgtagagaaatccttcactaagcacacggtcccttccgttccaagacctcacatgggttctggggttgttgcagcagtacctatctcagtttcacccagtaatgctgaatcaaggattttctccgagcagggtactgaacatgtgaatccacaaccgttatctgctgtggtacctattaaatcaggtcaacctgtattggcatcatgcaaggaagtcgctggagggaaaactgtcaatgagattcaaacagtctctgaatcttcaaagcacactgaagagtcatcaggggaaaggcatctgcttaatgttccagtaatggatgctataaaggaatctttgggtcccaaagagcagcctaatgctacaaatagcaagcaacaaacttttatggaaccaccggaaagcacagaacaagctgtgcagctggacacagagagagacatttccaaaggagctgatgactcaaagtcagaagcctcaggaggaactgcacctccggtagaggcttcaaccgcagtacataatccccaagatgacagtcatgaaatgaaggttgacaacaaatgaaagcagcgcttgagaaagacaaaatgattcttaatgttaggtgaaagcttcaaatccagattgtttctgccaagtcttactataaatggctggatgccaaaggcgtagactcgtactctaggatatatacttgtctttcgcttttatttgtcttccttataaggatacttgagctatctttcattttcattcgtcttccatttaaggatacttgaaccttttaataatgatgtaaagccatacaaaaaagttacttcatacttggaacaaaaagaaatgagaaaaaacttggaaggactaggccccatataggaaaatggcatatctgaatcgaaagcatttgtaccatggcccttgtgataattaagtaacagaaggcaagctgttattg

SEQ ID NO: 19859 - DNA, 1110 bp, Oryza sativa
  ref <308>: DATABASE ACCESSION NUMBER: AK070200
  ref <309>: DATABASE ENTRY DATE: 2001-12-06
gattgcaagccttacacgtgaccctgcgcatgctgcgtgtccccgagcagctgtcgcacagaagcagttgcaacctgcgagcggaaacccacctccatcccgtcgccggcctgccgccgccgccgccgccgcttgccctcctccgccttactcggcctccggcgcctcctgaccccccggccatgggttgctcttcgtctctgccagctaataatgctggaggggtaggtactatcagcaacgagaattctggtactgatctgaagaacttgcgagtgaagttggtattgcttggagattcaggtgttgggaaaagttgcattgttcttcgctttgtccgtggtcagtttgaccccacttcaaaggtgactgttggtgcatcatttttgtcacaaacattggcgttggaggattccacaacagtaaagtttgaaatatgggatactgctggtcaggagaggtatgctgcattggcacctctttactaccggggagctggtgccgcaattgttgtgtatgacataacaagttcagaatcatttaacaaggcacaatactgggtgaaggaacttcagaaacacggtagtccagatatgatcatggctttggttggaaataaggctgatctacatgacaatcgtagtgtatcctctcaggatgcacaagagtatgcagagaggaacactatgtttttcatcgagacatcagcgaaaacggctgataacataaaccaactattcgaggaaattgcgaagaggttgcccaggccaacaccatcctgaattcctgattggtaactgacccaggaaacaggctggcaactgtgtattgtacaacagcagtaaaagctctgtatgcacattgtttggaaatgcaacaactgtcatgtaaagcaactactttgctccttgctgcttctgtttccagcttggtcaagtgagctcagtgttttgctcagcacaagctgataggctatacgcatggccacatggtcattagcagttgcattatgctgcaggaatttaaccgtttcctgtgaaaatcttgtgaaattcctgcgttcaaaacagagcctttatttccagtgccaaattggttcttttacatctg

SEQ ID NO: 19860 - DNA, 1169 bp, Oryza sativa
  ref <308>: DATABASE ACCESSION NUMBER: AK070201
  ref <309>: DATABASE ENTRY DATE: 2001-12-06
gacgcacacactagtgcaagcagctcgagcttgagctccacctcgccatcgccggcgacttctcctgtcctgaccggccggagctccgatcttggcggtgaccaagagacctgacgagacgatgtccgccgccgccgccgccgccgcatcctcccccgctccccggttggaaagcaaggttgcgctggttaccggtggtgcttcaggtattggtgaagcaattgttcgcctctttagagagcatggtgcaaaggtatgtattgcagatatccaagatgaagcaggtcagaagctccgggactcccttggaggtgaccaagatgtcttatttgtccactgcgatgtttcggtggaagaggatgtagcccgagcggtcgatgcaacagctgaaaagtttggtactcttgacatcatggtcaacaatgctggctttacaggccagaaaatcacagatatccgaaacatcgacttttctgaagtcaggaaggtaatcgacatcaatttagttggtgtattccacgggatgaaacacgcagcgcgcatcatgatccccaataagaaggggtccatcatctcattgggaagtgtttctagtgtcattggagggttgggacctcattcatacacagcaaccaagcatgctgtggtgggtctaaccaagaatgtagctggggaattggggaagcatgggatacgcgtgaactgcgtatctccctatgcagtgcccacggctctctccatgccgtatctgccccagggcgagcgcaaggatgatgccctgaaagactttttcgcctttgttggtggtgaagcaaacctgaaaggtgtggatctgctacctaaggatgttgctcaagcagtgctctacttggcaagcgatgaagcgaggtacatcagcgcgctcaacctcatggtggatggtggctttacctctgtgaatcacaatttgagagcatttgaagattaacagaagttgttaggcacaattggtactctagtttcagatgctatgtaccattctgattttagaactttgatcaattacctaaagtaagaatgtcaataaggaatgcaatcttgtatctgtggtattgtatagtactatgattgtattgccggtgcttaaggacaatcattgattattatcagcactattatgttacagttcc

SEQ ID NO: 19861 - DNA, 1533 bp, Oryza sativa
  ref <308>: DATABASE ACCESSION NUMBER: AK070202
  ref <309>: DATABASE ENTRY DATE: 2001-12-06
cccccgagcagagctccctccgacccgacccgaccccagcgactcggatagatccagcgccgccgcccgccgccgctgtcaaccggccggctagcccgtcctccgtcgtcaccaccgcaccggctactcgctcctatccccgcgcggctccgtctttctcaaagccactgcagttgacccagttactccatcatcaatccttgttgccattgctgccagttactgtttcctattccccactgcttcgtcccttttgactccaatactttggcacatcatggtcggaaaggtatgtggtgttagaagcttgatctagtcatcatcaatcggatcttgtaggatattgcgatgggaagcttattccaggctggaagttctttttatggagattatatcctcgattttaatgccaattgtgagagatgcgtcgtttcattgagtttttataaggacaatgatgaagagaagaaagaaacatatttcgctactggtataatttttgcttcgggaaagagatcatgctgcgttttaacaacaatagatgatgctagtaaaaggaaagatgaatcatgtgtggtaaaattttttgatggaacttcaaaaattattgattggaagagaataaaggtgcggccagagtttaaatgtgcaacaatttatatccacaatattgatatgattcatggagccaccgtcacatttagtgatcaagagattgatcattctcaaaaggtattcactgttggttacaacacaaatcaaagggacagaaccttcatctcaggaaatcttgtgaatggtgtagggatacggaacaaagacgctatcgtatttgtgcacggctgctcaactggcaattctggtcatttgggatcagctgtatttaatgaaaataaaaatcttgttggcatgaatgtttcttatactagatctagaggcactcattatatctctagcagctccacatcaacatcagattatggtggcatcgtatctgcattgaatttacaatccatacaacttgggctttccctgctatataaaaaagaaggagagactattggtgaaattgttcgtcacgtgaatgctgtcttgctcaattcagaaaaggaatgggcctaagaatgtagcggaagcagctggtgttgatttagaaggcagaagatgatgaggggcctttgatcattgttctgcagcttttctcatttttagctgctatgcgcatctgcattgatgacgagctcagaccttcaagagcaatggtgaaggccatcacgatctgagtgtctcttttttgttattattattctctatgaaaatttgatagcccaacctgtgttgatgatacaatgtgggtggtttttcttttgtaagctgacctgtgactcattttggggcacggtggtgtcagactgatgaaatgtaagtggctgttagacaggctggcctcacactgaactcggcctattttgagcttcctgtactgtctaacttttctcattattcactgcccaactttggtcagagacccgc

SEQ ID NO: 19862 - DNA, 3279 bp, Oryza sativa
  ref <308>: DATABASE ACCESSION NUMBER: AK070203
  ref <309>: DATABASE ENTRY DATE: 2001-12-06
gaacagccttctccccagcctatgctcctcaccggaggaggctaaatatattaacaggacttgtataaagttttcatctgcaagttggagttggaagccaatgtgaagttgagaggcttagacatacagaataaagtggatggggaagagagctctgctgtcaggtgaagcctggggaatcgtcttcactttttgatccagcagcaaatgcatatgttcccgactcagcgaggaggtctgctttgatctccagtcaagaatttgattaaaaaacatacaactagaatcaggtatcattctgcagcaccctacattgtgatttgcctggcaaaggatgtgttctccaggataatggtggtttagcttctggtttactttattatttggtggattttatcatcataaatcagtacaatggggaaacactcagctgaatcaggtactagtatgctcttgcatggagatttggacatacagatagtggaagcaaaatgtcttcccaatatggatcttatgactgaaaggatgcgaaaatgcttcactggctacggcgcttgtagtactgagtgtgggaagtctgatccacatacagacgtgaggaagatcattactagtgatccatatgtttcggtttgcctctcaggagcaacagtggcacaaactcgagtcattgcaaactcagagaatcctaaatgggatgaacatttttatgttcaggttgcccattctgttagcagagttgagtttcacgtaaaagacaatgatgtttttggagcagaacttataggcgtggcttcagtaccagttgaaaacatcacaccaggtgataccgtcagtggttggtttccaatatctggtcagtatagtaatcctatgaaggcatctcctgaacttcatttgtctatccagtacaagccaattgagcagaatccattgtacaaagatggagttggttctgacggttgtcagagtattggtgtgccaaatgcttattttcctcttcgaaagggtggtatggtcactctatatcaagatgcccatattcctgatgacttttgtcctaaaattgaaattgatggtggaagagtatacgaacaaaataaatgttgggaagacatttgccatgcaattgctgaggctcatcaccttatttatataattggttggtcgttgtatcaccctgtcaagctggtaagggaatcaacaaaacctgtgcccaatggaagcccaccaacccttggggggcttttgaaaaccaaggttcaggagggggtccgtgttattgtgttactttgggatgacaaaacatcacatgacaaatttctcttgaaaacggatggactcatgcatacacatgacgaggaagctcggaagtttttcaggcattctggtgtccattgtgtgttggctcctcgctacgctagcaacaaacttagcatttttaagcaacaggttgtaggaactttgtttacgcaccatcagaaatgtgtcattgttgacacccaagtcatagggaacaatagaaaaataactgcttttattggtggcctagacttatgtgatggcagatatgatacacctgaacacaggctcttcaaggatcttgagaccgtcttcaaggatgatttccataatcccacattccaagttaataagtctgggcctagacaaccatggcatgatttacattgcaagattgagggtccagctgcctatgatatacttacaaactttgaacagagatggagaaaatctgcaaaatggaaagtcagcgttagaagagctgtaagttggcaccatgataccttggtaaaaataaaccggatgtcgtggattgtctccccctctgcagatgagttaaatgcacgtgtttgtgaacaagatgatccagaaaactggcatgtacagatattccggtccattgattcaggatcagtaaaagggttccctaaacttgttcaggaggctgagtcacagaatcttgtctgcgcgaaaaatctgcagatagacaagagcatacataatgcatatgtgaaagctatcagatctgcacaacactatatctacattgaaaatcaatattttattggatcttcatactactggtcttcaaatagaagtgcaggtgcagagaatttgataccgatcgaattggccataaagattgcaagaaggattaaagctagggaaagatttgcagcttacattgttataccaatgtggcccgagggtaatccaacaactgctgctatgcaggagatcatcttttggcagggacaaacaatgtccatgatgtacaagattgtcgcagaagcactacagaaggaggggttagatgatacgcatccacaggattaccttaacttctactgtcttggtaagcgtgaagtctcaaatgacgtatctacaacaagccaatccaatgagaattccccacagcgcctggtccaaaagttcaagcgattcatgatctacgtgcactccaaggggatgattgtcgatgatgagtatgtgctcataggatcagccaacataaatcagaggtccatggatggctcaagggacaccgagatcgctatgggcgcctaccagcctcactacagctgggcaggacgcaagaaagctccacgaggacaggtgtacgggtacaggatgtcgctgtgggcggagcacctgggtacagtggaggagtgcttccgttggcctcattccgtggagtgcgtccggcaggtgaatgaaatggcagaagagaactgggcgcgctacgtatcaccggagatggtgaacatgcgggggcacctcatgaggtaccccatcaatgttgaacgggatggtagggttggtccggtgcatgggtacgagtgcttcccggatgtcggtggcaaggtgctcggcacacactcttctcttccaaatgcattgacaacttgaattggctggagcatgaacgagctagatgtggcaactaccactaatactttgaaaagaatcattttggggcgtgaagctttttgtttgtacatgaaagagagactgcttgataccagttccacacattgctgttatagagtactgcagttcgactgctgcatatgcagtatgtataataggatttcaattataatcatctctggctggatgcaaatacatctgttcttgcatttagtttgttgtaaaaggcaccttccctttattcagacagtcggttagccttaaaaacaaaattcttggtggcacatgattcaagaatttattggaatgcctcagaagcattacatt

SEQ ID NO: 19863 - DNA, 680 bp, Oryza sativa
  ref <308>: DATABASE ACCESSION NUMBER: AK070204
  ref <309>: DATABASE ENTRY DATE: 2001-12-06
gaaagagagagagagagagcaagaagaggaggaggaggaagaagaagacatactgtccatccatggcgggattgttgaagaggttgctggtggcgctggcgcttgccgtgctcatgttcacggccaccgcggtggccgggcacccggctccggcgaagaagcacggccacacgccggcgcaccaccacccggcgaagaagcacggggcgcgcaagcacggcggccatggcggccacaccaagcctcaccaccgcatgtaaccggatgccgacgcgcgcacgcatgcagcaatcagcaatgccatctcgccttcattctttttcattcttcttcttgttgttttgattagcgcccttactttatgatcatttggtttaatttgtacgcttaccatgagttgatttgatcttctccttcttctacctacgcgtatgtgtcatgtgggatgagtgaaatgaaatccatggaataaaatcagatgctcctcagcctgctctaatgtcagactactgttgtcatgcaggacccccaacaatctgttcttcagaaagaaagaaaaagggaggaaaaatatattatgcttccaaacattgtactaagaatgtacaaatattcgctcgtttttgcactgcaaatgtgagatgtaggagtactgattaaacagtagtggtttatgatct

SEQ ID NO: 19864 - DNA, 1301 bp, Oryza sativa
  ref <308>: DATABASE ACCESSION NUMBER: AK070205
  ref <309>: DATABASE ENTRY DATE: 2001-12-06
gatccgctagcttcatctccactagtctcatccctccttctccctctcctcgttgaacaccgcactatcaaatcacccagctgaaagccaagaccgcgcgcgccggccggccgggcagggatcacctagctaggatacgcgccatgatgtcgtcggcgccggagacgttctcgctggaccacctctcgcagcatcagcagcagcagccgccgccgctcgccgagcaggagcagctctgctacgtgcactgcaacttctgcgacaccatcctcgcggtgggcgtgccgtgtagcagcctgttcaagacggtcaccgtgcggtgcggccactgcgccaacctgctctccgtcaacctccgcggcctcctgctcccggccgccgcctccaccgccaaccagctccccttcggccaggctctcctctcccccacctcaccgcacggcctccttgatgaggtgccgtcattccaagcgccggcgagcctaatgaccgaacaggcgagtcccaacgtgagcagcatcacgagcagcaacagcagctgtgctaacaacgcgccggcgacgtcgatggcgtcggcggccaacaaggctacccagcgagagccgcagcagccgaagaacgcgccgtcagccaacaggacttcagagaagcggcagagggttccctcggcatacaaccgattcatcaaagatgagatacaacgcatcaaggcaagcaatccggacatcacccacagggaggctttcagcgctgctgccaagaactgggcccatttcccacacatccattttggcctgatgccggaccagggcctgaagaagaccggcatacaaagccaggacggagctggggaatgcatgctcttcaaggacggtctctacgctgcagccgccgccgctgcagcagccacagcagcatctagcatgggtgtcactccattctaacgcctcagatcaatgcacgatctggcttaaaaaaaactttgtgtcccaccctgtagttagggtcctgcatgtctcgatctccagatatgatctccggttgcttgttaactgaaatgttcctctatatatggacgatcatggcaccatatgcatggcatcttggcatgcatcgatcgtatctaagtccttatctatgtgtaattctagttttctcagtttcttcatgtattttccccttaatttttcctattcctattcgcatgtacagaggctgctagctgtgcgtgctgcctcttatatatcttatggacataactagatcgatttggtttaattaccaggtgatcatttgaaatc

SEQ ID NO: 19865 - DNA, 899 bp, Oryza sativa
  ref <308>: DATABASE ACCESSION NUMBER: AK070206
  ref <309>: DATABASE ENTRY DATE: 2001-12-06
ggcctcaccctcctcgcgccgcctctccccgccccaccaatgccctgcagcgccgctccatcctccgacgcctgtcctggccccgacaccgccgtgcgtcgccgcatgtcctccactgcctctctctctctctcctttctgccggtgccgctgagctcgagctcgagctcaatggtgagaggctcagtacgtcgacaacgagtcggtcgatccaacattcaatcggcgatcggatctggcgaagggaggaggagcgcacggcggtgtcgacttgaagtaggttgctggcggcgtccccagcgtggtggtgtaggccgatgggcccaggaggcgaacgcctcgagcttgcgagaagatggcgtcggcacggagttctcgaaggcgaggagtcggtctggcggcgcatgacttgattttcgagtgatgtgggggctccatgagcagtggcaagctcctgttttttctggtcatcagagggaggaggagttgtctccatcgcctagccgttctctggatgcatcaagcttgccctcatcgcatcacgccatcgtccactggtatttgattttcatttctattccccaccaagatttgaggtgttgttttgtgtgatgccctgcctacaaggtgttcgttgtttttcctacaagcatggtgatgtggcgatcttaaagctatcagttacgcctgcatgacctgtaatgtaacctctcatttattgcacgtttggatgcaacatttaggtggcaaggagattatacattggcgatagcatggagcaacaggcagaaatgccattctttgttcattttatttttccttttttttagtttgattagattatggtgcttaaggagctggatttgctgttaaatcttaaatgatttaaacagcgggcc

SEQ ID NO: 19866 - DNA, 3352 bp, Oryza sativa
  ref <308>: DATABASE ACCESSION NUMBER: AK070207
  ref <309>: DATABASE ENTRY DATE: 2001-12-06
gtggtgtccaaataaattaaaaatcccccaatcgatcaatatacgctgcaccacaccacatactcaaaagaaagaaaagaaatccccccaatccccatttccagcgaaatctaatctaatcatctaaaaattcccttcccttcccttccgtccgagccagagcagtagtagtagtagaagtaatgaggaaaagaaaacgaaaagcgccaagaaaacaacgcaccaacacatccacagcagcagcagcagcagcaagcatcatcggctcaggcttcatcaggagaataggttagatgtgagaggaaggaaaaaaatccgaggaaaagtctcgagcccaccccccacatctccactgctgcagctttgcttgctcgagagaaagaaagagagaaagaaaataaaataaaaatctctcacaaatctctctctcgcagccgtcaaaatccaatcttggcgcatccccggccgcctactgttctcgccccccctctctggtaataattgtcaggctggtggttggtttgctgctgctaataatcgagtcttttcctcccaaggagaggcgttcaatttcttggtcaggatttgtggaggtttttcttggattcatttcgtcatctcgtcgcggagccaaagcttttggtttttttttttcctttggttggtcttggctcgatcgggatggatgcggggtgggttgggctcgcgtccaattcgcctccaccaccacaagtacgcttcttttttattgtttccggagtggggattgtagagagctatttcggcaatcgctagggctccgtgtgtgttctctctcgcccactttactctttttttttctatatcattattcccctttgccctccaaatcgaatcctctctcccctcctgcggcgccgcggggagggagcgatctggggagggggaagccgtcgattgactcgattctgtgtcgcgggggctccgattcggcctctgaattgcgccctgggttccatgagggcgtgaggtgaagttggggaagagagagagagagagagagaggggggtagggttgctgcggcggccatgtcgcaaatccagagcttctcgcggcagaactgcgtgctcctcgcggtgctgtgtgggaagcacgctgagaagcgtgcccaggcgaggtcggggctggaggcgaagcggctgcggccgtcgtacccgttcccggagctcagctcgtcggggagattggaggtgcacacgctgttcaacccgacaccagagcagttcctcgaggcgcagcgcgtggttcagcccaacttcttgtacatccaggggcaacagcttgaggatgagaaggagattggctcgctcgtctggggggacaatgacgtatctgatccgcaggcgtttagttgtctcatcagcccgccatttccgaccatagtttatctggaggttccaattggtgaaaaacttgctcaagcagttcattcaaaggggattccatacgtaatatactggagaaattcattttcatcatatgcagcatcccattttcgccatgcattaatgtcagtggttcaaagttcggtgagccatacttgggatgcttttcagcttgctcatgcatcctttcgattatactgtgtaagaaacaaccatgtacaaagtgttaagcttgggcctcgtctactaggggatgctccaaagataaatataacccctcctgagaatgagatggttgaggaggaaggttcttcagatgtgtttccagctataaaaatttatgatgatgacatcaacatgaaatttcttctttgtggagttcctagcacaccggatccttgtttgttaggttcattagaagatggcctgaatgcacttctgaatattgaagtatggaataaagcattgcagctctactgtacattgattattttttatggaccatggagtaaattttacactatttcctgaagaaaagatggagtataatgattctatgagcaacctttgttttagataccttaactcaagtttgaagaaactaggatctcagtatgttagatactattgaaactgttctgttttcttaacattacaacattttgttttcttgttcaatatttagaaaagggatgtattttgcgtgttaattgttctgattaaggaaagagagggagggagcggaaatgttttgatgtactgatgtggctcacaacagcactatgcatgaaaccaccctaaataacaccacacaaataaaatctagatagacatcttagtttcagtctacaagatgctagcaataaaatggtggttcaattttttacttggcaccaccaaatctcagactatgttgtacacatgctggttctgaaaatctgaagttagcagtccatccttttcttgtattatttcttggtcgaaggatgcaaacacatagactagcatagtgatatttgatgcatcaggatttctttagttattatccaccaagcttttatgcaagttctttcttctgtttgtgtgttgtttttgcaacttattgctctatctaacggttgatcttgtttttggcagattcgggggtgcaaacttcagaatcgaatcagtgcttctccaccaccacttcatgctgcatccttaccacgtggaatggttacaatgcgttgcgacatcactacgtgcagttcttctcatgtgtcacttcttgtttctggtagcgcacaaacttgttttgatgaccagcctttggaaagccacatcaaggatgagatcattgagaagagccaactagtccatgctctgccaaataatgatgataagttatcatcaagtgtgcctttcacttcaatgtccacagcttgtggggcttctacctttgaagtttggatgacccttcctaagtgggcagcacaggttctgaagcatttagcgccagacatctcatacaggagcttagtggcacttggaattggttgtataaatggcacgcctgttgcttcatttgataggcgagatgcagaccgccttcttttcttttgtacaaatcaacacaaagatttggctattgaaaatggcccatactttcatctgccaagatggtcagcatctcttaccaaggaaagagtgaaggtgggtctggaatcgaaaccaaatttgttaggtgcgaatggaattcctgaggacaagaaacgtctgatcgaagggccttcctcatcttccaaggcaaaattgaagcctgcaactatgaggcccattcctcactctagaaagcaacaaatgcatccttttatgggtttcctggaagctactgttcatgaaactagtcaggttaagccaaacttgccagctgctcccccagtgaagc

SEQ ID NO: 19867 - DNA, 1160 bp, Oryza sativa
  ref <308>: DATABASE ACCESSION NUMBER: AK070208
  ref <309>: DATABASE ENTRY DATE: 2001-12-06
gcaagttgtacttggcgaaaaaaaaaaaacagctctcgcaaaatctcgctgccgctgccgctcgcgagcaagctctaccgccactgccgcgtggctgttcttgcttctccggaggggaaggaaccccgcggggagggagccttccacccttcgcaaaagccacgcgccaccaaatcctccttttctcctcatcttccctccatcccttcctccctccggccgcgcgtcgctttcgccgcgaccgaatcggtggggtcgtgtggggggaggagaggggcgccataaaggcggctggggtcggcgatgatgagcggcgttggaggaggcagatcgggcgggagggacgcggagggcgagtgggaggtccggcctggcgggatgctggtgcagcgcagggacggcgacacgggtccggccgtcaggctcagggtctcccacggcgcctccttccgcgacgtcgccgtgccggcgcactccaccttcggtgaattgaagggggtccttacccaggcaactggcgtagagcctgaaaggcagaggctcttcttccgtgggaaggagaagagtgacaatgagttcctgcatacagctggggtcaaggatggagcaaaacttcttctacttgagaagcctgcccctgccaatgtagagcagagggccgagccagtaattatggatgagagcatgatgaaggcttgtgaggctgttggccgtgtaagagctgaagttgacagactctctgccaaggtatgtgatttggagaagagtgtgtttgcagggagaaagattgaggataaagattttgttgtcttgacggagcttcttatgatggagctgctgaaacttgatggcatagaggcagagggagaagcaagggcacaaaggaaggctgaggtacgccgtgtccaaggtcttgtggagacgttggataagctgaaggcaagaaatgccaatcccttcagcgatcaaaacaaatctgtttcagtgacaacgcagtgggagacgttcgacaatggcatgggcagcttgaatgcacccccaccacgggtttcttccacacaaataaacaccgactgggagcaattcgactagcctcggattgcgttttctcattgtatcgttaacttgtgagatcaggtatctaaattcctttcacaggc

SEQ ID NO: 19868 - DNA, 3843 bp, Oryza sativa
  ref <308>: DATABASE ACCESSION NUMBER: AK070209
  ref <309>: DATABASE ENTRY DATE: 2001-12-06
gccccgcgtctcctctcctccccacccgccccgcatctctccatcggccggatcggcaggagagcgcggccgtacgcacgtacgccgtccccgcggtttcttcccccccggcgcccagcccgcccgccgggcggcggcctctcctagcaactagtaggggatgggcgtgatatctcggaaggtcctgccggcgtgcgggagcctctgctatttctgccccgggttgagggcaagatcaaggcagcctgttaagaggtacaagtcgatccttgctgagatcttccccaaaacgcaggatgaagaaccgaatgagagaaggatcgggaagttgtgcgagtattgctcgaggaaccctctccgagtgcccaagatcacggtttccttggagcaaaggatctacaaggaattgagaagtgaacagtatggctttgcaaaagtggtgatgctaatataccgtagattgttggtttcttgtaaagagcagatgccactatttgcaagtagcttattaagtattgtacacactcttttagatcaaaagaggcaggatgatatgcgcatcataggatgtgaaaccttgtttgactttgcagttaatcaggtggatggtacatatcagttcaatttggaagggctagtcccaagactatgtgagctatctcaagaagtaggagaggatgagcagaccattgccctacgcgctgcagccctgcaagccctttcagctatgatttggttcatgggagagctctcacatatttcatcggaattcgataatgtggttcaagtagtacttgaaaactaccgacctcagaagatgcaaaatgatggtcaagttaccaaggattcaagcgaccagttggagcaagaagcccccaaaacggaggactccaaagcagaggactccaaaacggaggactcttccccctttgtcatctctgctgtccccttgtgggagaacatagttaatgttaagggtggagttaaccttactgtggaggaagcaaaggatcctaagttttggtccagaatatgtgtgcacaatatggctaggctttccagggaggcaacaacattccgtcgtatcctggagtctttgtttcggtacttcggcaacaacagttcatggtcacctgaaaatggacttgctctgtgtgtattgttggacatgcaactgttagtggaaaacgcaggacaaaacatgcacttaatgttgtctctactgataaagcatattgaacacaagaccatggtgaagcaacaggagatgcagcttagtatcgtggaggtagcagccaccctagcagaacaatccatcgctcaggcttcagcagcaactataggtgccataagtgatcttgtcaggcatttgaaaaggacatttcatattactctcggcagcaaagattcggagctagtaaaatggaatgaaaagttccgaaaggctatagatgattgtctaggacagctggcaaagaaggtaactgatgctggaccagttctggacatgatggccgtgatgctagaaaatattgctagcactcctgttgtagctagatcaactgcagctgctgtttatcgtacagctcaaataattgcttctgttccaaatattacctatcagaataaggtgtttccagaagctctgtttcatcagttgctcttaacgatgatccacccggatcatgaagctcgagtagctgcgcaccgcattttcgctattgtcttggtcccctcttccgttgccccctcgattcaagcaagtgtatcaggtcaggctaagaaacatgacatgcagaggacactctctagggctgtctcggtgttttcatcttcagctgccatctttgacaagttgaaaaaggacaagcactcagacaactcacaaggtgatagcagtggcttgcatagtatcagtgaagagtctagtaatgccaaacgttcgaacctacctgtgtctcaaagtcgccgacgtagcatgaaaattcctaatttttccatgaagaggggtccttcaatggctatgagagctccttcagtagccctgagagccccttccatatctctcagagttacttcgatgtctttgagagcaccttccatgtctataaaggcagaccatggttcctcaagccatccagaagatgaaatggaatcagttttgctgaagctgagcagtcgccagatcacacttttgctttcatccatttgggctcaagcaacatctcctgaaaatactccagcaaactatgaagccattgctcacacttatagtttgcttctattgttctctggagccaaggcatcagtttttgaggctcttactcagagttttcaggttgcattttcactgaggggctattcactgactgaaccagattcattaccaccatgtcggcgccgttccttgtttactcttgctacagctatgatcattttctcttcaagaactttcaacgtgttacctcttattccaatatgtaaacaaatgctgaatgagagaacaggtgatccattcctccgtttggtggatgagtgcaagcttcaggctgtgaaagattccgtggatgatccgtcgaaaatctacggatcaccagaggataatactaacgcactgaagtccctttcagcgatagaactatcagagagtcaatcccgagaatgcattgtctccacaatcatgaacaacataacaaatatgctagaggcggagttgaatagtgtgaagaatcaactgctaagcgatttctctcccgatgacatgtgtccaacaagcactcatttttttgaagcaactggtgataactcatcaccaggatctcatgataatgatcaccatccagaggctgtgctgatcgacctgggaaatgaccacgatatctttggggaagcttcagaaagtacagctgcttctgcaaatgctgtgcctgtaacagatcttctgagtatcgatcagcttcttgaaacagttgtcacagacccggcacctcatacagaacgagtgtctgtatcaacagacatgccattcaaggagatgagtagccaatgcgaagccctcactgtcaggaaacatcagaaaatggcctccttcatgagcttctcgcaggatatgacaatggatcccatggcaaccaatcagccgttccagacggatttgtcccttttccatgacccatatccgcctcaggttggggtgccgaacacgaatccgttcgtcgacgataacctgtatggttacccccagtacatgaacatgaacgaagccaatccacagccaacttatgagcaagcccagcaacatttcctgaggttgccggcatcaagtccatacgacaattttcgcagggctgctggttgttagaggttgagcctgcagcagcaagtctatcatgccaccaagttcttcacatagatgagcaaagaaaagaaatctcaagccgataataaaccgaatgatgtggcaattttccgtttattttgaaagaggaatatatgcatatccgtgtgcatggtcttagagggtcaaccggattcaacacccactcgattcgttctttatgtatagcggtatatacatatatataggttaattcttttttgtttgtttttgccattgcaacgtgtagagaagaaactgtggggagcagtgcctctatcacgagctatacatgtatgtgtgtatgtaacttgtgtcaaatgctgcaaattggagagtatatcatcacggaattggtgtggtctatgagaaaaagaggtgtctttcttgaaccagaaagagaagcctccctgttgacaacttcaaatgtaattatcattatgtaaatgggagcaccatctttgtcc

SEQ ID NO: 19869 - DNA, 1198 bp, Oryza sativa
  ref <308>: DATABASE ACCESSION NUMBER: AK070210
  ref <309>: DATABASE ENTRY DATE: 2001-12-06
gcgatcttccaagagtacatctccttcgtcgcctcgtgcggggccaagcagaattacctcccaccgttgccaccattgacgaggtgcaaccaggactcgggcttcttcaagctgtggaggaagacggtgctgccgtcgtgccaagcgccggagggcggcccacgcggcgtcggcgttggcggcggctcgcaccacgtcccgcggccgtcgatcagccgcggcacgcagcgcctctacgtccgcctcaacacgctcgagtacgtcctcacgcacctccacgccatcgacaagtcgctcgtcgccgcgccgtcgccacgcttcgacggcgcgcgcgccgcgacgaagtcggcgatcgcccgcgtcgccgaggtggcggcgttccgcctcgtgttcctcgactcgcgccactccttctaccacggcctctacctccgcggcgtcgccgacacgcggatcaggccggcgctgcgcgcgctgaagcagaacctgacgttcctggtgtcggtgctcgccgacagggcgcagccagtggcggtgcgggaggtgatgagggcgtcgttcgaggcgttcctgatggtgctcctcgccggcggcggcgaccggagcttcgcgaggggggaccacgccatggtggaggaggacttccggagcctgaggcgcgcgttctgcacgtgcggcgaggggctcgtgccggaggaggtggtggcgcgcgaggccgaggcggcggagcgcgtcgtggagctcatggcgcggccgacggacgccctcatcgacgcgttcggcgtcgccacgtccgagtccatcgtcgccgccgtggggcgcggcggcgacgacggcgacggcggctacggcggcgtgacgccggtgccgccgacgtcgaggcggtgggacgccgccgacgcgaacacgatcctccgcgtgctctgccaccgcgacgacgaggccgccagccagtttctgaagcgcacgttccagctcgccaagcgacgatgatcatgcaaaaaaagcttcgcgtcgtcccgtctccaagctcagcaatggcgcagccgcgcagtgtatccatcggagttgaagaagacggtagctacacgccatacagctctagatttttgcgatctttgcagtcggaattaaacctcataatctctcgaacgaactgtaaacccaacacaaatacgaatatgtaaaattttctggc

SEQ ID NO: 19870 - DNA, 1632 bp, Oryza sativa
  ref <308>: DATABASE ACCESSION NUMBER: AK070211
  ref <309>: DATABASE ENTRY DATE: 2001-12-06
ggttcgtttggatcccacgcaggccatcgccatgggcgtctcggctctcctccgcctgtagatcgtgtggatcgtgcttacctgcgatggatagggcgagcgagaaccggaggctggcggcggtggggaagcccgtgccggggatcggagagatggggaaccggaggccgctcagggacatcaacaacctcgtcggggcgccgccgcacccgtccgcgatcgccaagaagccgatgctagagaagagtgggaaggaagagcagaagcctgcattggtggtgagccaccggcctatgacgaggaatttcgcggcctccttgacgcgaaaagaacagcttgaccatcaggtttccgtggctgatgcagcggtcgtctgcactgatccacagaagaaccccatccccgatggcacagttgacgacgatgtggaatcgtgcgaatcgaacgactatattgccgtggatgaatgcaatgatactgatgaggatgagtccatgatggacattgacagtgccgactcagggaatccgcttgcagcaaccgagtacgtcgaagagttgtacaagttctatagagaaaatgaggaaatgagttgtgtgcagcctgattacatgtccagtcaaggagacataaatgaaaagatgagagcaattctgattgattggctcattgaggtccatcacaagtttgagctgatggatgagactctctttcttactgttaacatagtagacagattcttggaaaaacaagttgtgccaaggaagaagttgcagctagttggagtgacagctatgctccttgcttgcaaatatgaggaagtcgcagtccctgtcgtcgaggatctagtgctaatttctgaccgggcttatacaaaaggacaagttctggaaatggaaaagttgatcctaaacacactccagttcaacatgtctgtaccaacaccttacgtttttatgagacggtttctgaaggcagctcagtctgacaagcagctacagctactttcctttttcattctggagctctccctggtggaataccaaatgctcaagtaccgaccttcgcttcttgctgctgctgcagtttacacagcacaatgtgctctcactcgttgccagcagtggacaaagacctgcgaactacatagtagatataccggagagcagcttcttgagtgttctaggatgatggtagatttccaccagaaggcgggagcaggcaagctcaccggcgtgcaccggaaatacagtacgttcaagtttgggtgtgcagccaaaacggagcctgctctcttcttgcttgagtcaggagcaggaggttacaaccttcagaagcagccttgttgaatgaatctattcccctggatagatttttttaacttagcttcagaacaactacagcaagcatgttgatgcttcacaaaagtgcagcagatttaccttactacagctcttttgtggtaatgtaaacttggtgtgaatgatggataatctgggtggtggtcagtccttcagttatactggggggctaataaatgattcaggcattcagcctatgtaagctgaatctcttgtaaatctacatgtgttcaagtagcatgaagaaaataacttgcatgttgagacttcc

SEQ ID NO: 19871 - DNA, 3260 bp, Oryza sativa
  ref <308>: DATABASE ACCESSION NUMBER: AK070212
  ref <309>: DATABASE ENTRY DATE: 2001-12-06
ttattcggtgttatttgtggcttgtgaaaggaatgctgaagcacaactgggtttggatctatttgaacaattaaaaatagacagtattgacctcaatcccacaatcgttggttgtcttactggcttgtgtctacaaatgttcgacaatgatctttcactgggcaatatcgttgtcacattcaacttagggaaaccacagattgagaacaaatggacctcctcagcaattaaggtctaccgtgaggcaatttccacaggactattaccctcaagtgatgttttgtctcaagtgttgggatgtttaaggtttcctcatgataatacattaacaaatactttcattgaaaatatgggaataagttgtgatattccacatcatcccaatgtgaattcactgttggaaggttttggtgaatacgacattcgtgccttttcaatactggaggaagctgcttcgttaggagcagttgaaagtatttccatgaaagatacccgtattcttgttgatgcccgaaagtcaaagatctacactgcggaggtattttgctaattgcactttgcttgctttaataaatatatttttctcaataaataagtcacaacataagtgtgcagtactcatgtatctaagaacattatttgtagttaaaaccagttctatgttgaccactttctgttatataaacctggtgtgctgaataagtatgctttctgggttactacagtacttaatacttgttgctagtttacaaaactgcatattttccatgtatttcaactaatgctgccctctctgattagcacgactactttgcatagtggataggcatctttagaacctaaaactttattatgcatagtggtgtattacaaaatatgctttttttttgtttcttaatttactacataggagaggaatatgagagctaaataattagtattttccttctgtataagttttgcagacatatttcttcttggctgttgcttttgtcaatgacagggggacgatttccaagtgcatttatccttttataacctttccttataacatattacatgcgtatatacttcctttttttttttgacaggtttcagttcttacaacattgaggtctttaaagcatcgactagctgcaggtaaaatcattcagtgttttatgcctcaaatgatttactttgccttctgattagtgaattagctaaggttgaatagttggttgccatttcctgggtaagtttttactccctctgtctcattttaagtgcagccataagtttccatgtccaacgtttgaccgtccatcttatttgaaagagatagatttatgaaagaattttaaaaattaagggcctgttcactttgatgccaaaaaataccttgccaaaatttggcattgccaaaattttggtatgccaaaattttggcatgatttcttatatagttaccaaaatttggcagcaaactaaatgtagccacttttttttggcaacttcactaaaatttggtaaggttgaaaataacatcaaagtgaacaagccctaagtcacgtataaagtattattcatgttttatcatctaataacaaaataaatactaatctctactattataaaaattgaagatgtttccgccagaattttggtacgtcatctgtgattgaattggttttaattttatgtttctttcaaattctttccttttcttttacgccatagtgtccttatccgagacgcgtgcgaattaattgggtccgcaccttttcacacgccccttgccacacgtagcgtattaccggggataccgttacaataatctataagaatcagtcttactttcgaaaagaacatgctaactgaaataaaggatgatcgaagttcctgattctgtccgtcatcatttcctgcccgacttgagataaagttggacgacaaatcgagcttgtgtttgaaggcctcattgtttggcttatgcttatttctataagccaaattttaaattgtagaacttaattttgaatttgactttttgattttttatcgtatttttttaccgcatttgcttttgagttgttaagaacatgtatataaaagatttttacacaaatagttttttatttgattataagtgattcggataaacacatgaataaaagaaacaatggactgtgattatttatccaccgacacatatgtacaaattaaattggctctacccgttgcaacgcacgagcatctcttctagtcataaaatttcaaataagacggacggtcaaacgttgggcactgaaacccacaactgcgcttaatatgccacaactgcgcttaatatgggacaaagggagtactttctacaaacactttttttatagatctaggtctatttattctagtccaacttattccaaacattgagccattctggatagttagctttatctcattctttttggatctagtcaatctaggtcgattacaataacttgccaagataccaacacaacttttgtttgctgcctaacaagaagatattaatgcactttacacatgaaaccaatataggaacagggagaaactatttcagaatttacatcttgtctattaagtcgtaatgatttattgttccatgcaggcgcaaggttacccaacgtgacaatattattacccacagaaaagaaacaagtcggccttgatgaaagggagaagacacttaaacttgctggaagagtcggtcaagcagttggttccctgctgaggagattaggaatcaaatatcatggcgaggagtctcatggaaaaatgaggatcaacgggcttactctaagaaggtggttcaatccgaaattgacgagcacatcctccactggaacaccagctgacttgcttcctctgccgtcacgattagccaaaggaattgcagatcagcagcgcaacatcagaaacctttctcttgagtaatccatgattgaccttcctttctcgtggatcaatttttgcgtaccatcaagcaagggcaagagaaaaatcttagaaaccacccagaaaatagttcagcttgataaaatatgtaaagagtttctttgtttacaggaaatttatatatcatacatagacacttgtgtgcatcagattgcacaaacgcatatcaggatatagatcttcagctgcttttgcagatgaatttgtcttccatcttgtaacatggtgccaagatcacattgaaaataagaatataagaatggcgtggctgtgacgttttt

SEQ ID NO: 19872 - DNA, 1188 bp, Oryza sativa
  ref <308>: DATABASE ACCESSION NUMBER: AK070213
  ref <309>: DATABASE ENTRY DATE: 2001-12-06
ggctccagtctccaggaggagtggaagggctcggcaaacatcaggtagccgtccctcctttatccacttcgctctcttctctgcagcgctgcatcctactccctggttagcaatagcaagggtaggaagatgagcacgttagatgccacgcgagcagagctcggccttgttgttctgtacttgaacaaagccgaggccagggacaagatatgcagggcgatccaatacggctcgaagtttatcagtaacgggcagcctggcacggcacaggatgtcgacaggtccaccacccttgctcgcaaagttttccggcttctcaagtgggtcaatgatctgcatggtcttatcagccctcctgctaaggggactcctcttacactggtcttgcttgagaagtccaaaaatgcgctgctctcgactttcttgttcctggaccaatttgtatggttgggaagaacagggatatacaagaacaaggagcgcacagaccggattgtaaggatatccctctactgctggatggcctcttcagtctgtgcagggctagttgagcttggagagcttaagaggctatcaaaatcaatgaggaagctggcgagagagctgagggatactgacaaatatgagaatgaccagtacaagagcaagatgaaacagtcggatgaacggctgctagcactggtgaaggcggccatggatgttgtggtggccgtagggcttcttcagctgtcacccaagaagatcactccaagggtaacaggggcatttggattcgtcacctcactcatttcctgctatcagcaacttccatctcgtgctcccgctatcaaagtgaaggcatgatggatatttgccgttgtagcccaaagggagtccatcactggaatctgcagacgtaattcttaagcatggattgtgagataatctgtctatgataatcagtatagaatactttcagttgtacgtatggtttatggcttcacacaataccctcctgaactgtaatgaacatggtttatgtgttcatgcatgtcttctactttgtgctccaacatggctgccaaatttatactcattggagcatgtatgcccactactccccaacatgctagtagaatagaagtacaataatttcttttgagagagatatgttataatagttcttcactaatactaagtatctatggc

SEQ ID NO: 19873 - DNA, 854 bp, Oryza sativa
  ref <308>: DATABASE ACCESSION NUMBER: AK070214
  ref <309>: DATABASE ENTRY DATE: 2001-12-06
gactctctctctctctcgagctcgagctcgaacacttccaccccaagaagaggagaggaggggaggaggagaagaaaaatccttggaaagaagcatgacgacgctggggaagaggcacaggaacaacagctcgatgcggcggacgacgagcatgtcggggttcgcggtggcggaggaggaggagcagcaggggaggcagccgccggcgcgggcggcgaggggcggcggaggtggtggctcggcggcgccctcgcccgggtggggcgccatgcagaggaggcactccggcgacttcgccgtggcggagacggcggcgttcctcaaggcgtgcggcatctgcaaccgccgcctcggccccggccgcgacaccttcatttacatgggtgaagtggccttctgcagccatgagtgcaggcaacagcagatgaacctggatgagctcaacgagaagaaatgcttccagcgggaaggcggcggcggctctgacaagtccggcaacagcggcgccgtagccgccgcctagcatcgccggagtagggaaaaaattatgaaaaaaaaatggagaaattttggcatccttacaggaaaccaaatatatctatatatgtggtgtaactgtgtatattggtggctcaggataattatgagccaaagggggagggaattatgtagagattggaattgggctagctaaaggttttcggattgcaatgcatctggagcaagattaggccgtgggatttggagctgttttgagaactttatgaaggatgaacttaagttctccagattgttggaaaatgtgcaccacccttcttgaatttttgaattacttcttgcagttaatattttgt

SEQ ID NO: 19874 - DNA, 1107 bp, Oryza sativa
  ref <308>: DATABASE ACCESSION NUMBER: AK070215
  ref <309>: DATABASE ENTRY DATE: 2001-12-06
gtcttgtctccttccttccgccgccgccgaagcagaagaggaagaagagagaagaaagaagcattggcgatggctgcggcggagggccccgttctcctcttcccctctacctcgtcgacgtccgcccgggtggaggcggtcgtcgtgttcaacatctgcgacagctacgtgcgccgccccgaccaggcggagcgcgtcatcggcaccctcctcggctccgtcctccccgacggcaccgtccatgtccgcaactcctacgtcgtcccccacaacgagtcccccgaccaggttgctctcgacatcgagtaccaccacaacatgtatgcgtcgcaccacaaggtcaaccccaaggaagtcattgttggatggttctcgactggcttcggtgtttctgggggaagtacgcttatccatgatttttactcaagagaagtacagagccccattcatctcactgttgacactgggttcacaaggggcgatgcttcaatcaaagcctatatctcatccaacctgtctcttggagataggcaccttgctgcgcagttccaagagattccccttgatctgaggatgcttgaagcaggaaaagttggatttgacatcctgaaatctacaattgtggagaagctccccaatgatctggaaggaatggaatcctccatggaaaagctgtatgtccttattgacgagatctacaaatatgttgatgatgtcgtggaggggcgtgtagcaccggacaataaaattgggagattcatctctgatgctgttgcttcaatgccaaaattgtcaccagctgcttttgacaagcttttcaatgacaggattcaggataatcttgcactggtgtacctgtcaagcatcacaaggacacagattagcatagccgagaagttgaacaccgccgcccaaatcctgtaatttccatgtagttggagcatctgggagtctgacttaaaatgctgttttgtttgtttttcattcgcacgactgaaaaattgggatatgatggcagagtatgcatttttgtacttgttatctgaggcctaaagaaaagaaaccatcatgtttcagatgataatgtttgtgttggaggttgggtgc

SEQ ID NO: 19875 - DNA, 2944 bp, Oryza sativa
  ref <308>: DATABASE ACCESSION NUMBER: AK070216
  ref <309>: DATABASE ENTRY DATE: 2001-12-06
gatctctcgtgctcagctcgcagccaaaaaccccaaggcgctctcacgacggcaggagctagcttagctgcagaaaaagcaggtgacgttgaattctgatttctgaacgagttgcagcagcatagcgacaatggacgccggcgacgccatggagagaggccagcagcggctgccagaggtaagcatatgcacaacttcacaactatctcgttctcctcctctcaccggtttcgctcatcatgaattgatctttcttagtactccagtttgcaacttggaaacaagcgatggcagtgagaatgcacgcatatggatcataactatagcatagtaattttcaggcatgctgttattggtttcaccttctttaaattcagagttcagattgaagaatgggttgttatcaggttcaccaaaatgacagaacagaggtgaataggtgaacgaaggaaacagtcatggtctacatctatgtggtgcagttgcaccactatttgacccttttctacgcaagatagagaataatgttacggctaagacgaaccgtatccaaacacactatagtcgtacgacgtattggcacgttgccacgagggtgagttggtggcaacacactcattggtcaggtctccatggttaaaacgagcgtgaaaaattctgaagtcagaaaaaattaatagtgtgtgtttaatactaagaaattttgtcagacttttcacgcataagtttaaaaaaaagttggtcagaaaactaaagcaacagaacacatacacacaagtgcaccacaaccaccgtatacctttcgtattcatctgtacaaagctgcttcctttatccctttacgattttcaagtacaatcgctgacgtctacaacaacgccgcaaaaactttgatggcttgttcagatatacaagaaataaaaaaaaatgtaaactgacatgttctccccaaactttgaacttgatctgcagagctggaacccgaaactccaggacgacgtcagcctgacggtgccactcatccaggacaagaagagcgggagcaaagcgccggcggtggtgctaggattcgagtgcttggagtgcacagcgttcaacggcattgccacgaacctggtggtgtacctggagaccgtcctgcacggcagcagcctcgcgagcgcgtccaatgtcacgacgtggttcggcacgagctacctcacgccggtgttcggcgccatcatcgccgacacgttcttcggcaactacaacaccatcctcgtctccctcgtgttctacctcctgggcatggtgctggtcaccttctcggcgttcctgccgaccaccgcgctgtgcgccgtggcgggctcgacgtcgtgccagcagcctgtgtttggcgcgcagaccatcgccttcgtggggctctacctcgtggcgttcggcagcggcggcgtgcgcgcggcgctgctgccgttcggcgcggagcagttcgacgacgacaacgcggtggaccgggagcggaagatgtccttcttcagctggttctacatgtgcgtcgacttcgggatgatcgtgtcgggcctattcatcgtgtggatccagcagaacgtgagctggggactcggcttcggcatcgccacggtttgcgtcgcgatcgcgttcggcggcttcgtgctcgccacgcccatgtacaagcgcagcatgcccaccggcacgccgctcaagagcctcgcccaggtggtggtcgccgcgtgccggaaggtcagcctccgtgtccccgccgacgccgccctcctctacgaggtccatgacaagatcgatcagcccaagatcacgcacaccgacgagttcagctttcttgacaaggcggcggtgatcgtgcagtccgacctggaagaggactcgaacgacgcctcggcggcggccgcgggctcgtggaggctatgcacggtgacgcaggtggaggagctcaagatcctgatgcggctgctgccgatatgggcgacgagcatcgtgctgtcggcggcgtacgcgcagctgaacaccacgttcgtgcagcagggcgccgcgatgaacatgcggatcatgtcgttcaccatccccgccgcgtcgatggtgtccttcgaggtgttctgcgtcctggcatgggtgctcgtccacggctcggtgatcgtgccgctcctcaggagcttctccccggccaacggcgagccgtcgcagctgcggcgcatgggcgccggccgtctgctcatcgcggtcgccatggccatcgccgcgctggtggagatggtgcgcctcgacgcggcggcgcgcggcgagtccctgagcatcgcgtggcagatgccgcagtacttcatgctggccggcggtgaggtgttctgctacatcgcgcagctggagttcttctacagcgaggcgccggagtccatgaagagcatctgcacgtcgctggcgctgctcaccgtggcgctgggaagctacatgagctccttcatctacgccgtcgtgaacgcgttcaccgccgtggacggccggcccgggtggatttcggacaacctcaacgagggacacctggactacttcttctgggtcatgtcggcgctgtgcacgctcaacttcgtcgtgtacagcgcgttcgcgcggaactacaaggtgaagacggtcgtgtcatgatcgctcgcccacacgtccgcgcgtacataggcaaaacaaggtagcgttaggaacggggtgcgtccaggaaatacacgggacacgtccggtgcacctgcgaaacggtttttgtatcgcagcgaccaatatcttctggctgctgctgatcgacgccatcgtgttccttgttgtttattgtttctttctttttgtcggttttactggaaaggaaatacggatgggcaacaggacatccatgaactttatttatgctgtggtcctgaaagaaaaaacagaaggaaatgcaatgtgg

SEQ ID NO: 19876 - DNA, 2298 bp, Oryza sativa
  ref <308>: DATABASE ACCESSION NUMBER: AK070217
  ref <309>: DATABASE ENTRY DATE: 2001-12-06
ggtggacggacacggagcagatagccagcaggagtccgtcgccgttggtgggaacgagacggttgccgcgcccgcgcgcgagatcggagctccggggaggcgaggcgcaggcgcaggtgggcgcgtgttcttcgtcgggggcaccccgttcgcgctctaccgggagggatccgcggggcggggagtggtggggaacgccgcgagcgcagccgggatgggcgccgaggaggaggaggagccggcgtcggccgtcgggagggaggggggaggaggaggaggcggggcgagggccgcgggggcgggggcggggggcgacaccgccgacgacgacgacagcggggagagcgccgcggcggtggtcccgtgctcgatctgcctcgacgcggtggtcgccggcggcggggacaggtccacggcgaggctgcagtgcggccacgagttccacctcgattgcattggttcagcatttaatgccaaaggagttatgcaatgccccaactgtcgccaaattgagagggggaattggctctatgcaaatggttcgcgtccatcacaggatgtaagtaatgatgattggggtcatgatgaagacttttatgatgctaatcaaccagagacatcaaggagtgtctttttgccattccgcttccaatggtgtcctattggccgcttagcccaacttccatctgtatttgatgaaggagagtcagcaccacccgtaacctttcatgatttcatgggacagaacttcacttctgagcatttgcctgtatcagcacctggggcaactcctccaggcccatatatcgcttactttcagcctcttcaatcatcggcatcatcatcaagttcccatgtcactgaaagaactatggatggcaccacctatcatgatcactggaaccccctacctgggccatcagatggtcgaccattggctacagtgcatcccattgatttccatcataaccactggacgcacctgcccaactcctattctcaacccaacagcaataatggtgtagctgagcagatggcaatccctgtggtaccaatgagggttgggggccttgatagtgatagccaacagcgaggatctctcccctcagtttatggaaatgggtaagtttcatttctttctaagttatgaattgactgcttccttcagtaagacttgcatgctgcctctatccagagaaaatgcctacagttctaagataaaatttctctggtagcctgtgacaattgtagctaaatttgatatttcaggtgttataaacaaaaggtatctcattgacttattctttagtgaatattgtatgcaaacagaattaagttcctttggactaaatgttgacaaaaaaaacctagaagaatgatgatttttttaatcttttctgcattatgattatatggtagttacattgccaaagctctgctgtggctattggaaaaatagttacacctatgcatggttcagtacctgcctttttgtttattattgtacgatatatcttaacgcctaagactcgtgtgtttttggtttcacagatctggatcaaggtctagaattccaagtgtttctcctatggcaccacaattcatgaggccgcatggtaacatcaacgaacaatatcagcagaattcgtccagcctgtatgctgcgccgcagcgtaggactgccgtgcaggctgtccaagacagcatgaactttaccctgttcccgcaggctccaactggccctaattcaatggagacggaggatgccggaggcaaccagttctatgcctgggagagggaccgcttcgccccttacccgctaatgcccgtagattctgaagcaaactggtggggcagcacgccgcaatcccatggcgtgacggatcattcagctgcccccggtaggaggctatttggtcaatggatcggcgccgggaggtcgccaccgccgcctccaccgccaccagcggacaactcgtcgtaccgacagatgcacatccctcggatgtagcttagccccccgaccgtcgcctgaaccaacaaagttaaatataagaacctggaaaaaacccctgtttggctgtaagaaagtagggtgaagacaccggttgtatgtcgtcctgtgtttgcgtggtaattagactcccgagacaaatatgcaggcaggtgaaaaaagaacaccaagaacgcaaacccaaactacccaaggaggaaaaacgtttcagcttgggtgtttatgtggaattcggttcggtgaagcatcatagtacatattccaagccatgttggggcttcttt

SEQ ID NO: 19877 - DNA, 2125 bp, Oryza sativa
  ref <308>: DATABASE ACCESSION NUMBER: AK070218
  ref <309>: DATABASE ENTRY DATE: 2001-12-06
gacgtctctctcgcacactcccactattctcctgctcctcctccctgatcttccctctctcgctgccgctcctcttctcgccggccgcctcagcctgcggcgagctcttcgtccagccagtgcacccgaggagcttaggccggatcctgggatccgtaggagaaaccttgctcgggttccggagaatgtgaccggagcaaccgcggcttcaaatcagaaaaggctacagcaggggagcaacaggggcggtggtggcgcgcggcagcagcagcaccaggccggccaatggcgcagttgccatcaatgctgccgcgccggcggttgggtcggcgccggcggaggtggccagattccactcccaaccaccacaacaggataggcagagtagatgggctggctgtttttctgccttgtcatgttttggatcacagaagggtggaaaacgaatagttcctgcagcacgtatacctgatggcaatgcgtcaactagtcgtggaaatgcacaccaatctggtagcaattccaaccaaaatgtggctctgaatttatctcttcttgctccaccatcttctccggcgtccttctcaaattctgcaattccttcaactgcccagtcacctaatcgcttcttgtcaatatctgcaaactctcctggtgggccaacatctaatatgttcgctgttgggccgtatgctaacgagcctcagcttgtctcacctccagtcttctcaacttacacaactgagccttccacagcaccactgacccctccacctgaactaactcatgcaactactccctcctctccagatgttccatatgctcggtttcttttttcagctatggatcttaaaactgctggcaaggatcacaacatgccgtacttatctacagcatattccggaggttcaggactccaggcatcttatccgctttacccagaaagcccttctagcagcctcatatcgcctgcttcagcaactccaaggactggtctttcatcacctatccctgagcaagaggtgcctactgcacattggaagacatctaggtccgcctgtgacacaccatattccagggcttcaccaatacctgagcaagaggtccctacggcacagtggaagacgtctaggtctgcctgtgacacaccatattccaggaattcaccgtccaatatttttgggcttgattcagctgcttctagaaactacatgttagataataacttctttcggccagctgcatctgcccagttctacctggatcaggctcagcagtcatttccatataataatggaggaaggattagcgtctcaagggacaaacaagacgctgaggaggttgaagcatacagagcatcttttggatttagcgcagatgaaatcgttacaactcaagcttatgtggagataccagatgcgcttgatgagggattcagtatatctccatttggaaacaatgctcctgctaccgaggtagataaaccactcttcaatgtaaaagtgaccacaagcccaaagaaatctgcagaccagctttccaacgactctccacataatgtggtgcacttggacatattcaaaggaacaaaaggaggggatctatctgaggatgaaggggtcgtgaaagattgtcatcctttcagaaaggcgatggatgaaatatctctaaaacccatagaagtcaggaagaaagttcagcctggacagtcatcttcctcagatgcagaaatcgagtacagaagggctaggagtttaagagaagccaatggagttttgtcatggcgcagcaccctggcaaggcaactacagtaacgatgtggtaatacgcaggataagatagaatgcagagttcccttggcctagcgttcatcaatttgagctgttgttagaagtaaaatctttaggcgaagagtagcccgtactgtatttctggggatttctactgccagatcatgctctggatatgtgactatcagcctgtattctatttaaattccaagttcgtcttttgtagacactctgttcgttagctgaatcacagaatcagtgaaatggaagtgcattttgaggagagatggagaggttgctcggctcccaatccatttcctcctgtactgctgatc

SEQ ID NO: 19878 - DNA, 2098 bp, Oryza sativa
  ref <308>: DATABASE ACCESSION NUMBER: AK070219
  ref <309>: DATABASE ENTRY DATE: 2001-12-06
ggggagaggggacatgaaggcgctgcggcgatccagcacctcgtcctccccgtcgtcgtcgtcctcgtcgccgacggccgcgtcgtccccgccgtcctcgtcgtggatccacctccggtcgctgctcgtcgccgcggcgtcgtcgtcttcgtcggcgtcgtcgtcggcggcggcgggaagctccgtggccatggtgtccgcttcggcgcccgccgcgtcgtcgtcgccgtcgccgtcgccagcgcccgcccccgcgccgtcctcgccgcactcggatcggggtggaataaagtctccatggtctcgaaggaaaagaaaacgagtactttctcgtcaacaatgggaaggtctgttttctgctaatgggaaacttcgtgatcgaggaaagaagtttctgaagaaagttcgcagcgggggcattgaaccaggaatcagggctgaagtttggcccttcctgctaggagtctatgatttaaatagcacagaagacgaaaggaataccatcaaaatcaagaaaaggaaagagtatgaaaagttgaggcgacagtgccagcaaattctgaattgttacaagggcaatgggctgaaagtaataaatgaaaataatgaggagtgttctggtatagagtttagtgctgaaggatcagaatcaccttgttttgaagatgtcaatattgcaagggcttctgtgtcacatgaggagctgaaacctgaatccgagcctgagcaaccagataactcaatgtgtgctgttacagaatgtatggaagaagacacgggtgaattaatttgtttagatccttgcatagcagagtcagaatcttctgattctgaatcatctgatgaagatgaccctggaaggatatcgatgtctggtgaggaaaattgtgatccagatcctaaatttaccaggactacttcattcaaggcagacttttttaagtctagcaagacttcagaggattttgccacgtggcaacgcattataaggttggatgctatccgagcaaacacagaatggattctgttctctcgcaaccaggccgaaatttctagagagagagctttgcagtgtgcagaatctgttgggttaagagattatgaccatttagatcccagtatgatttatcatgctgctcgattagtggggcttcttgaagcatatgcggtctatgatccagaaatcggttactgtcaaggtatgagtgatcttttatctccaataattgcagtgatggaggaggacgatgaagcattttggtgctttgtgggtttcatgaggaaagccaggcacaacttcaggcttgatgaggttggaataagaaggcagttgaagattgtctctcagattatcaagcgaaaagattcgcacctgtacaagcacctgcagaagctgcaagctgaggactgcttctttgtgtacagaatggtagtggttctcttcaggagggagctcacctttgagcagaccgtatgcctttgggaggttatgtgggctgatcaggcggcgattcgcgctggtattgggagatccacctgggcaaaaataaggttgcgtgctccaccaaccgacgacttgttgctttatgccattgcggcttgcgtcctccagaggaggaagctgataatcgagaagtatagtagcatggacgagatattgcgagaatgcaatagcatggctgggcaactggacgtctggaggctactcgacgacgcacacgacctggttgttaacttccacgacaaaatctgatctgagggatgcgtttctctttgttcttgcggtagaacaaatatagacctcgacattttttttttttgggggggggggggggggggtttctttgctgcttgcagaaaagtgttatgttccctgtagctcgtaccggcatagaacattagaacccacttctaagtatagagattgttgtaacttaaaaagagtgaggactcgagtgttcctcacacacgaagatcagcaatactgcttgatgttactgaggctctgcagactactactattcattgtttaacctgttataggcacggacagatttttcattgaaaggtatatctgtgtatgcctgtatggtctgtc

SEQ ID NO: 19879 - DNA, 2027 bp, Oryza sativa
  ref <308>: DATABASE ACCESSION NUMBER: AK070220
  ref <309>: DATABASE ENTRY DATE: 2001-12-06
gtaggtctttctttctttccagggctacgcaggcggcgatgaatccaggatgctccgccgccgcctctccgatacctccgccaagattggtgtcggtcccaatagagcggctgtcgctacctccatgctccgcaaatatggtgctcaaattggagtcgccatactagacgatgggatgcagcacctcagcttgcttcgagatgttgacattgtcatgatcaacgccctcaatccttgggggaacaaacatctcattccacgaggacccatgagggaaccactcactgcactcaccagagctcatattctcctcattcatcatgctaacctggtttctcaaccacaacttaaaacaattctttccacggtccacgacaatggcgcaacatgtccagtcttctttagtaaattggtaccatcgcatatttttcaagtcaaccaacccatgcacaggcttcctcttcatgtgctgcacggtataatcgtgctatgcgtttctgctattggctgcccagatgctttcattcattctgttcaagaggtattcccacctttcttgtttttatcactttgtctacaaacttttgtccttgtcctacctatcatcaaatatggaacgatggttgttgtgaggttgtaatccttttcattataaggtaacctatgcattattgcaatttaatgctaccaggctaactgttaatcaacccccacctcctctgaagaaatgagtgatacaatgacagataaatctgcaatagaaagaagataaaaaaaaagatgtaatccaagtaacaaaatatggtgtagtttctctgctcccaactggagtataagaaataccttttttttgcaaagctgcaaaaggtggctgtcttcctttaatgtttactattagagctctcagctaaaacaaacaagacagtcaaatcaccacatgattggtacattctttctggctcatttgcaatgcttgcttttgggtgtaggcttttactacatcctgtccaaagttggtaattccatggttcaaaaatgattgtgaatggagatatctaccaaatattggatctatgtgttgctctgctcaattttggttaattcatgccatgctagatttaaacacaaatctgaattgagtagtcagctaatccttgtcatcaggaaattttagaatgttattcattcattggctgtagattggccctctcaagattgaaaggttggatttcagcgatcaccattccttcagttctcatgtaagtaacaccatattgacattggcagagtgaccattccttcaacaattgaagatgcacgcactttcaaaatgtgattagattgaaaagctcaatgatacatagtttgagcatgcgcatgcaaacctttctttccaatgtatctgtaatattaactgtttcctaaaataaagagaacatatctaattgttagctcagtggtactagtctagatgttgcaacgcagcatttttgtcaatctatagtttcttagtgctaccactctgttgattcttacatggtgattgtttttctctcgttgttgcatacaataggacctgcagcttatccaagacacgttgaagaagcttgtgtatcagcacaaaaataatgctgttgtcttggttacagagaaggattatgaccgtgatccagatgtccttagggcactggatgcaaaggtttgggtgttgtcgtcttgtctgcaaattataccccatgagggacaaggagatgatgaatttatgaggaaagtgagggagattattacagcgagtaggcacgtgaaattataggagggggcctagccaagagttgctgaacatttagttagaaccagctgtaaaagaattttgaggcaaaactattttgccagtaggatctggtactgctgcatcttgttcaggattggtcgatcaattcaattcctgttgcagaatatgcattattgatctagttgtatttccgttggatcaatgaattaaaaccccaattttagctgggcttgat

SEQ ID NO: 19880 - DNA, 2133 bp, Oryza sativa
  misc_feature (921)..(921): "n"=any one base of a, t, c, or g
  misc_feature (935)..(935): "n"=any one base of a, t, c, or g
  ref <308>: DATABASE ACCESSION NUMBER: AK070221
  ref <309>: DATABASE ENTRY DATE: 2001-12-06
aaatcctcatgagtcttttgaagaattaaaatctattattgcatgtgagctggctgatccggcctggccttcttctctcctgaatgatgtcctattaactctacatgctaggttcaaggcaactcctgatatggccgtgactctgcttgagattgctagaatttttgctaccaaagttcctggcaagatcgatgctgatgtactacaactcctgtggaagacatgccttgttggagcaggaccagatggaaaacatacagctttggaagctgtgacaatagtccttgatctaccaccacctcagcctggttcaatgtctggatttgcatctgtcgatatggtatctgcctccgatccaaaatcagctatggcactgcaaagattagttcaagctgcggtttggtttctaggtgaaaatgcaaattatgctgcttctgaatatgcctgggagtctgcaacacctcctggtactgcactaatgatgcttgatgctgataaaatggttgctgcagctagctctcgcaatcctacgcttgctagtgctttgacacgtctgcaaaggtgtgcattcagcggtagctgggagatccgtattgctgctgtccaagccctaaccaccattgcaataaggtctggtgaaccttacagactgcagatatatgagtttcttcatgctttagctctagggggtgtacaatcaaacttttcagaattgcagctaagtaatggggaaaaccaaggtgctagtggtactggtcttggatcattgataagcccaatgctcaaggtcctggatgaaatgtatagagctcaagatgatctcgctagggatatccgtcagcatgataatagtaagcaagaatggaatgatgatgaacttaagaaactttatgagacccacgagaggcttcttgatttcgnctctttgttctgtnttgttccaagggccaagtacttgcctttaggtcctaccagtgcgaaactcattgacatctaccgcaaccggcataacattagtacttcttctggtctaagtgatcctgctgttgctactggcatatctgatctcatgtatgagcccaaagatgtgcccaaagaggccactcttatacagactggaattgaccctgatctggctatggcctgggcagcaggtttggaagatgatgtttgggaaaacaacgcaccagctgtggataaagtaaaggatttccttgctggcgctggaactgatgctcctgatgtggatgatgaggaatacatgaattctaggccatcagtcggttatgatgatatgtgggccaagacaattcttgaaacatatgaagcagaggatgatgatggaagatcatctgggggatcctctcctgagtcaactggttctgtagaaacatccatatcgtcccattttagtggcatgaactatccgtcgttgttcagttcaaaaccatcaggatatggggcttcacaacaaacgatacgtgaagaaccaccatcatattcaacatcagttctacagaaacgtgagtcattcgaaaacccccttgctgggcgtggtggtcggagttttggatcccatgaggacgaagacaggagttcagggaaccctcaatctgggaaagcactgtatgacttcacagcaggtggcgatgatgagttgagtttaactgctggagaagatgtggaaatcgaatatgaggtcgatggttggtactatgtaaagaagaagagacccggaagggatggaaagacagcaggtctggtccctgttctgtatgtgaattcgtgatagctatgagtcctgtgacataatgctctcgaaagctgattcggagtaaacgggcatacatatggcgtctggggaggttccttctgtgatcttagtagtgcacataaccttttttgagctccctagcatttgacaggcacatgtccttgttggaggccaaattcaatcatcgtgatgtctgtaagacgcagcaattttcttgctggttgtgtttctttgctttatacacaccacgagtccattcaattcattgtttatgtgtagagatgtacacgtgcttcggggttttacctttcgtgtgctattctggcccgtctgttatgattgaaagacgcagtttactc

SEQ ID NO: 19881 - DNA, 1377 bp, Oryza sativa
  ref <308>: DATABASE ACCESSION NUMBER: AK070222
  ref <309>: DATABASE ENTRY DATE: 2001-12-06
ggatctaccatgcgcggtggatatcgattaggcgtcgtctcatcgtcttcctcctcgcgtgcggcggcggcgcgccagtggccgtgactgactctgcgccggcggcggcggcggcgtgcaccggcgaatccccttgcgggaacggaggtctaaagcctctcccgccaccactatcccttcctcttcggctcacgctcccgtccccaataacctccgctttcgtcagctccattcttgcaggcgtctctcctcggctccgctcgcttcggacagtccgaaggctaagcttatacttggtggcgcggtgctgcctgaagcagatggctatctacacacctactgtctgtttacaacgctgtacttatagcttgtattctcagtcttgtcagttacaaggagggctgacacagggcatggcattatggaagtattctcgttcacaagcagtcggttatcatgtaaagatcagattagttggtttgcctcctaagatgaacataaaatcactgcgaacatgttttgccagttcggggaaacagttgtgtggcagacaacctgcgagggataatattctaaagctaaagcttgatgagccctcacgtcagaagttgtatagtattctctgggattcaagaagcataggacacaaagttggagctacaggcactggacttttcctaagttttgcagttcctgcgaaggcaaatgctgagggtcctgtggacaataatactgatagcccccaaactactgaatcgtccactagttatgctcatgggaaaaaagtttgcacggattattctgttactggcattcctggagatggaaggtgcttgttccgatctgtggctcatggtgcatgtattaggtcaggtaagcgacctgatgatgatctccagagaaagatggctgatgacttaagagcaatggtcgccgatgaatttatcaagagacgggcagagactgaatggtttgttgagggggacttcgatgcatatgtctctcggattaggaagccacatgtgtggggaggtgaaccagaactgttaatggcttcgcatgttcttcggatgccaattactgtgtacatgcatgataaggaagctggtggtttaatagcaattgcagaatatggtcaggagtacgggaaagaagatccaattcaagttctttttcatggttttggccattatgacgctctacagataccaggaaagggtggtccaaggtcaaggctgtaacatttggagctcagattccaaacagtaagttttgaaccaacctttgtttccctttcttttcccagtacgcttgctgtccaaatgtaaccagaatctaccctcaacaaatttaaaatgctgcgatgttccaagttcc

SEQ ID NO: 19882 - DNA, 1682 bp, Oryza sativa
  ref <308>: DATABASE ACCESSION NUMBER: AK070223
  ref <309>: DATABASE ENTRY DATE: 2001-12-06
gagaggcggctcgccggctcgagctcgactgctccccactcgcggccgggagggagggagggggagagaaaggagagaggtgattcgatggaggcgaagggggagaatgacgcgcgggcgccgctcctggcggagcggcggcgcaactcggtcgggtcgatgcgcggggagttcgtgtcgcggctgcccaagaaggtgctcgacgccgtcgaccccgagaggccgtcccacgtcgacttctcccgctccaagggcctccgcgaaggagagaaagaatactatgagaaacaatttgccaccttgagatcctttgaggaagttgattcaatagaagaatccaatgtaatgagtgaagaagatgatattgcggagcaaaagcagagtgagtttgccatgaagatatcaaactatgcaaacatgattcttttggcgttgaagatatatgctacaattaaaagtggatcaattgctatagctgcctcgacattggactcgctgcttgatctcatggctggtggtatcctttggttcacacatctctcgatgaagagcatcaacgtctacaagtatcctattggtaaactgagggtgcagcctgttggaatcatcatctttgctgctgtaatggctacattagggttccaagtatttgttcaagctgtggaaaagctgatagtgaacgagactccagataaattgactccagtgcagctcacatggctatattctatcatgatttttgcaacagtagttaagctagccctctggctctactgcagaacatctggtaacaagatagtccgtgcctatgctaaggatcattattttgacgtcgtcacgaatgttgtgggtttggctgctgctgtccttggtgatatgttctactggtggattgacccagttggtgcaattgcccttgcagtgtacacaattacaaactggtctggaacggtgtgggaaaatgcagtgtcactagtgggtgaatcagctccgccagaaatgctgcagaagttgacatatttggccatcagacatcatcctcaaatcaagcgtgtcgatacagttcgagcatacacctttggggttctttactttgttgaggttgacattgagctgccagaggaattgccccttaaggaggcacatgctattggagaatcacttcaaataaagatcgaggagctcccagaagtcgagcgggcatttgttcaccttgatttcgagtgtgaccacaagccagagcacaacattctcagcaagttgcctagcagccaaccatgaccaccaacttgaattccaccgtgaaacgaattagctggcttgttcgcttgccatgcaggatgtgctacagtacgtgccgcattatgctatatgaaacggctgaagacaaatgagattgtctggccatcatttctgaaagtaggcctaagagaatactgtattagttaagtgcctatattagagattatgtggactgaacttgtgcatccctctgtttaagagttttgttgtgaggaaagttcagcacaaaggggaaatcacgttctggatgatctcaagcaatttttttgttctgaaattcaggtcagttgtaaatattgtctggtttgcttaacaatggtgtgtaagtgccctacattgctgggaaggtcaaggtgtatgtgctaaaagaaactcatttt

SEQ ID NO: 19883 - DNA, 2644 bp, Oryza sativa
  ref <308>: DATABASE ACCESSION NUMBER: AK099129
  ref <309>: DATABASE ENTRY DATE: 2002-08-28
gattactgcaactcatcctcaatcggaacaagcagcgtcgccggcaacttcacctatgccgacgcgagcagcgagggcagcatggtgaccgcctccgtgctcatgttcgtcctcgccggattcttcttcatcctcaacctcttcggcggcctctccaatgtgggcgccatactcagcccgcgtgtccgcctcctcttcacctccctgctctccctcttcctcctcgtcatgtcctacctcttatccgaggccaagaacacggccaaggagctcgaccaggtcaccaccgtcatcggcatcggccgcgcatcgtcgacggacctcccgttcatggcaggggtcatcctcacctggatgctcctcgtcgagctcatccgcaagaaggtggacgagatcgccatgaaaggctactcgggcaccatccaccgtgccggccgtgtcgtctggctcggcagcctcgtcttcgtcaacatccgcagcgccggccggaaggccgtgttcggcgtcctctgggttctctgcgccaccaaggtggtgcaacggatcgccttcaccgaggtcggcaaacgctcctacgcctgcggcaagaacccttggattatcacctcctacatgatgtccacctcgccgtcgctgccggcccaaggcgacgccatgctaaagggttgcaggtacatcgtgacgggagaggaagatgcgcgtgttgaagccaccgccgacggctacaagttgaaggaggacagcaagtcgtccctcgtcaccgtcggcaaaatctgggtggagcaagggctacctggaacgggaaataatggtggcgacgagaaggcggagctcaagaggctgtgcctctctttcgcgctatccaaactgctgcgacggaggctggagcagctgccggtgccggagccggagatgagcagcgcggagaccagcgagtgccgcgacgtcatcttcaacggcctctacaagagcggcgacgcggtggcggtgttcgaggtgatgaacagcgagatcaacttcctgagcgagtactaccactccgtcgtccccgtcgtcctggcctccccattcttcttcgtcgccaactacttcctcctccccgtcgtcgtcctgtgcgtctgcgtcatgaccatcatcctctgcggcggcggcgacgtgctgtacgcgttccggagcatcaagacggacaacttcaccatctcctcgggcatattcgacaccaccatgtgcctcctcctgaccgcgcatcactcggccgccgccttcttcgccaccatcaacttcgccgtcaccttcctcctctacatcatctacatctacgaggaggtgtgggagttgttcgtcttcctcctctccaactggttcgcggtctcgctgctctccgcctacgtcgccaagacccgcttctgcgacaactccgccttccgtgctttcgcccgctgcatcctctccgtccggacatggctgggcttccatctccatccccaagatatgatcaaccaattctccgcgctcgacctccgttggccgccgctcaccctcgccatgcccatccctctcatcaccttgctcgtctccaccaagcccgtccccgtccccgtcccagtcaagcactccatcctcctcagctccctcgcctccgcctccgcctccgcctccaccaagtctgctctagcgagcttcgacgagctcaagacggcgtgcgagaacggcagcatcgcggaggtgatcctcatatgccacatcgccaccggtctcctggaacgcctcaatcctccgcctgatccggaggtgatgaccaccgagtccgacagcaagcggatgagctgctgcggctgtccgaacaagaagaagaagaacactagtagtgacaatttcaccgtcgcgacgacgctgtccagatactgcgcgtacctggtggcgttccaaccggagctccttccggactaccatgagaaggcggaggatctgttcaaggccatgaaaatggagctcaaagacaggctcggatgttacaactactacttctcgtgcggccgtgagcgagccgacgccatcatcaacaacatcaacagcaagaataacaacaaggagggaaccgtggacaagggcgcagagttggccaacaagttgctagaaaaatacacgaatgatcatgattcgatgtggacgcttctggcggaggtgtggacggagatcatcgtgtacgtggctccgtccaacgaggagcgtactatcatggcgcacaagaatgtgctatggcagggaggcgagttcatcaccgtgctttgggctctcatgactcacaccggcattacccgacaccgccgcctccgcgaaatcgctctcaaaatttcccaagacgacgccagcacgtcgtcgtcccaacaaaaatccgcaccggaccggatcgataagcagcacgaaatcgatatccatcgtcactagctaatgtgtgtaaatttgcttgcttgcttgatcgattgattgcttttggatgcgtgaatgtgtgtttgtttggcctgcagctttctcttctttaatgttattttccccttctctttctttctttcttttattcatttgttgtgaaaatgtctctactactgtaagtgcatgagtatgtgtggttatagagtctgct

SEQ ID NO: 19884 - DNA, 1207 bp, Oryza sativa
  ref <308>: DATABASE ACCESSION NUMBER: AK070224
  ref <309>: DATABASE ENTRY DATE: 2001-12-06
gaggcagaatggcagcccccagcaagccacaacatggcgccattggccccgtgccgttcaaggacgtcatcggagacgcaatggcacagcgatcctcaccggaggaggagtatgccggcgtcgtgtccagcctcccgagctatcccaagctgcgcctgcggcactaccagggcatgtggctgatggagtacacccttccagggatcatggccatccagcggagcttcgtgccgcgccgccatggcgacgtcgtcctcgcgagccccggtaagtgcggcaccacctggctcaaggcgctcgccttcgccgtcttggcgcgcggcgcctactcccctgccagtgaccggcatccgctcctccgtcttaacccgcacgactgcgtcccgttcatggagggggcgatctctgaaggatggggtggtaagattgatgagctgccgtcgccgaggctcatgtccacccacatgcagcacgctgctctacccaagtccattgcagatgaacctggctgcaaggttgtttatatttgcagggagccgaaggatatcctggtctcagcctggcacttcttcagaattatagagcctgatctttcatttcaagaagtgttcgaggctgcctgcgatggcaagttcttgaccggcgctatctgggatcacattattggctactggaatgcttgcaaggcgaacccagagaaggtcctgtttctggtctatgaggaccttctgcgagatccggcaaacatcgtcaggaagctcgccgactttcttggccagccgttctcatcgaccgaggaagaagctggactggtgacagatattgtgaggctgtgcagcttcgagaacctgaagagcttggaggtgaataagatgggagaggcatcgttcgccttcccgaatgcgtcatacttccggaaagggaaggccggagactggaaaatccacatgacgccggaaatggtggagtgttttgacaccatcgtcaaggagaagatgcatggatctgggcttgtttttgcttgatgcatgtggtggacaagaaattactaaattattcaactcttttaatactttttttaaaaaaacaagatctttcaataaataattttaaagggtagtccaaaatgaaaaaatagtaataaaatgtaacctaaagtgaaatttactcaaaataaactaatcatcaagctcaagaggttgctcgc

SEQ ID NO: 19885 - DNA, 3004 bp, Oryza sativa
  ref <308>: DATABASE ACCESSION NUMBER: AK070225
  ref <309>: DATABASE ENTRY DATE: 2001-12-06
aaatttggagaacccgcggacgcggcatgggtgtgcagcaactgggaggcgccggcggcgggcgcgggggcggccggcggagccgccgaggtcgccgtgaggcaccaccgcgccttgcccaccggtgcgccgacgaaggactccgggctcctctccgcgtgggaacttgagcaggatgcaatcaagggaagccacagtacagtctcctgtatggcgcaggtgcgagcatggaatacacccatttggtgaccctaaagcatctgagcatgaaacactacagcaaaccttgacagcactgctgaagtaagaggctgcacatggagcatctattactagtgcttcttgtccataccattgacatagcttgcttcttgtttgtaataatggcatgtacgattttttttgggttcttcttgatgcaaaatacagaaatctgatgaaaaagacttgcgtttaattctaaagttctaaaacaattgaaagatgcacggtatgcatgcaaacatcctgtgttagtttgaatttaatgcttttgagatgtggggaatgaggttgtacttccatatgttataaagttgcaagttactgctagttgctaagcaacatgattaacttgatctatttcagtgtgcattaccatttctatgtatcaatctgaatgtgcatcatgcaccctgttctcttcttcaataaactttttacattaaaaggtgctgcaaaactgctgtattattaaatcatgaaattctttcttgcaccagttgctgctaagaagtggtaaagtcttgctgaagctcttatgattcttttcctgaggcatacatcccacattgtgatgaaatatcctgagatatggagtgcattagtagatatagaagccatgggtatacatcaaatttgtcatatactaactggtgcaatttctatcgaagtgaaggttctcttgatttgtgcattaagcgatccacttttatgactactataaaggtcacatggaggcttgagatggacctgctttgctcttatttagctgggcagagaaatattatcattctgggtgaagacgttctctgcgaagagtctagcaaactttgtgttcatccaataggaccaatacagacctggaggcgaatatcgtgcaaataatcctgagatgtcaaagctgccgcgcaaagcagttcatgaaaaaaaaaaaggtgataatgcatacaccatgtaccagcatctgcaaaccgtcctgtcaatgtggaattccccttcccttggagctatttccagataaacaaatgaagctattgcaattgcaatgaatagaacaggagggatactcaggggaaggtggtgaggtgcgtcagataactttctgttagatgaagatagctatttaattgcttctggacttcttattttgcggacccaatccgctgaagtccccttgcagatgttgttgatgagtattctccaatacttgctcatctcaaaagtctgcagaatggagacgctgccacaagttccattaagcagattatgatggtggcactggagctaggccaattagtttgattaagcattctgccggtccttgggaacttggtctttcagaagcacaccaggttagcctcatctatttgtttgttattaccctattgaaatatcttgtttgttctaatgctagttaacttttctcctgacacttatgcaaaattgattgtgagagaggatggtagggtggatggtggattcagaagttgccaatatgtccttatggctagtgtcatgggcgtggatgaatatggttttggttctgtggctatgaatagctactggatgtgttcaagatgtccacactaatggccctgttcttgatgagacaatccttgcaaatcctgatgtaatgttttccattcctttctcagttacattaacctccctagtgactgatttgtgaatagtcaatcaaagtaatccttcattctgctatttggtcagcttgaaaccagaaattaattttgacgatcgatgcccttaattgtagtttaaagcgaagtgtgcagttgtatacttgtatcttgcttaatgatgcagcattatttatatattctattttgcagatatctgatgtaattgagaatgaggaggtttccaagatattataatgttgagagggctgtctgtggtcaagtagcaggtgtcattgcgaagaagtacgctgacacaggctttgcaggccagctcaacattacgatgttaaccattttctatttttagttttctttagtttctcttatgaaaagttaggagcataattgttttttgccttttaggtttactggaagtgcagggccagtcttttggatgttttctaactcctggaatactctgcaagttgagagaggccaatgattatgttggaaagaatttgcagggcatgggtggtggagagatggttgtagctcctgtagagtgtactagatagcacaggattcgttcctgacttcctgacgaagctactatagctggaaacgcttgtctgtgttggctactagtgagcaggtatttgtgacaggcaaaacaggtgaaactctcttggtcaatcagtggttgaggtcagggcactggagatcattgctgcgagtacatgatcggtggctgtgtagttggcaaatcctccctgtttcacaatagtaaggaggaacgttgcagctggaatgacgggtggccttgcctatgttcaactgcaatcagcaagtgatcatcagattaggtgacaggaaggtgttcgttctttgacactttcctgggacagcatcatggaaaaagaaataacccaggatacttgtgacgcaacgaagtgccccgaatactgcgaattttgtggaacctcataaaggcagcgaaagctgaaaacacttctaaacttctcgaatcctctacaggattcgtgccatttgtaatcatattttggttctgggcaatttaagttttgagctgttttaccggtact

SEQ ID NO: 19886 - DNA, 1698 bp, Oryza sativa
  ref <308>: DATABASE ACCESSION NUMBER: AK070226
  ref <309>: DATABASE ENTRY DATE: 2001-12-06
ggcgcgcgcgcctcgctcgtcggcagtttgtacgtacggtacaagctcgccgtccggcgatcatccttgataatctcaattaaaattatacatccctttgttatcgatcatcgatcatcagattggtggctggctggctaggccttatcagtttggaaccggatgctggttgaggagcagagttggaggatcatccctctggttccaggattcgttcctgttggcgttggtggagggcccagcacaccataaatataatgggcatcttctgctgcttccagtccgaggacagaggaggcgacggggacggcgatggcgacggagcgcctccctcgacctcctctagcggctgcagcaacagcagcagcagcagcaagaagaagaatttagcgtcggagcggagcctgggcgggagcagcagggacaacaacagcaacctggtgaacctggtgaacgagatcgtggcagagtcagtgacttaccggcacaagcgcgtggcggacgagatcctgaagatcggcaaggggaaggtgacggcgcgggcgttcacgtacggcgagctgtcggaggcgacgggcgggttcagggcggagtcgctgctgggggagggagggttcgggccggtgtaccgggggaggctgagcatcaaggggacggtgacggaggcggcggtgaagcagctggaccggaacgggatgcaggggaaccgggagttccttgtggaggtgctgatgctgagcctgctggcggagcacccaaacctggtgacgctgctggggtactgcaccgacggcgaccaccgcatcctggtgtacgagtacatggcccgcggctccctggaggaccacctgcttgacctgccccctggcgccgcggctctggactggaccactaggatgcgcatcgcgcagggcgccgcccgcggccttgagcacctgcacgacgcagctcgtccccccgtcatctaccgcgacttcaaggcctccaacatcctcctcgactcctccttccaggcccgcctctccgacttcggcctcgccaaggtcggccccgtcggcgacaagacccacgtctccacccgcgtcatgggcacctacggctactgcgcccccgagtacgctctcaccggcaagctcaccacctgctccgacgtctacagcttcggcgtcgtcttcctcgagatcatcaccggccgccgcgccatcgacatggcccgccctcacgatgagcagaacctcgtccagtgggccgccccgcgcttcaaggacaagaagctcttcgccgacatggccgaccccttgctccgcggcgcctaccccaccaagggcctctaccaggccctcgccatcgccgccatgtgcctccaggaggacgccaccatgcgccctgccatcagcgacgtcgtcaccgcgctcgagtacctcaccgtcgccggcgcctcctccgagcctgcccctcgtccccagaagctgcagccgccggaggacgacgacgatgaccaacgccccgccgcataatcaatcatatcgatcgtctctctctctctctctctatacatgtactaccactatctatataatatgtcatatacttctacttcacttatacagtatatagctacagtacctacctacatacatgctagcttaatttacgcacgtatgcatatacactcgatcgatacgattgactgtcctt

SEQ ID NO: 19887 - DNA, 934 bp, Oryza sativa
  ref <308>: DATABASE ACCESSION NUMBER: AK070227
  ref <309>: DATABASE ENTRY DATE: 2001-12-06
gaccgccatggctgccacactctcctctgctcctgccccctccaagcactgctccattgtcagagcccagcactcccctcccccttccatcctctcatcatcaactaagacggccttccatgggctgtcactggtggacaggcggtgggcggcctctgtcggcggcggcagcgggcggcggcggagggtgcttcaggtgaacgcgaggacggccggcgcggcgaagaacatcgaggtggaggtcgacaagccgctcggcctcaccctcggccagaagaccggcggcggcgtcgtcatcaccgctgtggattctggagggaacgcggcaagagcaggcctgaaatcaggtgaccaggtgctctacacaagtagcttctttggagatgaactatggcctgcagataagctggggttcaccaagacagccatccaggcaaagccagactctgtctactttgtggttagcaggggtgcacaagttgatgtgaagcgacttccgaaaaggccggcgcctccgagatttggccggaaattgacggaatcacaaaaggctagagcaacacacatttgccttgattgtggatacatatacttccttcccaagcctttcgaagaacagcctgatgaatatggctgcccacaatgcaacgcaccaaagaagcggttcgcgaaatatgatgcagaaaccgggagggcgattggtggtgcgctaccacctattacagtgatcgtcagtttgataatcggcattgccggagtaggggctttgcttgtatatggccttcaataggctgccaatatcttcacaggtttttgactgtgtaacaagaagctcagcagattgctggtgcactctcttatctagcaagaaattctgagtgatatatatcaagggggaaaggaaaaacatgagttggaggctaatggctaaatg

SEQ ID NO: 19888 - DNA, 1389 bp, Oryza sativa
  ref <308>: DATABASE ACCESSION NUMBER: AK070228
  ref <309>: DATABASE ENTRY DATE: 2001-12-06
gactgcactactagctcttgcgtcgcacacggcccgactacccgaccgaaccccaagtactccttacgttctctcttctactaccacctcatcagcggatcgatcgagatggtgtccttgcagtcggcgctgctgctcccggaggccagcaggcggccgccacggccgacgtgcctcccgctcgtcgattccgtcgcctccaccgccaccagcaagaagcggaagcgggccggcgtcgacgacgtcggcgagggcgagagcggggaggtcgggatcgagctctgcttcgacgccgcgcctctgcccctcgagtggcaacgctgcctcgacatcaagtcggggcagatccactactacaacacgaggacgcacaagaggacgtccagggacccgagggcggaggcgccgccggcgccggcgccggagtcgcaccaccgccgcgccgcgcccgccgaggaggaggaggaggaggaggccgcgaattattgcgcgccgccgctaggcctggacctggagctcaacctcacgttcgagccgcgccgggtacctatccaggaggccaagaagcacaggtcgtcggccgtggagacgacgacgaagccagcggcagcggtggcagcggagaagttagcgctcgagttgccggccggcggcgcgtccagggagatggtcgccgccgtttgcgcgcggtgccacatgctggtgatgatgtgccgcgagtggccggcctgccccaactgcaagttcgtgcacccaacagcgaaccagagctcgccgccgccgccgccgccggagccggcgccgctcaagctcgggctccagctgctctgctgcaaggactaattaatgatccaatttccaaattactcgttcgatcgatcgatcgctcgtcgtctctgctgcttgacccgtgcaacggctgtcgttatagagcgcatgtgtacgcgtagctatctacaacattaatattgtcactatgtagctacgacgtcgtacaagtgcaataaccaaacagtggtaattaaggccactgttagtgtacgtacgtaacaagatgatcattaggcggcttaattaaaaaggggaaattgagttcaaaaaggagccagtatgtagtgatcaatagctagctggtgaccgatgggcgatggtgaggtatgaatatatatattatgatgtagatattaagtgcaaatataaatgtagtctctggaactttgtgggtatgcgtcactagctcatcaggctcacttgtccgtgcatgtatgcgaattggggtcgagtgtgtgctttgctataccactatatatgtgtgtgcgcgttgtacaaaagttagttggctgttggtgagcagaaatttattggtgcacgcctgctgatgttgtgtgt

SEQ ID NO: 19889 - DNA, 1139 bp, Oryza sativa
  ref <308>: DATABASE ACCESSION NUMBER: AK070229
  ref <309>: DATABASE ENTRY DATE: 2001-12-06
gaatccgatccgcgagaggcctcctcctcctcctcctcgatccagatggccatggcggcggcgtcggttctcgccgcctcgtcctcctcctcccctcctccgctcgcgctcgcgtcgtggagatggaggcctccgccgccgccgcctcttctggcagttgcaggtgcagctcgcggagcgacaaatcccaggctcgctctccgcctgagcgctgcggcgtctcctccggttaccggcgaatctcgcgccatcgcggggacggggcggtgtctggtggcgccgatgggtggggacgagacggagcgggatgcgacggctgcgacggcgccagactggggcgcgctcgcgaggcggctggctctgggcgcgctggggtgcgccgtgctctgctgcggcggtgcggcggtggcggcggaggactcgatcaaggcgtccggcttcgggctgcgtgtggcggcgtcgctgcggaggctcgggtgggcggacgaggccgtcgtgttcacgctcgctacgctaccggtgatcgagctgcgcggggccattccggttgggtactggatgcgcctcgaccccatccgcctcaccgtcctatccgttctcgggaacatggtgcctgtgccattcattatcctctacctgaaaaaacttgcagcatttctctctcaaagaagcgcatctgcaactcggattatggatcttctctttgagcgggcgcggcagaaggctgcacctgttgaggaatttcaatggcttggtttgatgctgtttgtggctgtaccatttcctggaactggagcatggactggggcaataatttcatcggttcttggcatgccattctggtcaggtttttcagcaaatttcgtgggcgttgtcttagcaggactgttggtaaatttgcttatgaatcttggtttgaagtatgccattatcactggtttagttctgttctttttatcaactgtcatgtggggtgtccttcgatccctcaaaaaatcactgaatgctaaatgatgtaatgaacatgcaactattttttcgttgtaaagaagaattcacccttgtgagggaattctagctgtaaacttctccctctatttttcctattatacaaaatgaaaatgcttacctttgaggcc

SEQ ID NO: 19890 - DNA, 2091 bp, Oryza sativa
  ref <308>: DATABASE ACCESSION NUMBER: AK070230
  ref <309>: DATABASE ENTRY DATE: 2001-12-06
ggcatttctaggcgtgctcgatctcacgggaaggcgtgcggcgatgtttttttttttttggcgatttttttggggtggtgggttctggactgtgggatgtggttttgggctagatctggtgtgctcggtggtgatgggtgatttggatgggattggattcgtgagatctgcgatcccgtgcacgcgaggggagtagatccgctcggtttggcgagcttcgtctcgtttagaagtggggatttttgttttttgctttttttggattatcatctctgagttgagcaaacgtctgttggggatttggaaaagttagacagatttatttatttatttatttatttatttatttatttatttatttattgtggaagtatgttgatggtatcggttattagctgcgtttgatccacggattagatctaggtttaatctgttaatagtgtggggatctatatatatgtagcggtgaaaggtgcacgcctgctcggtattggggtgataatttttttatctggattgggaggtaggtggtcttggtttgtggaaaatcagtgtttgtctcgtgggtggattgatgcgacgtttagatctagcctagccatgtttatgatttattgatctgcaatgtttagatatatccctcattataaggctgtaattgagtttctgttagttctttctgtattgaacaatttttagtgattacaaatacaacttagttgagattatgaaatattttgaatttggacatgatattggcttattcatttgttacagcctttaaaaagagttagtattaaatatttgatggaatttgtaggattcagtagtattattcacaattgtttaattattcatttctcaacaaatgaacatccttgatatgaatgggaacatgatctgttttgtacaattataccttctggagagaccccatggctttcagattattaatgttggtgaatgcttatcagtacctttttatctggctacagtaatcccttaattggtcaaaatgtctcgggaggagaatgtctacatggccaagctggccgagcaggctgaaaggtatgaggagatggttgagtacatggagaaggttgcaaagactgtagatgtggaagagctcactgttgaggagcgcaacctcttgtctgttgcttacaagaatgtgattggtgcccgccgtgcctcctggcgtattgtctcatccattgaacagaaggaggagggtcgtggcaatgaggaacatgttactctgatcaaggagtaccgtggcaagattgaagctgagctgagcaagatttgcgatggtatcctgaagttgcttgactcacaccttgtgccctcatctactgctgcagaatctaaggtgttttacctcaagatgaagggtgattaccacaggtaccttgcggaatttaagactggtgccgagagaaaggaagctgctgagagcacaatggtggcttacaaggctgctcaggatattgctctggcggatcttgctcccacccatcccataaggcttggactggcacttaacttctctgtgttctactacgagattctaaactctccagacaaggcttgcaaccttgctaagcaggcgtttgacgaagccatctccgagttggataccctcggggaggagtcttacaaggacagcactttgatcatgcagctcctgagggacaacttgaccctctggacctctgacctcacggaggacggtggtgatgaggtgaaagaagcctccaagggcgacgcctgcgagggcagtaaaatgggaagatcgatcgatcgatggctccgcatgttattggagaccatcgatttagatgcctcatgctgctgtcaccatgatggatggattcttctcctgttctactagaatgtttttcttcctgtccccccttcctctctcttctctggtttttactagggtggtagcggtcgaattagttcttcccattgctttgcatttggtgctagtggtccgtctgggctgattgttttcctctggatatgactctcgtgtgtgttgtctccagatagtgttttattgagcaatatttaaagttgtcgtcc

SEQ ID NO: 19891 - DNA, 1012 bp, Oryza sativa
  ref <308>: DATABASE ACCESSION NUMBER: AK070231
  ref <309>: DATABASE ENTRY DATE: 2001-12-06
ggctctcccgccgccgccgccgccgccgcctcgcctgcgtcgatctccaccccgcgagcggagcagcggtgcccggcgtcgtctgctgcttccgccgcatcctccctcgctcgctgggcaaggatcttttattgcttttcttcccctggaatttttttagctagcaaggaacacggttgaaagtaggatgagtctctctaccatagcaagacgactatgttgttcaagaccaacatctgggggtcgtctttcagcggtttgggctcatttgtacagcacagaggctgccaaagacacaggtgctaagaagtataaataccctgaagtctatgatccatacgggcctatgtcacctccatcgcagaaagttgtggatcttgctgatcgcattgctgccctccctcctgaggagatcaaacagattgctccggctctccttctcagactgaaccaacccccaccacaggcaatttctggacagggtttcagtttcagtcctcaaggtggtggcggtgctgctggtgctgcaaaggcagaggagaagaaagcagagaaaacagtctttgacgtcaagctggagaaatttgacgctgctgctaaaattaagatcatcaaggagattagaacattcacagatttggggctgaaggaggcgaaggagctagtggagaaggcccctgtcattctgaagcagtcactcacgaaggaggaagctgaggcaatcatagagaagattaaggtagctggcggtgtcgctgtgatggagtgaaggattaactcctttggcactactacccttttgttttcttcaatttttgttagcatggtcaggcattagaggtcgcagtatctctacacttttgtaggaaatgttcagctgtgacaggtaaacatgggccatgatttggtctgaataaactttcttcgaccactacaactttcctgatgtattattgtgacattgggaccgagtgaatggaatgtagacagaattgcctatgctgatacctgt

SEQ ID NO: 19892 - DNA, 1055 bp, Oryza sativa
  ref <308>: DATABASE ACCESSION NUMBER: AK070232
  ref <309>: DATABASE ENTRY DATE: 2001-12-06
ggcttcactgctcccctcctccgccttcgctctccgccgtctctcctcggcggcgaacgtctcccgctttgcccagctcaagagattcgaccgggctcgccggttcgcgccggccgccgccatgtcgacgtcgtcggggccgaaggaggcgccggcaaacaacccgggcctccaggcgccgtcggagaaggaccccgcgaccaagggctacttcatgcagcagacgatgttccgtgtaaaggatccaaaagtgagtctcgacttctactcgcgtgtgatgggcatgtcgttgctgaaaagattggattttcctgagatgaaattcagcttgtattttcttggttatgaggatgtggaatcggcccctactgatcctgtaaagaggactgtttggacttttgggcaaagggctacacttgagctcacacacaactggggcacagaaaatgatcctgaattcaaaggttaccataatgggaactcagaccctcgtggttttggtcatataggagtaactgttcacgatgtctataaggcgtgtgagcggttcgaacgtcttggggtagagtttgttaaaaagccagatgatggtaaaatgaagggcattgcatttatcaaagaccctgatggctactggattgaaatatttgacctgaacagaattggggcggtgactgcggaagcatcatgatgtgtttgaaatgctatgaactctagttatgcagctggggtaaatcatttccttgttgacaggtgcgacgtgcgagacgataaaactccagctacccatgggcatatatacaatatacttggtcgtttagagcaacaagttatagattgtgataccctgtttgctggtcagtgtttgaagcttgaacttaacattgcactgtaaccgtttctgcgttaaagattttggcctcataccgctgctggcctctctctccccctccctccctctctctggggtacttgtattacctatacttggttgcttggattggtccccctttttttttttttgacaaattgatccttttcaaaagcttacttcg

SEQ ID NO: 19893 - DNA, 983 bp, Oryza sativa
  ref <308>: DATABASE ACCESSION NUMBER: AK070233
  ref <309>: DATABASE ENTRY DATE: 2001-12-06
gcttgtgctttggctggtactggacttcctatcgataggttcaaaactgctaaagatttgaagtttacagctccaatgaagaacagtattgatgcagtatcagaccgcgactttgtattggaatttcttgctgccaattcaattgctgctgttcatctttcacgaattggtgaagagtgggtcttatgggcatcagaggagtttggattcctcacaccaagtgactctgtttcaactggaagcagcattatgccacagaagaaaaatccagatccaatggagcttgttcgtggcaaatctgctcgtgtttttggagatctcatgactgtcctcaccctttgtaaaggacttccgcaggcctacaaccgtgatttacaggaagacaaggaacccttgtttgacagcgtgaaggctgtattaggaatgcttgaagtatgtaccgagtttgctcaaaatatctccttcaactcaaaaagaatacaaagttcgctgcctgctggctatttggatgcaacaacactagcagattatcttgtgaagaagggcgtgccgttcagaacctcgcacgagatagttggaaggtctgtagctctatgcgtctcgaagaactgtcagctcgccgaacttggactagacgacctgaaatctgttcaccccgtttttgagggcgatgtgtacgagtatctgggagtggagaacgccgtaaacaagttcatatcttacggctctacaggctcggagcaagtaaaaaaacagctcgaggattggcgcactcagcttggcattagttcataaatggtcgagaagacctcgaaaatccgattattgtggttccagtttttgaaagtgggtcggagtgtcgtgaacttcttttatggacgacagttcgctgttgctttaatttcagaacgatcgatgcacttgtattgggaaccattgttctgctgaagtattgatctgaataaaagatgtgcttcgttgtc

SEQ ID NO: 19894 - DNA, 1816 bp, Oryza sativa
  ref <308>: DATABASE ACCESSION NUMBER: AK070234
  ref <309>: DATABASE ENTRY DATE: 2001-12-06
gaggatagggcaaaaaccccacctctggactttggccacctctctcctcccccaattccaccactagccctcgtgtccccggcgcggcggcggcggcagcgatgcctgaccagcggccaaagcggccgtccgactcggtcgccgccgcctcgccggcggcgaagcgcgcccgcgacccgtccgcgccggcgttccccacctacagggacgcccccgacctgcccccgaagatccgtctcctatgcgagatcctggcgtcctcggcacccgacgtcgacgcggcgctcgacgacgccgacgtccgcgtcacctcctccgacgtcgagcaggtgctccggttctcctacgcccacccgcgcgccgccgtcgccttcttccgatgggcggggcaccggcacctccgccaccagcactccccctactcgtggaacctcgtcgtcgacctcctcggcaagaaccgcctgttcgagcccatgtgggacaccgtctcctccatgcggacccagggcctgctctccctggccaccttcgcctccgtgttctcctccctggcggccaacccggccagctccccactcagggcgttcgtggagctgccgatgtacggcatggaccgcgacacgccggcgctcaactccctcctctccgcgctctgccgcgcctcccgcctggacgacgcccgcgccgcgatccccgtggcgcgcgccgaggccggcacccgccccgacgccgactcctacgccatccttctggagggctgcgaggctgccggcgaccctcacgttgcacgcgaggtgttcgacgagatgcggcacgtcatcggattcgatcctgccaatgttcctgcctatgattctttcctcactacactgatttcaagtggttcctccacagcgttaatggatgcgatggactatcttgctatcttgcaccggcagaggtgctcacctggggagaagttcttccgcgccgcactggccgcacacctcaaggcgcgtgaattgcgcggcgcggtggtgctctggaacgactttgtcgtaaggcggggactcatcccagataaggaaatgtatagcacaatgatcatgctgcagggcactcttgggcatcctgaggtgattgttgagtaccttgatgagatgacctttgatggagtgtttccagatgcggacacatacaatatggttttccagttcttgctgaaggggaggaaactccgggaggcgtcggcaatatttagtgagatggtcaagaacgagttctggcccaatgaggcaaattgttcgctcgcgcttcgtatgttcttggatacacgagactgggattcagggatcaagttgtggaaatgcatggtggagaatgggcttccaccattggaggagagtgggaacatgctcgtatcaaagctaaaggatgagaggttacccgaggcatgtaaatatgcagaagacatgattgatcgatgtatcaagttgagctcttccacaatgtcaaagctgaagcaatgtctgatgaaggtttataaaggacatatccacgatcacctacttagaaaatggaaggcgcactaggtatttttacctcttctttgtggttaaatataacaggggaagaaaagctaacattttgcccccaagtagctgagtagcggttgatggtgattttctggttgcaactgcaactataggaacattatgcgcatagcatcagtaaaagttgcaaagcattggctcaaagctaggtgtacaatgtagtgacatatttggtaaggtagtttggtaaattaaacttgactctcctaatgtttttcttttgc

SEQ ID NO: 19895 - DNA, 2350 bp, Oryza sativa
  ref <308>: DATABASE ACCESSION NUMBER: AK070235
  ref <309>: DATABASE ENTRY DATE: 2001-12-06
gagtactaccaacccctccagttgcccaccagaaggagcaaacagagagaggcagaaggcaagctgcagtgttgggggagaagaaaggagagagagagagagagagagagagatagagagagagagaggcagtggcagaggcagaggaagggaaagaaagctccaatctcgcctctgctcctgtctccaggaaatcttgatgcttgcacataaataggtgattccaagattggacatttggtacgcgagctctgagctatccaagaacttggtggtgaagatgtcagtgatccatgcggaggacatcgagatatcgctgtgcgacggcaactcggaggacgagcggcggcggcggaggatcgggtccaaccttcgccggaaggccatccacgcgatcaagaagcgcggccggcggcgcgtcgactgccgcttcccgccggccatctccatcgaggacgtccgcgacgccgaggaggagcgcgctgtcgccgccttccacgaccgcctcgccgcccacggcctcctccccgacaagcatgacgactaccacatgatgctgaggttcttgaaggccaggaagtttgatatcgacagggcaatgcagatgtgggcagacatgctgaaatggagggaagagttcggagctgacacaatccttcaggattttgattttcatgaactggatgaagtgctgcgctactaccctcagggctaccacggtgtcgaccgggagggccgcccagtgtacatcgagaggctcggcaaggtcgacccgaacaagctcatgcagatcacctcggtggaccgctacatcaagtaccatgttcaggagtttgagagggccttcagggagaggtttcctgcctgcacattggcggcaaagaggcacattgattccaccaccaccatcttggatgttcagggagtgggatttaagaatttctcaaagactgcgagggagcttatcaaccgaatgcagaagatagacagtgactattaccctgagacattacatcaaatgtttgtcgtgaacgccggcagcgggttcaagttgatctggaatagcgtgaagggctttctggacccaaaaacttcatccaagattcatgttcttggttcgaattaccagagtagacttcttgaagtaattgattccagtgagttaccggacttcctcggtgggtcatgctcatgcagtgacaagggtggttgtcttgggtcgaataaaggcccatggaatgatcctttcattttgaagctgatacacaatttggaggctggttgcgtcagagagatcaagccagtgtctgacggtgaagaaagaagcagctcatcccttcggttggagcagccgaagtggcagggcatgattagcgacatatcaaatgctgagtcagggtcagacgttgatgattttggttctttctttcagaaaggtgttgactatggttacctcactccagtccatgaggaagtaaggggaacagattctttgacttactatagctgtgatgaccagactcgtcgagatatagctcctgaatcttgtaagggagtgcaagctactggaatggtgcagaatcagctacctgataacaggcaaccctccacaaatcggaacccacatgactcaggaaacaatggtcacttggatggtgcatttgctcgaaggagtttgcaaaattatattcaagttgttgtcacaacctttatcaagctactctccttcctccgtctcttcatctccagaccagtgaggaggctcgagaatgtccattcttgtaccgtacctgtcccatctgaagaaaagccagagcctcgatctatacgtgatgatgatatgaccatgtgcttacaacgtcttgacagtctcgaatctttgtgtaaccatctagccagcaggccaccagagatacccagagagaaagagcatatgctactgaactcttttgagcggatcaaatgcattgaggctgacctggagaggaccaaaagagtgctgcacgcaacggtggtgaagcagaaagcgcttgtggagactctggaagctgtacaggagtcatcaagagctaggaagagattgttttgttcatagaatataccgcaccaagtcaagaaccatgtcgacatttaaccgcgacgcatgaagctctgccagtgccatttttgaccttccccaacttcatcccgggccagggaaaaaacctgaaagagaagagaagatagcatttggtgatatagcctgctaagctgcttcctttcagcatctcaccatcttttttttttgtagttgtctgtactagtaaagcccttctcttgtgcctggtgaatgttgtgccgtgcttagtgc

SEQ ID NO: 19896 - DNA, 1002 bp, Oryza sativa
  ref <308>: DATABASE ACCESSION NUMBER: AK070236
  ref <309>: DATABASE ENTRY DATE: 2001-12-06
gactttccgagctcgatcgatcgagcatggaagccacaacctccagcttgctcgtgcgccccgtcgacacgcggctctccgccgcctccctccccatcgtcgtccgcgcccgccggcgcgtggccgtcgtcacggcggcggcgccggagcggaagccggccgcggcggcgagcagcagcaactacgtggtggtgccgctggacgcggcgccgtcggggatcacgcggccgctggtggaaatcctgcgcgacctcaacaagcgcgtccccgacaccgtcgtccgttcctcccgccgccgcgcgtcgccctccgatccggtcatcccctggtatcatgccaacaggatgctaagcttttatgctccaggctggtgtggagaggtccgtgatgttatttacactgacaatgggaaagtgacagtggtatatcgtgtcacagtacgaggaacagatggagaggttcatagggaggcagctggaacaacatcactgaatgatgcacgatttgatgatcccgtggctgctgcagaagaggccgcattctgcaaggcctgcgcaaggtttggctttggtctgtatctttaccacgaagacgagactccgtagggaagtggcgcagcatccacttcataagttctgcgttggttctcgcctgatttggttcaaaaggctgtggttgatccatctctctgtttatcaaggttttcagtctgtatcaggagttgaagtatcattcatactggaattctctttatcttctgaacctcttttcttgtagatacgagtcaatgaggccccgtctgccacttctttcctttttggcactgttataaagagcaaatacacgagtactcctacggttctggttccataatttttgatgttttgaacaacaacacgtgtttagacgtgaggcatggtaatagtttaagactaatctatacattgtgttctaatatctttaaactatatagttattaatagttaaagtttttattgtctg

SEQ ID NO: 19897 - DNA, 1733 bp, Oryza sativa
  ref <308>: DATABASE ACCESSION NUMBER: AK070237
  ref <309>: DATABASE ENTRY DATE: 2001-12-06
gatgcatgctaaattgcacaaaaaaaaaaatttcttcctcaagacacacgacttcctgccgcaggtagagaagagagccgaccagacaccaccgccgccgccgccgccgccgccccacgccgcggtcaccgccgagaagcagctgctccaccagcacgcgttggccgccgccggcgcgttcaccatcaaccacgccgtggccgcggccgccaccgccgtcaagcaggagccgcccttcgcgccgtggtgccagcccgtcgccgccgtagatccccgaggtcaccagtggtcgctccccttcgccgcgcgcgccgtcgccgtcgcctcctccaggccgcagcagcagcagcagcagccaccgccgccggagaggaagggtggcggtggattcatggacgccggctccagatccagtggcggcgcgggcttcgacgacgacgacggccatgccgcgcgccgcgaggtctcctcctcgctgaaagagctcacggtcagggtggaagggaaaggtgggagctgcagcggcagcgctggcacggatcagatgccgaacacgccgcgctcgaagcactccgccaccgagcagcgcaggcgcagcaaaatcaacgacagatttcaacttcttagagacttattgcctcataatgatcaaaagagagacaaagcatcatttctcttagaggttattgaatacatacggtttttacaagagaaagtacaaaagtatgaggtttcatacccggagtggaaccaagaaaatgcaaaggttgtgccatggacaaacatctatttccgttcttcctggaaaaatgcgcagaacaaaggccaagttcctgcagatcattcacctgaccctccagaacttctgaaaaatggttccccctatatgttcccttttacagggaactctgataataacaatgcagttgaaactgcagctgcttcaggtgcacaggatcaggcagaaactgatccaatgagtcgtgtgtcttacagatcagtggacactcccagtcacaataatgttgcagacaaagttacatctcagccacacgctcaactggtgagaccatcacctgcagagaatcacacagtaaactgcgacaagttaaataattctgaccttgccatcgatgagggaacaatcagtctatcaagccaatattcccaagagttgcttaacaagttgaatcatgccctggaaaactcgggtatagatttgtcccaagccagcatctccgtgcaaataaatcttggcaagagggctatgaagagatctactcctgctgcaacctccacttctaaggagctcactgatccggcatctaatagtcaagcaatgggccgtcagcttaggttgggtgatggcgctgaagaacatcgacaagcctcaaagcgacacaaatcagataacagctgatggtttgctcctgaaaaccccagatattcaaccattttttgctcctaactgtgtacggggagccccaaggttttatgtatattaagtttacctgtgacgtctcgacaaaacaaggccttgatgtattctttcatttaatcacttcgccgttctagcccctagggaagaaaggaagcttccattgcagattgtgaagctgcttttgtccatatgcttccattcatatgagaagtttctcccaccctctgacagaatgtcttttgtaacataattcagaaatgagctatccaaagttccatcagttccccttgtg

SEQ ID NO: 19898 - DNA, 1936 bp, Oryza sativa
  ref <308>: DATABASE ACCESSION NUMBER: AK070238
  ref <309>: DATABASE ENTRY DATE: 2001-12-06
ggcgtcaaacctctccatcggtcgattcagagagagatcgagatcagcgtgagagagagagagagaatgagcagtacgagtggatctgcatgggatcacagcaacaatggaggcggcgggtcgccggagttgagggaggcgctgctgctgggtgacggcgggtcgtcgccggagtcgagggagattaaggggattgctgtgaagaagcaggatgacctggaggagatccggagcgtgggggagctgatgcggctggcggcggaggagaaccggcggctgtggtacctggccggtccggccatcttcacgtcgctggcgcagtactcgctcggcgccgtcacgcaggtgttcgccggacacctcaccacgctcgagctcgacgccgtctccaccgagaacatggtcatcgccggcctcgccttcgggatcatgtacgggatggggagcgcgctggagacgctatgcgggcaagcttttggcgcgaagcagcatcacatgctgggcatctacttgcagcgctcatgggtgatcctcaccgccatgagcgtcatcctcctccccatctacctcttcgccaccccgatcctccgcttcttccaccaggacgacgagatcgccgtcctcgccagccgcttctccctctacatgatcccccagctcttcgcctacgccctcaacttccccatccagaagttcctccaggcccagagcaaggtcatggccatggcggccgtctccgcggcggtgctgctgttccacgtcgcgctcacgtggcttctcctcgtgccgctccggatgggcctcgtcggcctcgccgtcgcgctcaacgtgtcgtggtggctcgtcgtgctcggccagctcgcctacatcgtcatgggctactgccctggagcttggaacgggttcgactggctcgcgttcaccgacctcctcagcttcgcccgcctctccctcggctccgccatcatgatctgcctcgagttctggttctacatgttcctcatcgtcattgtcggtaacctccccaatgcccaggtcgccgtcgccgccgtctccatctgcacgaacctgtttgggtggcagatcatggtgttcttcgggttcaacgcggcgatcagcgtgagggtgtcgaacgagctgggcgcggggcggccgcgggcggcgaggctcgcgatcgcggtggtgctcgtgtcctcggtcgccatcggcgtcgccttcttcgcggcggtgctgctgctccgcgacgtgtacggcgcgccgttcacgggcagcccggaggtggtgcgcgcggtggcgagcctgggcgtggtgttcgccttctcgctcctcctcaacagcgtccagccggtgctctccggcgtggccgtcggcgccgggtggcagtggctggtggcgtacatcaacctgggctgctactactgcgtcggcatccccgtcggctacgccatcgcgttcccgctccgccgcggcgtgcaggggatgtggggcgggatgctcactggcgtcgggctgcagacggcgatcctggtggcgatcacggcgcgcaccaactggaacaaggaggccagcgaggcgcacgccaggatccagcactggggtggcacggccaagctcgccgtcgacgaccccatctagttaagcgacagcgagcttcatcatccatccatggcgtaagaatttgtaatgtacctgcacaatgcaagtacatgtacatcctgttgtcggatttggtttgagattcgtgcgcgtagcatggattgcaataagaaaatgcagatgtgttgatatgtcgtggttttgtgtatccgagaatgtcaatccacgatgcaattatgcagtgtatgtgcaccttgttgtttgtttggatttgattggagattcgtgcgcgtgtagaatagataaatatcatgaataaagcatgatattatatactagt

SEQ ID NO: 19899 - DNA, 2135 bp, Oryza sativa
  ref <308>: DATABASE ACCESSION NUMBER: AK070239
  ref <309>: DATABASE ENTRY DATE: 2001-12-06
gattcatcatgtcacacatccacgtcgccggcctgcattcgcgccgccccccggtctctctcttggtgattgattgattatcgttttgacggttttgctgttggtgatggttgtcgcgaggatggcggtgcgcgagcgcagcgtcgccggacccggtgccatcagaggagcccgcgtcggcgtcggcgtccaccgtcgtcgtcacggaggacaagcccgatccgccgccggcggaggagaagagcgaggaggtcgcggcggtctctaatggcgggtctctggagacagcggcagcgcgccggtgtcgtcggaggcagccgaggaggacggcggcttggacgacatcctgagcaagctggacatccaagtgacaccaactcttgtcctctatggatccggtgctttggttgtcctatgggttctatcttcggttgtttctgcaatcgattccattcccttgttatgtagatatgacatttttcaccaaactagttgggctgctgtaagttcaagtgccttaatttggttttcggtgattaatgacaaatctaattatgtgagactaacgtttttatgagcctttctttgactagtctcatttggatatggaagtaaaaatgatgagaggtatgtattaaacttcatatattctaacttggtctctcttgtggatccaaaatatagtgtgagcttcctatttgatctttattgattatgtgcatatgcgttccttcatatccatatgtatgcacatcttgagggggagcttattctatattttgtttattataagatttctatcttgatttgaaatcatttttcatctcatctctctatattgtttatatcgggttattatccatcaccaaagagagaaaagattgaaagatcttggattaaacaatttatgtaattgttactttggtgatagatgataaaccgatgtttatgggattaacctctcttttgcataagttgtctactaggttatttcccgataatgagatgtggaagacattcattcttttgtgatggaccttaatcatgacaaggatgaaatgcatggagataaaacgatatgtaccacttcttatctcctactttttgataggttcatatatatgatttccatgttattaatatataagtgtgagactaatgtttactcgaatgttatcttatttagtctcatttacattgagaacatggagatcatgaaggtatatgttttatgttggtctacatcattactacatatgccttctctatatgtataggataaacccccattggtcattctctaattatgcatacacttgcatctcttgtatatttatttgtatgcatatatttagggggagcaaatcctatacatttattgtgcatgttctagatccatgttgttcacctattatttatatcggatctttgcacttgagcttgcatacgagtatatgacacttgtgatgttaatgaatactcaacaaacatatccatatctttcatatgcaaccggttggtcatcaagtgaaggatgacaaccgatttgttgagactaatgttctcctttgaggtgtgaaaaggaataggtcccactatgatgaggctaatgaatgacaccacgggttagtggtcgccaagccaaggacatcgtcatgttggcaagaatgaagtcaagcttgtgatgagaataaagtcttgacaaaggatggacaagacctcggcataaacatggttcaaccggatggtcacaagtgttgatctcggctcaagcttgaccccaagatggatggcgcaaggcaaagattggaacaagctaatcttctgctcaagaaaacaccattgttggagatgatgacaattgtcctccactgctcctgaccattcaaacaggttgacaggaacatgctccatttcatggttttgctaaatgaagtgcggttgtcatgagaaatcagtgcagaatggcaaggtagatgcaattattcgatcagtgcagagaaaatggaggcaatgctagggcataatttcttctaactgtttttccattctttcccctttcgattgtacactcatggttgacacatatatgtacagttcagatttataagttgcagctatgccttcaatggatg

SEQ ID NO: 19900 - DNA, 1189 bp, Oryza sativa
  ref <308>: DATABASE ACCESSION NUMBER: AK070240
  ref <309>: DATABASE ENTRY DATE: 2001-12-06
ggagggatgtcatcgaggaggcggtggtggtcgccggagcgccgaacctgtctgactatttcccggtgatcgctgccgccgacgtcatgggcgtgcggcgaaggatggataatctcgtcggatgggtgtacggcatcatcgatgtgcagatcgaccggcggcggcgccgccgcatcgtctgcgagcctcgcaagaatgacttgctggatgtggcgtttgacatggaaggagaagtggaaagcgaaggatgggtgatgaaccaagacaccatgaggggaatgttcatggatttgctcgtcgctggaagcggctcaacctcaagtacaatagagtgggcaatggcagagttactgcaaaatccaaagtccatgatacaacttccagaggagctcaaaggccttatgggcacaaaaactcacgttgcagaatcagacatcagccagcttccttatctccaagctgtcatcaaagagaccctccggcttcacccaactgttccaatagcattcaacaaggctgaggccacagtagaaatccagggctacaagatacctcagggaacaactgtatatgtgaatatatgggcaatttgtaggagagctaagatttgggatgatctggacaagttcatgccatacaggttcttgggtagagatataaattttctaggaaccaattttgagttcataccgtttggtgctggacgacgcatctgccttgggatgccattagcagaagggatgctgcatgcctgcatctgatgcttgcatcactactgcatcggtttgagtggacgatccctgatgaagttaagggtgatgacttggacatggcagaagagtttggtcttgtgttgtccatggctaagccacttcgtgctgtggccaaggaaacatgaatgctaatgcaaaatgttcgataatgttatgtaagacgccattgcgcttttatttaggtctccctgcaaatgatagagatttgtatgaatttttgaattgaaatagttcttgtgtaggccttatactgcctgtttggcaagagatggaaagcggattggaagtttagaggacgactgatcatgggagtttcatttttattcctattcctttgtttgatagtagagatgagaatcatgggaagtatggatgtgaattgaattttaagtgataatgtatggctcatatttatc

SEQ ID NO: 19901 - DNA, 832 bp, Oryza sativa
  ref <308>: DATABASE ACCESSION NUMBER: AK070241
  ref <309>: DATABASE ENTRY DATE: 2001-12-06
gacctctgctccgacttccgagcaaagccaagttgctcaccgactcacccgtagagctagctagccatggctgttgccgcaagagccgccgccgtggcgtgcctcctggtcgtaggcctcgcggccgtggcgggggtcgacggcgccacggcgagctccccggccccggcgccggccgtggactgcacggcggaggcgctgaagttggcggactgcctggactacgtgaccccggggaagacggcgccgagccggccgtcgaagctgtgctgcggggaggtgaagggcgcgctcaaggacagcgccgccgtgggctgcctgtgcgccgccttcacctccaagacgctgcccctcccgatcaacatcacccgcgccttgcacctccccgccgcctgcggcgccgacgcctccgccttcagcaagtgcctcgcaccggcgccgtcgccgtccgtggccccggggacatcgtccggcagcggcggtgcggcagcggcaccggcgaagggcgccgccgcagcgaggtctccgatggcatcgaccaccgccgtgctcgtcgtcgccgccgccgtggcagctcctctgctcgccttctttcacttctgatcgaggagtcctttcgtagcctcattacattctacagtttgtcgttgtgatcgtgattagactcggtgactttttgttgtgacaatttgagtttactgcatgcatgcaccctgccgtgattaatttagctctccagagtgagcattcatatttaaaatagtttccgtgagttatttttaatttgtatcgttatatgtgcatcatattattaagagcggttaaatttggc

SEQ ID NO: 19902 - DNA, 3768 bp, Oryza sativa
  ref <308>: DATABASE ACCESSION NUMBER: AK070242
  ref <309>: DATABASE ENTRY DATE: 2001-12-06
gaccgacctcacctctcgcacaggtcgcagcagagcagccgctggctcgctggccgtcgcatcggaggaagaagaagaagagggggagcgggaggcgtcctctctctctctctctcgatccaccaccacccatggcgggggaagaaggggaggacgaggcggcgtcgatcgagctgcagctggagcaccacctacaggagcagcgggcctccctcaccgccgtcgacgaggccctcgccgccgacccctccaacgccgacctcctcgaggtacgcatccgcgtcacctcgcctcgccttaactagctctcaatctcaaatcgtcccgcgcgggcgctggctgttgaaggtttggctagccctaggctcctaatttgactcccaagttgtggggatgcgacgggcagtcctctcggaatgttagaatttgcaggactggttgtgtgactgggtcgtgctcggattattgttcttatctctctcgtgtagatgctgggttcaggcagtatgtctcctgttattactagtagtgagctctacaatgtaataaggattacctaataaaactaacaagagtgcttggagggattgtgattgatatgtctgattcggtcactgtaagaaaatcaagcgcattttgtcgagatgacgtttttattatgtgatttgtccatggatatttttgacagggttagatttagttgactcatgtatcatgtcattggcaaaatcagccgaagatggatggtaacttttgtacattagtatttagtatgtttagattggatatcgactcaacatgtttaagtttggtatgacaagagttgagtgatattcacatcatagctcactgatgtaacctgtaggtgagatgattagcttatgcattttggattcctgagatgtgaatatccaaatagtaggtttccttgtccaaaatatctccagagaaaaatatcgaacaaatattcagagaaagcagtcagcttctttttggggaatctcaacccttataccattgtcttcaatagttctgtacttatgtatttcatgcttctattgtgcaaatgctaacttacaatatgtactgttttgaaggtccatgaagaacttcttgctgcaattaaggatgcagaggagggacttctccatttgaaacgctctagactagtaaagcaaattgatgagatatttcctaaccaagagccaacatctgaagcacctgaagtagctgttgatccacccgatgatgttgagccagaaccattggagccacaggaattttcagttggatctaagtgtagattcaggcataaggatgggcgctggtataatggatgtgttataggacttgaaggctcaagtgatgcaaggatctcatttctgactcctacgtctgaaaacatgtcggtgagtcacgccacttgatctatcgtttttccattattttttcctttgaatagtagctccatgtttcctggtaaaccctaaacataaccctctacgtgctggtatgtttgtaacttgctatgttaccgccggtaggaaatgggtgtttatttgccagtatttactgtttttccaacttctctccttcatgagatattataactccgcacataggagatatgacctgtgcaattattttgttgaatgtccttggaatgacggaataactttaggaaacaaattcctacttttgcaatacaagtccttgctgggctgcagagctatacagcattctagcggttgtataatcaagttatttctgtattgattctaggctattctgtgtgagcagttgctgaacttctctccaaagtaatgtgacagtacatgatttgcttttcattaaaaccatgtgtgcattgtgcatataccagtcctttattttgcaatgaagccatacgtccatctgctcccaaataaaccttgtagcaaagcctgagtgtgtccctctatcctcttgcatcgcaccaccacagtaaattcatgaataaatgggacggggaaaatgttaacaggtcacaggtgggtacccttcaccatcaaccatattttctgttggttaatggaatgtaatgtccagaacataaggttcattgttaccaacaaattaactaatcaatctgcccatagtgcagatgtgcaagttttttctccagcaacgatgtcggtttggtagtaactgccgcttgtcccatggtatgtaaatgcttattttgcacccttctaaggattaaaccccttcaaaccattgatctcttgttccgttgcctttcacctgaagcaatgatgacaccacaaaatggtgtgaacttcatatgatggattgctccttcagatgttgcattttttgtgaatattgtattgattttcatggatttatatctttgtgttttcctacacatataagatgtcccagttggttctgccccttgcacataaagtatcatgtgtgactaatccaaaaattatcctcaggtattgtaattcctattctgtccctgaagcaattcactccgactagatggcagcagtccttggtaggatccagcatactggctgcttctgggcatcattctggcctttggagacgagctgaacttgagtcatgggatgacgatctgaaagttggccaggttgtttttcaagatgacgggagctctgcaaggcttcccagtgattctctttcaatctcagaatatgctgatgagagcgatgaagatggtgaaggaagctcaagtgatgaaggatctgattttagtgaggatggagatcaagaggatgaatctgttcatcagggtctaggccttttggaatccaaaaatttaagtggtgttcagacagagactgcgatctttgcaaagtgggagcaccataccaggggcgttgcctccaaaatgatggcaaaaatggggtaccgagagggaatgggtctaggtgtttctggacaaggcatgcttgatccaatcccagttaaggtactacccccaaagcaatctcttgatcacgctgtggctgcaagtgaggttaatgatagtgtaggccctggaaaaaaacgcagtcggggtgggaaaagaaagcgtgagaagaagtttgctgaacaggcaagggctgctaaagctgaagaagaagagaggtctgtcttcagctttatcaatagccaactagtgggtcaagatgttgcagaaggctcagccgtgaaatctaaaaaggattcatccggtgaggcaaatggacatgccaagaaggaagacagaagatccttgcttgcatacgatgacgaagtgaaagaactgaggagccgtgttgagaagctggaggaaatgatgaagcgaaaccgcaaggacaatgcattctacgaagcagcttcaaagaaattgaaacaaacccgaaaagctctagctgatgctgaagcaacgcatgcttcggcaaccaacgcggttgctagaaaggagaaagagaagaaatggttaaaattctaatgtcaattttcgatgcagtatcaattagcatctgccagtcaatcaatatccattttgatacctgaaggttgtcgtggcatgcgacttcagattgcttgttctttcatgccttatacagtgtgatctgtggctgtaatgttttaggagctctgttgtagggaaaatataggatgtgatatctagtttgtccgccagaagttcaggaccatattgtttcgagttctgaactcacaaacttatgctccctattgtcattttggtacctattctgccagaagcgg

SEQ ID NO: 19903 - DNA, 1146 bp, Oryza sativa
  ref <308>: DATABASE ACCESSION NUMBER: AK070243
  ref <309>: DATABASE ENTRY DATE: 2001-12-06
gtcttctcctactacagccaacctcctcttgcctcgcctcgccacggatcgcgccgccatggccgcctccgcctccgcgccgccgcattcgctgctgctggccgccgtcgcgctcgcggcgctcgcgtcggtggcggcggcgagggacgagaacggggtgtacgacccctgcagcgacacgcggatccagcgcggggacgggttcagcttcgggatcgccttcgccaccctcggcgccttctactccggcggatccgtgcagctctccccctgcgaccgccgcctcagcctcgcctcctccggccagctcgccgtcttccgccccaaggtcgacgagatctccctcctcaccatcaacaccaccaccggcttcaaccccgccacagctggtgggtacatggtagcatttgccggtaggaagtatgcagcccggtctgttccaacctttgtgtccaattcctcatatacagtctccagcttcaccctggttcttgagttcaataaaggcaggcttcaaaacttgcattggaagaaggatggctgtggtgcttgcgcgaaatcttcaagccttgtttgcatcggcaagcaaacctgtgccttcagaacacagagctgcaagagccagggacctgttgactgcagtatcggcatccagctggctttctcaggcaccgataaacacgaatcagttctgaactcgtggtatgaggtgtctaacctgcggcaatactccctctacgggctgtactcgaacctgaaggacaccctgagcggccagttcaacaagttcttctaggcttttggtgcacccgttgttcatactcttctgccactatttctctggagctccctgcctgatgctgtacctattgctcgttaggtttgcccgatctgattttagcttgtgtggagatgctcttctgcgtcattttccactagtattctttccattccagttcccacttaacttcaattatctgatgggttgctatatgttaatgtcatgtacgcaagaaaggtccttgtccggtttgcgcgtttgtaaaaaaacttctggagtgaatcatgatattaacagctttcatctatgtaccagtcgccacatgtttcagaaattgctgtctatgatcatcggatggttaaacc

SEQ ID NO: 19904 - DNA, 1002 bp, Oryza sativa
  ref <308>: DATABASE ACCESSION NUMBER: AK099130
  ref <309>: DATABASE ENTRY DATE: 2002-08-28
gagtcgcgcaccaacccgccggcattcgcgtccggatgctttgctttgcccgccgcgattcgatccacgcctgagcgagcgagcggggcgagcaacgcgcccttccttcccttgccatggcctcttcaccggcgagcagctacgactgctccttcaagatcctgctcatcggggactcggccgtcggcaagagcagtctgctcgtcagcttcgtctccgcctcccacatcgacgacgaaatcgctcccaccataggggttgactttaaaatcaaatttctcactgtcaatgggaagaaactgaagctaacaatatgggacactgctggccaggaaaagtttaggggaatcacaagttcttactacagaggtgcccatggcatcattctagtgtatgatgtcacaaagagagaaagtttcacaaatttggctgatgtatgggccaaggaaatagaattgcattcgacaaataaagagtgcatcaaaatgcttgtcgggaacaaggtggacaagaatgaggaaaggatggtgacaagggaagaaggtcttgcctttgcccagggatctggatgtctttttcttgagagcagtgccaaaacaagagaaaatgtggagaaatgctttgaagagcttgcgttaaagattcttgaggtaccaagtctcttggaggaaggttcttcagttgtcaagaggaactctctgaaacagaagcacgagaacaaagcaaaaaatggaggatgctgtcagtagttccggttgctgtatgcgagctcatgatgcttagacctagcatgttcttgtgtactgatgtaaatgatttgtacctaaatgcttgttggtgtagctgatgcgagttaagaaggaaataaccacacgaagtttttggtgcgaacactgggaattgatttgtacaaaagaaaaagttctcccttctaacttccttcaggtagcagtttggtgtgctgaatgtgccaggatcatgtcgactagtcttgttttctgg

SEQ ID NO: 19905 - DNA, 1889 bp, Oryza sativa
  ref <308>: DATABASE ACCESSION NUMBER: AK070244
  ref <309>: DATABASE ENTRY DATE: 2001-12-06
tgatctccagtactttgagtgtcgcggctcatccttcctctttctatcttacgggagagcctgcctgctgctccagtatccagggcgagctggaggcgggagaggacattctccgttacagctggacaagcagtgatatcatctgttctatcccccttcaagtgtgactcaatcatggtgagtttcttatgcttaaagaccttatggcatgcaaaacatctgaagcctgaaactgtactcttgcgccaagcgaactcccacagttcgtggggttttctcccaaagtttctcttccgaatatcaggcctacatatcaattcagttaagaacgcagaatgtataataagggagacacatgcttcttcaatagagaatggggtactttaggggacaaaatgcatgcagtcgctatgttatatgaagaaagatccttacaggttactcatacattcattaaaaaaaatcgaataccttcattgcaaaaaagatcatgccattgacagcactgccaccacattggcggtaaaatgcagtgcttccatcaccttaattctagcacaattagtatactgtgtgtgttcctagaatgtgtatagttcaaaactgatcatccgaaggttttgctaaaattagttggactgttggttccctatgcattctgccaatttactttgtggatgcatttcattcgaatctttaatgtcagactgcgtataatgcattactgtaaactaaaaaagaactacagaaattgaagtatttgacaaggttatcttgtgtggctctcaagaaaagaaaagaaaaaggtgtgattgatcacacatcaactcaacaaatttggttgcattagctcctaaagggccatgagcccatgatgttctcaatatatcaatagttcatctctttcaatcaccagagaagcaacaatgtacaaaatttactaaatggtcttaacaattagtcttagaaaaaaaactataattcataaacgtaagtacattgggcatgcggttatgtacgaaataatatgctataaccatttcagagttatcgagcaagtgacgaaaatattaaacaaattgttgactcatttgcacaatttaataaaattttggaatgtgtacctgaaaatgggatagtaaaggtagatgtagtccttgatagccatgccagtatcaacatcattattcctaaaacattaacagagaaattcatagtcagatgctttggtataactgagcgaattgtcatgtttgtttgataagactgaaatcgtaagaagttatctgaatatactcacactgctgcagttcgattgctgataagaactttgagatctgatgatgcagtgcgcactcttttgctcctacacttctccagaatagcgacattcgcattgtaatagtcactggcctcatcatacttcccttccacaagcagatcataaacatgttgccgccttgccagtaaagcaagctcggggtgtgcttgattaatttcactcattggtacaccagaaatggcagagtatgagttcaaataattttcagaaacaatctttgtcaggtactcatcaaccttgagccagtcatttctccgaaggagtgattcaagtattcccttaacagacttaacgtgggcaatgatactgcagttcaaggtaatcagtgtgtattataacagaagaaataacacagaattttggaagtgtttcatttttttttagataaaggctcaaggagcctggctttgattgaaagctggaagtgtttcatttcatttgttcatgatagtatatcaaatactgcacataaaaaagggttcgagtatttgacgcgatgaggtagccaaactagttgttgcacatcccaaaatggagtgtgctttgg

SEQ ID NO: 19906 - DNA, 1885 bp, Oryza sativa
  ref <308>: DATABASE ACCESSION NUMBER: AK070245
  ref <309>: DATABASE ENTRY DATE: 2001-12-06
gagtctcataggatggcattctactgttcgtgctgggtctcgccacctgccgatctgcctcgccgccgacgagaggagtgagctcgccgccggtgacccaggccaacccagccgcctcctcctcctcctcccactcgccatgccaggctctccgatccaaacgccccctccagaacccaaaccccaccgccgccgccgcctcctctcggtgccggctctcctcgccgtcgccgtcgccgtcctcctcgccacctcccccaatcctctcccccgcctcctccgctccctcctcgggccaaatccctccctcctccgctcgaaagagagaggtcccccgtccggcacctcgcccgacgcgcgacgcccaccatgtgttctatggatggcccctttcgcctccggcggtggctactgctccgaggcgtggtcctacgtcgcctcgcttgaggaacacgccgcggacgctgccgccgcgaacttcacgctcgctatcgcccaccacggcgacctggagtcgccggagttctggctcggcttgcccgaggagtccaagaacatggcctacaggctcgccaccgcgcggtgcgagctctcccgcgccgtggttgtgtgccacagcgagcctggcgcgtggtacccgccgatgtacgagtccctgccttgcccgcccaccggctacgacgagccggctttcgtcattggacgcacaatgtttgagactgaccgcgtctcgccggagcacgtcaggcggtgcaaccagatggacgccgtctgggtgccgacggaattccatgtgtcgacgttcgtgaagagcggggtggatccctccaaggtcgtcaaggttgtgcaggctgtggatgtaggattcttcgatccggcgaagcacgccgccattcctttgccgatcggtgtgcctgtgatggtgcctgatgattcaagattggaccctgttaactccaaagggaaaggctttgtgttcctcagtgtgttcaaatgggagcagaggaaggggtgggatgtgctgctcagagctttcttgcaggagttctctggagccgatgatgttgtgctttacctactgatcaatgcttaccactctgacacagacttcgataggaaaatccgtagcttcgtcaaagattccagcattgagaagcctatggatggatgggcagaagttcggctgatcgatgagcatatcccacagtctgctcttccaaggttgtacaaggctgcagatgcctttgtgctaccatcccgtggtgaggggtggggcaggccggtggtcgaagccatgtccatggaactgccggtgattgtgacgaattggtcaggtccaacagagtacttgaatgaggagaatgggtacccattggacattgacaggctgactgaggtcacagaagggccatttaagggtcatctctgtgctgagccatctgtcgatcggctgaggactttgatgagacatgtattcagtgatcgagaagaagcgaggagaaaaggtaagaaggcaagggaggatatggttgagaggttttcaccagcaatcgttgcaacgattgttgctgataagatacaacaggcgcttgccagtacttagtagatggataactgaaatgtgattacaaactctaaccagaaagtggatgtatatcatgcaccgctcatgtacgtatgacaatctcattactcactgctttttcataggagttacgtacttatgtatatctgtttcttgcaataatgagatgagtggcgactgtgtttatttttgcctttatgccatcatgagttgaaatgtaaaatgttctcaaagcatgttatggcttcacattgtgatttgtgagtgtcttaattaatttaatgctctcaagaagaactc

SEQ ID NO: 19907 - DNA, 1473 bp, Oryza sativa
  ref <308>: DATABASE ACCESSION NUMBER: AK070246
  ref <309>: DATABASE ENTRY DATE: 2001-12-06
tcctgagttctatgagaagatagttgttcacacacttagccataattttcgcgatgctacaagacttgaacgtgtgcgcttgagattgccggttgaaccacacaatgctctggtcaaaataatatacgctggtgtaaatgctagtgatgttaacttcagtgctgggcgttatttcagtggtggtgctaaagaaactgctgcacgccttccgttggatgccggttttgaggctgtgggcatcgttgcatctgttggagattcagtgaaccatattaaagttggcagtcctgtagcccttatgatttttggggcctattctgaatttactcaggttccagccaagcatcttcttccggtgccaagaccagatccagaggtcgttgctatgctaacatcaggattgactgcttcaattgcccttgagaaggcaggccaaatggcatcagggcaagttgttctagttacagctgctgctggtggaacaggacaatttgctgtgcagctcgcaaaactagcaggcaacaaggttgttgccacatgtggtggcaaatgtaaagctgcacttctgtcttccttaggagttgatagagttatcaactaccaaaatgaaaagatcaaagatgttctgaaaaaagagtttccaagaggagcagatatcatatatgaatcggttggtggggaaatgtttgacttatgcttgaatgcacttgcagtccatggacgccttattgtaattggtatgatctcccagtatcaaggagagcatggatggaagccacggaactacactggactatgtgataagattcttgctaaaagtcaaactgtggctggttttttcctaatccagtatgctcacttgtggcaagatcatcttgacaaactttttgacctgtatgcctctggaaagctaaaggtttcccttgacccgaagaaattcgtgggtgtagcttctgcgcctgatgcggtagaatatcttcattctggcaagagtgttggcaaggttgttgtgtgcattgatccgtcatacagtcagacccttgctaagctatagtctgtggacatgagatacatcatatttcatcgtctagtcacgaggaagaacagtgcaaaaaagacaattacacaggctatcggcataccgtacaaccttgggcttcttgctccgttttgttgtctgtgtgcgtagctgaaacattcccatatttaccccagccgggagaaaccgaataactgcatatgttgtatagctcagttgtctgagtttgtgggaatagctcaattgaatgttatatataagatcgttccatgctcattgtcaaacttatcttggaaaacaatgctgtgtagaactagaatattttcttctgtggcagggagccctttgtgtatccgtggggatcatctaactatctaagcacacataaggatgtgcttgcaagttgcaatccaggcctgaaaattcttgatgcc

SEQ ID NO: 19908 - DNA, 931 bp, Oryza sativa
  ref <308>: DATABASE ACCESSION NUMBER: AK070247
  ref <309>: DATABASE ENTRY DATE: 2001-12-06
tttcgtcggacgccaagaagacgaccaccgtcttcgtggccggctcgacgggccgcaccggcaagcgggtcgtggagaagcttctggagaggggcttcggcgtggtcgccggcacgacagacgtgggccgcgcccgcagaagcctgccccaggacccaaacctccagctcgtgagggctgacgtcatggagggcacagacaagttggtcgatgcgatccgtggcgccgacgccgtcgtctgtgcgacggggttccggcggtcattcgatccctttgctccatggaaggtggacaactttggcacagtaaaccttgttgaagcatgccgcaaggctggggttacaagattcatactcgtaagttccattttggtcaatggggctgcgatgggtcaactgttgaatccagcatatactgtgctcaacttgtttggtttagtgctggtcgcaaagctgcaggcggagaaacatatcaggtcatcaggaataaattacaccattataaggcctggaggcctgactgaacaaccaccaacagggaatatagtcatggagccagaggatacactttacgagggctccatatcgagacagcaagtcgcagaagtagctgtggaggcattgttatgccgagaggaatcttcctacaaagttgtcgagattgtcacccgagctggagctcacaatcgtcctctcaaggatctgtttgcttctattaagcaaagctgagtaacggagcacaactgaacaagttgttccggccctgaacttcaaagggggctagcattattccagaaattgtatagtgatgtgtcagggtgttcatacctagttaggaaaaatagttgtcctaatatagtgatttaatgttctttactataaaatggaatacgcacacccacatcatcgttataaactataattctcacatc

SEQ ID NO: 19909 - DNA, 2761 bp, Oryza sativa
  ref <308>: DATABASE ACCESSION NUMBER: AK070248
  ref <309>: DATABASE ENTRY DATE: 2001-12-06
ggcgcatgaacaatccatgaacttggcgaaggaaaaggccacatccatccactaatcccctcatccaccattccacccacacgccgagcgcgaggcggaggcggccgcgtctataaaaccagaggcgcgcctcgccgcgccgcgccgcgttctcttcctccccggagtagaaaccgcccgccatttggatccccccaattcccctcctcgcccaaaaccctagccgcacccccgccgcgcgccctccgcctccgcctccgccgcggcgtgcgggctccgtcgtccgtcggctcctcgccactggcgtcgcgaggcgtcgtcaccggaggtagcgggagctcaggggacacgatctcgaaggcgcgcgccaggacgaacagctcgagcgcgccgcggggggccttcggttctgagataaatcaccccgtccgcatcatcgacgcctccctctccgcgcttggcgccagctcgttctagggggggaagatctcggcgacgagcagcttgggcgcgttcgcctcgatggacgagttcaaaggcccaggggagaaggagaaggaggaggaggccggggacaaggccgcggcggaggaggcgggggacggattccaggtggtgcgcggtaagaagaagaagcggcccaatggtggttcggcttcgggtgctgggtcggggacgatgatggccaaggacaaggcggcggcggcggcggccgcggagccgtggacgaaggcgaaggtgtctttccacgatcccaacattccgcggccgcaggatgtgtacgcaatcagagtgaacaactacaacgtgccgttcgaccatgtctggctagagcgcaccgaagatggcagccgccctatccaccctctggaaaaactgccaatggagcagtttattgacagaaatgttcctgaaagtgaacctgtaaagccagctgatttggaggataccccatttacgctagttgaagataagaatggtttagcagacttagctaaaaagttgaagagtgtaaatgaatttgctgttgacttggagcacaatcaatataggtcatttcagggtttgacctgcttgatgcagatttcaacaagaacagaggattttgttgtagacacccttaaacttcgcatatacattggtctctacttgaaagaacattttaaagatccaaccaagagaaaggtaatgcatggggctgatcgtgatattatgtggctccaacgggatttccacatatatgtttgcaatcttttgacacaggacaggcttcaagggttttacagatggagcgaaacagcctagagcacctattgcgtcacttttgtggagtcacagcaaataaagaatatcaaaacgctgattggaggtcaaggccactttctgatgaaatgataaagtgtttaacctatagaccctatctttcatttattttggtttagtcttgcctcgtttttgtcctacatgttttactatttcatccagttttacccacttgcaaataactcctgtacaggtatgctagagaagatacacactatctgttgtatatgtatgacttgatgaggttgagactgcaaaaggagtcgacatctgacaatgatcttcttctagaggtgcaaaagcgcagtaatgaaatttgtttacagttgtatgaaaaggaactgctgacagatacatcttatctccacatatacgggttgcaagaacatgacctggatgcaaaacagctggctgttgtatatgctctacatcaatggagagattatatagctcgtgaagtagatgagagcactggttatgtgttaccaaataaggctttaattgagatagcaaagaagatgcctacagatactgcagagttaaaaagaatggtgaaatcaaaatatccatttgttgatgaaaatctggaccaagtcgtaggcatcatatggaatgcaactgaatcttcttatgcctttgaaagcagagctgaacaactaaagaaggaacgtctggagcagctaacggacagggttcagactatatcatcacctgagatgaagacatctatgaacttatcaggccagattagatcaatggataaggaaatactgagcgataacatacatcagcaggtggcacaggctacttttcaagaactgaagagacctatggctttgggagcagtagggaattcaacatccgggggacagagagatttctttggagggttttcaaataagtctgagaagatggagaaggctaaatcctatccagccttttactacccccagcttccacaatatagccctgaagttgggtacggctttcaatcaataaaccgaactatggcgggaacagcacagtctcctactggcaataaggagagggatctccagaaccctagaagacgtcaatctttcccaccttccggtaacataagtgatacacaccagtaattgctctgatgtatgccttcaaattcatccttctgtgcagaaaatagctgtagagaaatggaaactgggctgtttttatccgtgccccctaatatgagaaactatgcctccctcagatttttttggctagactaacagaaatatgagaatagcccatatcattgacattagatgcagagcatgggaaatgccaatgtggattggcttgtgtgtaacaactgacaaacatgtgctgtgcaattgtgaatactggagttgtacaagtggtatactgtaatactgttatagcatagcatcagaatacaaagacagaaatgaac

SEQ ID NO: 19910 - DNA, 788 bp, Oryza sativa
  ref <308>: DATABASE ACCESSION NUMBER: AK070249
  ref <309>: DATABASE ENTRY DATE: 2001-12-06
ggctgcagcaatccaagacgaagctgagagaaagaagacgaatcgagagcaaaagctcaatctaagctcgcaagaaagctcgagtagcagccatggctttagcacccacgtctctccggtgcttcctcaccggaaggccactgtgcagtgcgggcagcacggcggccgtgctcccggcgccgaagccgacgaggcggcggccatcggcgaggctctcgtgcagggcggccaatgaggcgccgtcgacgcggggtgatcttccggtgaagcttggcaagctggcgatggtcgcgctggccgccggcgtgctcgcgctctcgcctgtcgacgatgccatggcggccaagtccggcgggagggtcggcgggcaggcgttccggtctgcgccacggtccgcgccacggccgtctggtccacggataaacaattcgaggacgaacatctacatcaacccaccggtggcgccgcctctggtcggcggttacggctatggctacggctacggttggtcgccgttctcgttcttcgctcccggcccgagcgtggccgtcggtgtcggcggcggcttcgacacgctggtgctgttcatcgtgctcggaacgatcgttggcgctgtcaggcggtttctcaacaggaacgacgacgactacgatgattactgaattaattactgtgttgctgatactgttaggaacgatgtcatcagatcataccgtgtgtaatgtgatatagcgaggctattttttttcatgtcaattctaagggaacagatcggtaagctagaagtg

SEQ ID NO: 19911 - DNA, 1732 bp, Oryza sativa
  ref <308>: DATABASE ACCESSION NUMBER: AK070250
  ref <309>: DATABASE ENTRY DATE: 2001-12-06
agggagctcaaacatcaaatcttcctgtgtgagagatcaagagagaggaagtgatagattttttttacctgacctagctgtttgatactttgatttgttaatttcttgtgcatttgctgtttgtgatccgttgctgtgatcgatgtgcccctgaacgaggtccacgacgtcgttggagttggcgccggcgagccggcgaagatggatcgccgccgcgcggcggagctgatgctgctgtccctctcctcgcagagaacgcgcatggcgctcgtgggtggcaaccacaccgccgcccgcttctgcacccgctaaccccgccgccgccgccgtctcctcctcttcttctcccatctcttctctctcttgatcatcttctccgttcatctctgctctgagtgtgtttgatcctcttcttggcgatatttttgtgttgggatcaaaggcgacgatgaagaaattagctgcgagggatggcagggccgccagcaatggcaggctcctccggctggtggcgcgggcggcgctcctcgccgtcgtcgtgctttctctcgtgtcgctccggctggtgctctcgccggccacggcggtgggcgacgacggcgagctctacctgccggtgctactcgccgaagtaagcgaccgcggctacctgcgccacggcagccgctcggtgttcgtcggcgacgccgggtcgtgggcgccgttcctcgagcggcaccacgtcgccgtcttccgcgccggcaagctccgcgagctcgccgacgagtccgtcgacgccgtcctcttcgacggcgacgcggttcagctcggcgccgtcaaccgcgtcctcaagctcggcggcgtcgccgccggtttcgccacgtcggggtcgtcgacgttgcagctgcctgacaactacaaggccgtgttcgcgcacaggtcggaggcggccatcgccttcgccgtggagaagaccacgccgccgaccacgagcgccgccgtgacggcttcgccggtgggacctcaccggaagctcctcgcattgccggggagcaagaaggacgacgcgttggccggtctcgaggccgtgctcctcgagccgccgcagaggcagcaccggcgaatcatccggcggctgcggccaaggtacctcccggagctgaccggcgactcgctggaaggctaccgccgacgaacgttcatcgacgtggcgccctctcgcggcggcggcgcggcgtcgtggttcaagaagcactacccgagaggggagcgcgtgttcgacatggtgcgcctcgacgccgccgacgcgacggagccggcggcgagctcatcggcggcggggatcgccgagtggctggaagggaacgtgagggaggaggactacgtggtggtgaaggccggcgtggaggccgtggaggagatcctccgcaggcgcgccgccgtccgccgcgtcgacgagctcttcctcgactgcgacgccggcgccggcgccgacgcggcacgccgcccctactgggagtgcctggcgctgtacggccggctgcgtgaccacggcgtcgccgtgcatcaatggtgggagctcatgaatgctcgaccacgtagagagagaaagaagagagagagagagagagagagagagagagagagtgaaatgatggagctcatgagagggaagagatcactttgggttcagaacaaactatgaatatgcagggtactgattaacagctaacggataaatatatttggtttt

SEQ ID NO: 19912 - DNA, 1250 bp, Oryza sativa
  ref <308>: DATABASE ACCESSION NUMBER: AK070251
  ref <309>: DATABASE ENTRY DATE: 2001-12-06
gttcggcggccccgtataaggaggagaagaggatgggtcagaggcaaagcaagcagcccagcccggcggccgcggtgcacgcgcgcgcgacgaccacgccgacgccgacgccgggggaagacgagcagcaggggagcgccctcgaagccgagaggagggggaggaggaggacgacgacgaggcgcgcggcggagggcgccatggacaccttcttcctgtcgcacggcgcgcccacgctgtccatcgacgacaccatcgcggcgcagggattcttcaagtcgtggctgccggcggcggtggcgggcgcggagttgccgcgggcgatcctcgtcgtgtcgggccactgggaggcggccgcgccgacggtcaacgtcatccgcggcaacaacgacaccatccacgacttctacggcttccccaaggctatgtacaagctgaagtaccctgcgccgggcgctcctgatctggcgatgaagaccaaggagcttctggagcaagccgggttcgggccggtgaaggaaaaccacagccgcgggcttgaccacggtgcgtgggtgccactgatgctcatgtacccggaggcgaacgtgccggtgtgccagctctccctgcagagcggccgcgacggcgcgtaccactacgagctcggcagggcgctggcgccgctccgcgacgacggcgtcctcgtcctcggctccggcagcgcgacacacaacctccgcaggatggggcccgagggcacgccggtgccgcagtgggcggcggagttcgacgggtggctgcaggaggcgctgctcggcgggaggcacgacgacgtgaagcggtacgaggagaaggcgccgcacggcagggtggcgcacccgtcgcctgaccacttcctcccgctgcacgtcgcgctcggcgccgccggtgagggggccaaggcggagctgatccaccgcagctggagcaacgcctcgctctcctacgcctcgtaccgcttcaccaccgccaagaactgaaaaccggtcgacgcgatgcacgccggctcgccgcatgcaaccacgtgtttgcttgtaacatatttgactcgaacaataatccccgtgggctcacgtagacgtgtgtgccgtgttcgtgtttgtatttctcggagccgtggcttggggttgtttacttgtttttttttttgtaagattgggttgggcctgggcctgggcctgggccgtggcacagccttatggcgttaattggtgttcttatttggaccc

SEQ ID NO: 19913 - DNA, 973 bp, Oryza sativa
  ref <308>: DATABASE ACCESSION NUMBER: AK070252
  ref <309>: DATABASE ENTRY DATE: 2001-12-06
gggcgggcggcgggcctatccaactacggaagcaatcaagctagccacgccggcggctttgcaagttcgcatggccgcattcccaactcgacggcgggaactgactgctcgccgccgcccggtcagcatctagccatccagggtaatggtagttggaaaagaccgatcaatcttgcttgctgcggctgtaataacccaaggagctgtattgaaaataacttgtggtcgagggccatcgtttcccccagcataaacaatggtaatccccttctggactgcatggagtgcaccaaatgaatcctcatcagcatgaattgagagggacaggatatcaactccatcatgaattgcatcatctagagctgctagcactccggcactagcaagctgtaggctattccctgtgttccatatgaccttatacacagcaagacgtgctcggggtgcacctccacgggctactcctgttgctaggccatggacgctgactccatctaccactgcaccagctgctatggatgctgtatgcgttccatgcccgatcatgtcccgggcagacatttggttggcccccaggcctgtcctagttgacacacgcccttccatcgtgatggtattgaagtttattgggtggttggtagttcagtccgaggaaatcccaacttcttgtggtcagcaattcatgttgcttatttggggtaacactgatcacttcagtgtgggagtcagacctactgtcgccatcatgggattcgggtaaccgcatcaacagcaattgcagctggtcaaagcagtagctattcaatcctaggaacgttttaggatcatttggtcattaggatttgattagttacattctcacaatgatagttgctttccttatctttatacttctctgtttatggagagatgttcacagtgaaaaacaactaggcaaggaagaataaacaaagtctctaatcttcttcccagt

SEQ ID NO: 19914 - DNA, 1373 bp, Oryza sativa
  ref <308>: DATABASE ACCESSION NUMBER: AK070253
  ref <309>: DATABASE ENTRY DATE: 2001-12-06
gatgagagattaacatcccaaccagctgctgctcgcaacgtacgtagcatcttgcccgcccctcgtcgaagtccgacccgcagctagctcagccggcggccggcgagcacaacgtacgtggtggggtcgcactcgcgcaccaccggcggagctagctagctagcgttgcccctgtttctgccaccgctcgtcgccgcggccggcctgcctgtagatcgtacgccgacttcgacgacgtacggccacctcctcccccaacgaattagccatacggaaggacaagttttttaattaaggggtaaagtccatcttactctccaaatatggcaaaggcaaagaaaaagaagaagaaaaaaaaccccaaagcttacttttgaataattggattggacagtcataggaaagaaaaaataaatgagtgaggagaggtgtccgtgtgtttaggaatgtacctctcaagttcattcctgagcatcacgcagtgtatagtggtaggatagttacgctcaacaagtctggcgttgttggacacaggccggcaccaccaccggtcctccaagaagctcagatcttagatgttgatgatctcaccaacctggcactcctaccaccttctccggagccatccttaggtccgcgcagaaggggcaagagaatcatgactcccagctactcttcaggtggcaacagcaaggggaccaggagggactccaccggagatgcatttaataggctggctgacctgagggttcagtccaatgaaagtaaggccaggagggaggagcagaagcaagcgaagagcgctagagcatgcatggagatgctcaaggctgatgggattagcatgcaggatcccgtctaccacacaatcctgaggatgtttcgtgatgggtacctgtgtgagttcttcattgaggactgcaccacaccagagggtcgcatgtacttcatccagctgcatggtgcaccagacctcactcctgaccccctgttgtttgctccaccgccaccaccaacctgctcaggccatgttgagggctggtacaagaggttcagtcctcatgacgatgatggtagcgacggtgctaatggtggtgctgatggtgcagcaatgttttagcactgcttctgcttgcttatgtcgctttggtgccatgttctgttcgtgatgcatcttttaatttccctgtgatgtctgtttaatagcttgctccgattcatatcgagcatcgtgcttgttgtaggccttatttaagggcccctttgaaacacaggataggaaaaacacaggaataggaaaaacgtaggaattgaagtggtatgttttcctaatcctacaggaatgaaaaacacaagaaatatgaagagggtcc

SEQ ID NO: 19915 - DNA, 1851 bp, Oryza sativa
  ref <308>: DATABASE ACCESSION NUMBER: AK070254
  ref <309>: DATABASE ENTRY DATE: 2001-12-06
aaatacaatccatcatcacccctaccttgtttctgtgctgtgcctctgggagttggatttcggttgaagagtccagggatctcagatttccgtccctataaggaagactttcagaaaaacttagcccatctgttggtcctggctgattaccaaatatacatggaacggtacatatgggaggtcggtccaaggctgaatatgcatttgaagttatttccaaacaatacaaatttattcaatacgtccgaggttgtgcggctcagacatctacttgctggatgggagattactctatcaaatgtgtttggtccgtatgaacttctcaacttcacgcttggttcctatgaagatgaattcccaactgtggcgtcatcaggtctaaagaggggcgcattagctggtattttggcagggacaatcactgcttccattgcagcgtctgtgtttactacaatatttataatgagaagacgttccaaacgtcgaactacatctaggcggtcattactctcaaggtattctgtcaaggttgatggtgtgagatgcttcacatttgatgaaatggctgcagcgacaaatgattttactgattcagctcaagttggtcaagggggttatggaaaagtttataaaggaaatctaactgatggaacagctgttgcaatcaaacgggcacacgaaggttctcttcaaggttcaaaggagttctgcacagaaatagaattgctatcaagactacatcatcgtaatttagtttctctggttggctattgtgatgaagaagatgaacagatgctggtgtatgagttcatgccgaatggtactctgcgtgatcacctttctgccaagtcaagaagacctctgaactttagccagaggatacatattgccctgggtgctgcaaagggaatcctctatctacacaccgaagcagatcctcctatatttcaccgtgatgttaaggccagcaacatcctcctggactccaaatttgtagcgaaagtcgcagactttggtctttcaaggcttgcgccagtaccggatgtcgatggaaccatgccagctcatatctccaccgttgttaaggggaccccaggctaccttgatccagagtacttcctaactcacaaactgacagacaagagcgacgtgtacagcctcggcgtcgtgcttctagagctattgactgggatgaagccaatccagcatggcaagaacattgtcagagaggtgaacacggcataccaatcaggcgagatcgccggagtgatcgacgagcggatatcctcctccagctcgccggagtgcgtggcgaggttggcctcgctggccgtcaagtgctgcaaggacgagaccgacgcgaggccgtccatggccgacgtcgtcagggagctggacgccatccggagcgcgctgccggagggagaggagctcctgccggagtacggcgatcagtcggccacctccacctccctgacggcgaccgggccgctgtcgtcgtcgtcgaccacgggggccctcttcatctcctccggcagcggcggccacgccaactccaagagcggcatcccctccggcacggtggctccccggtagcgttgcgtgccgggctaacgtaacgtttttttttctccttttcgcgtcgtcgggtgtaaaatggaagggaattttcttccggtgtaaattagctgtatggtagtagcacgtactcctgagtgagtgagtgagtgagtggtcttgctgctgttccaggtgatttcttggtctttacagtgggtgatttggccgctgttgtaattaacccatagatgaatcatgaatcatgaatgcttgcaaccaacgtttagatcc

SEQ ID NO: 19916 - DNA, 1193 bp, Oryza sativa
  ref <308>: DATABASE ACCESSION NUMBER: AK070255
  ref <309>: DATABASE ENTRY DATE: 2001-12-06
ggtcgcatctgggagctcctacaaataggagaaacagtcagggagaccaaaccctaaaaccccgcatccactgccatggcggccgtgcagcgactcctgcgggcgtccgcctccggtggcgcggcggcggcggcggcggcggcgaggaggcgcatgtccacggcggtggcgccggagcagacgcctgcggccgcggcgttcccgttcgcggcggcggcggggagggcgaggcagcgggtggcggaggagaggaacgtgcagtgggtgttcctcgggtgccccggcgtgggcaaggggacttatgccagccgcctctcccgcctcctcggcgtgccccacatcgccaccggggatctcgtccgcgacgagctcgcttcctccggccccctatctgtgcagcttgctgaaattgtaaatcaggggaaattagtttctgatgaaattatcatcaatctgttatctaaacgtcttaagaaaggagaagagcagggggaatcgggatttattctggatggttttccacgtactgtaaaacaagcggaaattcttgatggagttactgacattgatatggtggtcaatctaaagtcgagagaggatgtcctagttgagaagtgccttggcagacgtatttgtggccaatgtggaaagaacttcaatttggcctgcattgatgtgaagggtgaaaatgggctgccaccaatctacatggcaccactattgcccccaaataactgtatgtcaaagcttatcaccagagctgatgataccgaagaggtcgtgagaaatcgtcttcagatatataatgacatgagccaacctgttgagggtttctaccggcaacaggggaagcttttagaatttgatttgcctggaggaatccctgagtcttggccaaagctgctccatgttctaaatctcgaggaccaagaagagatgaagctggccactgcgtaaggccatggggctggctttacattgggccaatgaatttacacaccgcaattttgaataatggaaaaaagagcaaaaacttattccataatgtgtgcgtttgtagaattaaagtttgaccaaaagtgattcattttcgccggtgttttgatgagccggtacactgtaactgtcatgttgagatgttaatcttaatttcttgttttgatttagcctgctgagaacaggacttcatcagg

SEQ ID NO: 19917 - DNA, 1349 bp, Oryza sativa
  ref <308>: DATABASE ACCESSION NUMBER: AK070256
  ref <309>: DATABASE ENTRY DATE: 2001-12-06
gattttcgtcgaacaccttcccgagccgactgccgccgccgccgccatgctcctcgcgaagccccacctctcctcctcctctttcctcccatccacgcgggtgtctagccccgctccgggtcccaaccacgcaaagcccatcgccgcctctcccgcccctcgacgctgcctccgtctcgccgtcacatccgccgcggcgccggctgcttcgtcggcggaggcggcggcggcgctgagccgcgtggatgtgctctcagaggcgctccccttcatccagcgcttcaaggggaagaccgtggtggtgaagtacggcggcgcggcgatgaagtcgccggagctccaggcttcagtgatccgcgacctggtcctcctctcgtgcgtcggcctccaccccgtgctcgtccacggcggcggccccgagatcaactcctggctgctccgcgtcggcgtcgagccgcagttccggaacggcctccgcgtcactgacgcgctcaccatggaggtcgtcgagatggtgctcgtcggcaaggtcaacaagcacctcgtctccctcatcaacctcgcgggcggaaccgccgtaggtctctgtggcaaggacgctcgcctcctcaccgcgcgcccctccccgaacgcagcggccctcggcttcgtcggcgaggtctcgcgcgtggacgccaccgtcctccacccaatcatcgcctccggtcacatcccggtcatcgccactgtggccgccgacgagaccgggcaggcctacaacatcaacgctgacacggcggccggcgagatcgccgccgcggtcggcgcggagaagctgttgctgctcacagatgtgtctggaattctggccgaccgtaatgaccccgggagtctggtgaaagagatcgacattgctggggtgcggcagatggtggccgacgggcaggtagctggtgggatgataccgaaggtggaatgctgcgtgcgtgccctcgcacagggcgtgcacactgcaagcatcatcgatgggcgtgtcccgcactcgttgctgctcgagattctcacagatgagggcactggcactatgatcactggctgaggtgattcatcccgtcgtggtattctccggtgcctctcttctcatactgtaatgtaatttgcatttgatatgcctcatgattgcaataagaattgtattcctcacacctgtagctggttgagataggttctgccatccgtttgttctgtgactttgttcgcaatggtgacatttttgtagtttgtgctataaatcgaatcaattcaggttaaactgtactcaagtaaagttgttcttttactgttgtttgggaataacatgggcatgattc

SEQ ID NO: 19918 - DNA, 845 bp, Oryza sativa
  ref <308>: DATABASE ACCESSION NUMBER: AK070257
  ref <309>: DATABASE ENTRY DATE: 2001-12-06
ggtactcaagccggaggcagcacactgcaacttaagtttttctatagctcctagcaagctagcaatggctccctcggtgatggcttcgtcggccacctccgtggctcccttccaggggctcaagtccactgcgggcctcccggtgaaccgccgctccagcagctcgagctttggcaacgtcagcaatggcggaaggatcagatgcatgcaggtgtggccgattgagggcattaagaagttcgagactctgtcgtacttgccgccattgacagtggaggaccttttgaagcagatcgagtacctgctccgatctaagtgggtgccttgcttggagttcagcaaggtcggattcgtctaccgtgagaatcacagatcacccggatactatgacggtaggtactggaccatgtggaaactgcccatgtttggatgcaccgatgccacccaagtgctcaaggagctcgaggaggcaaagaaggcataccctgatgccttcgttcgcatcattggctttgacaacgttaggcaggtgcagttaatcagcttcatcgcgtataagccaccgggttgcgaggagtcaggcggcaactaagcgctttcgttccttcgtgcatgttctttctttttctttttttttttgtgtgtccgtgttaagctgcacgtaattgttctctcgcgctccgacctgccgttgttgcaagagtactactacaactatcggtctatcgttcggtgacggtgagacagggcacgtgaatgcaagatctccggctatacacacgtactcatgtaatatgatgcctagagcatatctgaatccgtcgacaatgaaattttggttttgc

SEQ ID NO: 19919 - DNA, 1257 bp, Oryza sativa
  ref <308>: DATABASE ACCESSION NUMBER: AK070258
  ref <309>: DATABASE ENTRY DATE: 2001-12-06
tcccgtttgcaccaccaccaatctctctctctctctaagatctctatctatctaaagatctgagctacaattaattaaaacctgataagaagaagaccctgagctcaatcccttcttattatactatatatatacttctgtatttgtgcacagtgttggtacaggtatctgcagacagccatatctatctttctagctaattggcaatatgcctgaagtccactgctcgtcctaagatttacttctccacccccccccctctcctttgcttcttcttcttcatcatcatcttcttcctcctcctgttaattaagttcttgatttctaagctagcaattgagcacacatcgatcgcgagagacgcagcggcgcccgtctaccgcggggctagaggaatgtcggcacagatcgtgccggcgccggagcatgtgtgctacgtgcactgcaacttctgcaacacaattttcgcggtcagtgttccaagcaatagcatgctaaacatcgtgaccgtccgttgtggccattgcactagcctgttgtcagtgaacttgcgaggattggtccaagcactcccagcagaagatcatttacaggacaatttgaagatgcacaatatgagcttccgcgaaaactactctgaatatggctcatcttccagatatggccgagtgccaatgatgttctcaaaaaatgacacagagcatatgctgcacgtgcgacctccagagaagaggcagcgggttccttcagcttataacagatttatcaaggaagagatccgggggataaaagcaaacaatcctgacataagccacagagaagccttcagtactgcagcaaagaattgggcgcatttcccgaacatccatttcgggttaggctcccatgagagcagcaagaagctcgatgaggccattggagctcctagtccccaaaaggttcaaaggctgtattgatcgagtacacatgatgatcgatggatcctacgtgcttgttgatctcatgttgtaagtaacttaattaagaaaaaaagtctacgcttatttatttcttaagtatcatcagttaaatttgtgagcgagtatatagatgagttgtcatgatcagtgagtgatcgtatgcatgcagtgctgagaattaaaggtgtatatgcatgagtaacgttacatgcagctagtgtcgacgcacgtatgacagactgaataaactcttcaccatgttgtttttttatgtttgaaatgaattaattaattgtcc

SEQ ID NO: 19920 - DNA, 1982 bp, Oryza sativa
  ref <308>: DATABASE ACCESSION NUMBER: AK070259
  ref <309>: DATABASE ENTRY DATE: 2001-12-06
gctcagcctcatcttttggttggtttcgttttggtattcccatacactttgtttctcttccccgtctcgtggtcgagagaaaccgagaggagagagagggagaggagcgctgccgattttccggagggggagatctttttcttctccctgaaggttcgagatcgatctgcgacgaggaggagcggggaatcgtaactttatttccgaggaaatttcaacaaattgatgcactaatggagtccaagggtggcaaaaagaagtctagcagtagtcgttcctccctgatgtacgaagctcccctcggctacagcattgaggacctccgacctgccggcggcatcaagaagttccgctctgctgcttactccaactgcgcgaggaagccctcttgatagcccccttggctaccttgacctagtagtttagttactcctctgaattctcgttttgggctttcttacatctctctggctagctgcttcccagtgaccgggaaggtcatcagtcctgcttcctttcttcctcatctctggcatcgtccttcgaaacaatggcagtcctgtcagttgctgactctccaccggtctcggcgatcgggtttgagggatatgagaaacgcctcgagatcactttctccgaggcgcctgtctttgctgaccccaatggcagggggttgcgtgcactgtcacgtgctcagattgactctgttcttgatctggcgaggtgcaccattgtgtctgagctctccaatgaggtcttcgactcgtatgtcctttctgaatcgagcctctttgtgtacccatacaagattgtgatcaagacctgtgggactaccaagctcctgctcgccattccgaggattcttgagcttgctgaagagctatctctgccacttgaagctgtgaagtactctcgtgggacattcatttttcctgaagcacagccctctccacacaagaacttctctgaggaggttgcagtcctgaaccgctacttcggcggtctcaaatctggtggcaacgcatacgtgattggagatcctgcaaagccagggcagaagtggcatgtctactatgccacccagcacccggagcaacctgtggtcactcttgagatgtgcatgactgggctggacaagaagaaagcttctgccttcttcaagacttctgctgatggacacacaacatatgctaaggaaatgaccaagctctcaggtatctctgacatcatcccagagatggaagtctgcgacttcgatttcgagccctgcggctactccatgaatgccatccacggccctgctttctcaaccattcatgtgactcctgaggatggcttcagctatgccagctacgaggtcatgggcttcaaccctgcttcccttgcctatggtgaccttgtcaagagggtgttgagatgctttggcccgttggagttctctgttgcggttaccatctttggtggccgcaaccatgcagggacctgggccaaggggctggatgtcggggcctattcttgcagcaacatggttgagcaggagctgccttctgggggtttgctcatttaccagagcttcactgctactgctgaaatcgccaccgggtcgccacgatctgttctgcattgctttgctgatgaaaacacggagaaagctggtaaaatggaggctctctactgggaagacgatgctgtcgaggagatagatggcacagagggtaagaagatgaggagctgctgatgagggaagcgcactgaagattaaagaatactcaaaactccagtagcgatcactctgttactttgtgaagcagccagccagactattcatatagtactagtatatgctatgaccaatgttctttattatcttgcatatattctgaataaaagggctctaggtggtctgctttgtctgccacagtgagcaaaatgtatccgaatatcaaactttaatgttgggaatataatacaagtcattttat

SEQ ID NO: 19921 - DNA, 2729 bp, Oryza sativa
  ref <308>: DATABASE ACCESSION NUMBER: AK070260
  ref <309>: DATABASE ENTRY DATE: 2001-12-06
ggaagggagaaaaagcttctcctctcttccgcattgcgttgcgccaccaatctcctctccccatctcggcctcctcgccgccaccatccgcctctagggtttcggttccatgcgatctcgccgcggcggcggaagggaaccctaggtaggaggctctcctcttgttgagtttgaatctgaggttcgtgaaccaatgggcaagggcgggcaggaggagggcaagcggcgggacggatccgacgcatccgggtcggagccggccgcagcggccttcccggcgtgggcgcgcacgccgagcgagtgcctcgcggagctgggcgtcgcggcggaccgcgggctgtcctccgaggaggcggcggcgcggctgcggcggtacgggcccaacgagctggagcggcacgcggcgccgtcggtgtggaagctggtgctcgagcagttcgacgacacgctcgtgcgcatcctcctcgccgccgccgtggtgtcgttcgtgctcgcgctctacgacggtgcggagggcggcgaggtcggggcgaccgccttcgtggagcccctcgtcatcttcctcatcctgatagtgaacgccgtcgtcggagtctggcaggagagcaacgccgagaaggcgctcgaggcgctgaaggagatccagtccgagcacgcaaccgtcaagcgcgacggccggtggtcccatgggcttccggcgcgcgacctcgtccccggagacatcgtggagctccgtgttggcgacaaggtcccggcagacatgcgtgtgctccagcttatcagctccaccctccgtgtcgagcagggttccctcactggtgagactgcttcggttaacaagaccagccataaaatcgagctggaggacacagacatccagggaaaggagtgtatggtttttgctggcactacaattgtcaacggcagcgctgtctgtgttgtgacgggcactggaatggacactgaaataggcaagatccatgcccagatccaggaagcctcacaagaggaagatgacacgccactgaaaaagaagctcaatgagtttggggaggcactgacagccataattggggtgatctgtgccttggtttggcttatcaacgttaagtatttcctcacctgggagtatgtggatgggtggcccaggaattttaagttctcatttgagaagtgcacgtattactttgagattgcagtggcactggctgttgcagcaattccagagggcctgcctgctgttatcaccacatgcttggcgctcggcaccaggaagatggcacaaaagaatgcacttgtgaggaagttgccaagtgttgagacactgggttgcactacagtgatttgctccgataagacaggaacattgaccaccaaccagatgtcagcggtgaagcttgtggcaattgggaggtggcctgatacacttaggagctttaaggttgatggaaccacttatgatccaagtgacgggaagataaacgagtggccaagtttgagcatggatgaaaatctccagatgattgctaagattgctgcagtttgcaatgatgcaagtattgctcactctgagcatcagtatgttgccactgggatgcccacagaggctgctttgaaggttttggttgagaaaatgggccttcctggtggatatactccatccctggattcatctgatttgctaaggtgctgtcaatggtggaacaatgctgctaagagagtagctactctggagttcgatcggactagaaaatcaatgggagttattgtaaaaaaagcagactctggaaagaatttgctgcttgtcaagggagctgtagaaaatttgctagaaaggagtggctatattcagttgcttgatggatctgttgtgctcctggatgaaggtgccaaggcgctcatattatcaacacttcgtgaaatgtctgctagtgcattgcgatgtttgggttttgcgtacaaggaggatttggcggaatttgcaacatatgatggtgaagagcatgcagctcacaaatatctacttgatccttcatactactcttccatagagagtaatttgatattctgtggttttgttggtctaagggatcctccccgagaagaagtccacaaagcaattgaagactgtagagctgctggaatacgtgttatggtgattactggtgataacaaagaaacagcagaggcgatatgccgtgagattggagtttttggttccacggaagatattagttcaaagagcttcacagggaaggaattcatgtctctttcagataagaagaaactcttaaggcaaacaggtggccttctcttctctagggctgagccgaaacataagcaggagatagttagattgctcaaagaagatggtgaagtggttgctatgactggtgatggagtgaatgatgcaccagctctgaagttggctgacattggagttgctatgggcattacagggactgaggttgcaaaagaagcttcagatatggttcttgcagatgataacttcagtacaatagtcgcagctgttggtgaagggaggtcaatctacgacaatatgaaggcatttataagatatatgatctcttcaaacatcggggaagttgcttccatatttctaacgtcagctttaggtattcctgaaggtctcatccctgtgcaacttctgtgggtcaatcttgttacagatggtcctcctgcaacggctttggggttcaacccacctg

SEQ ID NO: 19922 - DNA, 1637 bp, Oryza sativa
  ref <308>: DATABASE ACCESSION NUMBER: AK070261
  ref <309>: DATABASE ENTRY DATE: 2001-12-06
ctgtggtcacctgcagtttgccccacagccattccaagcacatattccctgcaccctgctagctaccttgagttgcaattcatccttttggcagtaaagttcttagtaatattacccagttgctacgtagcagctcgctgaagaacaaaggaaccaatcccacctatctgaatccacacataaacagtagattcttgttctcgcttggatagctacagcctacctctgcaggcgctatgatgaggctgaaagtgacgatactggtggtagcatttgttctcagcgccggcgtgcatatctcggcggcggcggcggccgccggccagagggaggaggtgcacctggtgccggcggtgcacgtgttcggcgactcgacggtggacgtcgggaacaaccagtacctgccggggaactcgccgctgcagctcccctacggcatcgacttcccgcactcgaggcccaccggaaggttcagcaatggctacaacgtcgccgacttcatcgcgaaactggtgggattcaagaggagcccgccggcttacctgtcgctgacgccgcagacgagccgtcagctcatgcgaggctaccgcggcgccaattacgcttctggaggatccggcattctcgataccactgggacaaccgtcgtcacgctgacaaagcaaatcgtgtacttcgcggccaccaagtcaaagatgatgtcgaacggcggcggcgatggcaacagctcgtcggcgtcggcgtcggcgatcgacgatctgctgtccaagtctctcttcctcatcagcgacggcggcaacgacctgttcgcgttcctgaggcagagcaaccggacggcgagccaggtgccgtccttctacgccgacctgctgtccaactacacgcggcacgtccaggcgctgtacagcctgggcgccaggcggttcggcatcatcgacgtgccgcccatcgggtgcgtgccgtcggtgcgggtcacctcgcaggcgggcgccaccaggtgcgtcgacgccgccaacgacctcgccagggggttcaactccgggctcaggtcggcgatggccaggctcgccgtctccggtgctctcccggggatgaggtactccgtcggcagctcgtacaacgtggtgtcctacctcacggcgaacccggccgccgcggggttcaaggtggtgaacagcgcgtgctgcggcggcggccggctcaacgcgcaggtcgggtgcggggcgcccaactccacctactgcggcaaccgcaacgggtacctgttctgggacggggtgcacgggacgcaggccacctccaggaagggcgccgccgccatctactcagcgccgccgcagatgggcttcgcctcgcccattaacttcaagcagcttgtttcttcttgatgcagattacgctaattcatcttgatatatatcgtagcaatactatacacgtactcgtactattgatgatgcatgccggcagctaaagttagctataagaggaaaagaaatatttgcactcttgattctttttagaacgagagtgatagagatacaatagacgaatcacatcattttagaggcatgtaaaagttgcaaactaaggccaaatggcctgcaaataaactcttgaataaactatcaggttgc

SEQ ID NO: 19923 - DNA, 2469 bp, Oryza sativa
  ref <308>: DATABASE ACCESSION NUMBER: AK070262
  ref <309>: DATABASE ENTRY DATE: 2001-12-06
gggcgcagctgcagatgagagagagcgtggcctgccagtggcgatagagggggagagaggggaccgacggcggagcggggacggaggcggcgggagagggagagagagacgccgagcgatggagcgggggcggcgggagagggggagataggcggccggcgcgacggcgacggagggagctgctcgccgatgcactgccgcatcggcaatggtgggtcgttgggattccagccgtccggcgcgtcgtcgccatcgatggggtcatcgtcggtgtcgtgagcaggtggttcgcacatcctcgtcgtcgatggggtcatcgtcggcccgacagcggcgccggtcgtcggcgctgccgactccgccccaccacgccgcctccgactccgccccaccacccgtcgcctctgctcctcttcaccatgccagatccggtgggccgcgccgtcaactctgccccatggcaccgccgacgactctggtgggctgcgccatcgactctgccccaggcgcatcacgactgctaaccgcgtgcacgtgctcgcgggcggcgtcggcgtccatggacgtggagccttgcctagacgacgctctcggccactccttctgctacgccgccgccgccacagccaatgcgcactccttgtcgttccgccacgcatctccggtgccacgctctccgccgaccgcctctcccccatctgcagttgcgccggagagaacaaggagagaagagaagagaaaaagaaaagagacatttatgtgggcccacgtgcttttttaatttcttttttgctgacgtggcatcctagtttaagggtttagaggttttaatattttttactgccttaggacacatttctaatattttttaggggtacacatttctaattttatggtttatgtaaagttgagggacagccggtgaacttattccccgtcgagggcgccgccgtgcaggggatccgcgacccagatcctcgaccggcggacgcctcctcgacaccgagcagctcttccgccgcggcggggagaagacaaagaagtggcccgtactcatccccgaggaggagctcgccatgtcgttcccgggcatcaaggttcgctacttgtcttcttttgcttatgtgttcctttcgtcgaacaccttgcctgcgtgcgcgtttcctgctactttgggttcattaaccaaatattgcgactccgggtcccgttgtttttcttgatcagtcgtgcatcttgtgcatgttagcaatgtgcctttacggtgataatatagttttttttaattactgctcatttcatctaacaccttgtggtgttcttttctcccgagatgaaaataaaaattaagttttttttacgtaaaacgaggttgtattaacatatgactgattaagttttaattattatgaacttaaaaaatagattaatatgattttttagagtaactttcatatagaaagttttcgcacgaaacataccgtttaacagtttgaaaagcatgccacaaaaatacaaaatttcatccaattcttgtggagaaatgaactttcacaactcaccaccccataaggctcatagagcagtatacagcgaatcagtgcagaatatacatttagactcacctacgtcatgaaacattcactttggagacatgtataaactttttttcatccaaggcttgtagatgagaggtctgttaaggtatgggattcccttattttcatccaaatgccgataatacgacgtattatgaaaataataataatttataggtaaaatttgtatataggtcgttccggacgattaaatcttaatataaaaaataaaatttgatgaaaaaaaatcaaaatcaactttaaaatttgtaaaattataaattttgaaaattagaatttgggtgcggctgtcgctgtacagagggaatgttggtggcctgacataatttcagggtaccccactttgtggagtgtccgtgtctccccgaaatccccgtccccggccgcggccgtctctccccgctgctgtacttcgccgccgccgccgtgccaactctgactgcgtttccgagacggtgaggaggctgctgctgctgctgctgttctcgcgaccgaccgagaggcttctcctcctcctcctctgccctacgccgccacgcgctcgctcgatcgagccgctccacgccgccgtcgtcggcagcggccccgccgccgttgggttcgacatggccgtaaggtgcgtgccccatggttaattaaactctcgttgtaaccttgtagttatagggtgtgtaataatggagtagttgcgaaaaaactgaagtgaaaatccgcatctagtctccttttgaagagacggacgtgattgtggaatcatttagtttgattgtgcacgcatatgttaaatgtcaaatgcgatgcgaatctggtggaaatataatattttgtgcgacttgcggatcaaatgccc

SEQ ID NO: 19924 - DNA, 1074 bp, Oryza sativa
  ref <308>: DATABASE ACCESSION NUMBER: AK070263
  ref <309>: DATABASE ENTRY DATE: 2001-12-06
ggctccatcagtattacaccacccaacacaagctcagccagtttaccactcacactagctgagctagaactcaccactcactgcagttgcagcatggcgcctttgctgttcaaggacatgaagagcctctcgtgctcgtcgccggcgtccacggcgatatgcccgagcttggagcggcagccgatggtccggccacacaagggcggcgccattgctgcgagccctctctgccaggtccccggtgagccaagaacggttcacaggcaagactgcaggagagggcagcagcatcagcacaaggcggctgccgcgaatggcggcgagctcgtcagccccgccggctcatccaggtacctgctcagcagccgcgccgccgccgccgaggagatccaggaggtggaggcttcggctgctccggccgtcgatgccaaggtggtcagggaagagcaagctggtagtgatgtgaagaacactctgacgcaggagcaggtggttgtactgaaggtatcactgcactgcaaagcgtgcgcgggcaaagtgaagaagcacctcgccaagatggaaggagtgacatctttcaacatagacttcgcggcgaagaaggtgacggtggtcggcgacgtgacgccgctgggggtgctgaacagcgtgtccaaggtgaagaacgcccagttctgggcggcgccgccggcgatagccgcctgatgagagatgaaaacgcataggatcctctctggttaattaggtgcggaagcatgtgggtcactgatgctggaccagctcgctctgctgtctgtgtgatggtggtggtggtgtctcctagatcgatgagagcatgcgtgtgtgtgcgcgtcgtcctgactgatcctgaagcaaagcatgcagatgcagctttgcttcttactgtgatccttttggtttcttgtggttggcaccatgctgagctacatgcccgtcactgtgcttcttcttccgtagactgatgagagtgtttgtgactatatatctgctctaagtgtaagtggtggtgttgttcttttgcatgctcttactgtaatataaacgtttcactgc

SEQ ID NO: 19925 - DNA, 3350 bp, Oryza sativa
  ref <308>: DATABASE ACCESSION NUMBER: AK070264
  ref <309>: DATABASE ENTRY DATE: 2001-12-06
aaaaaagaaaaccatctcgcgccgcctcgcccctcccctccccctccgccgtcgccgtcgccgtcgccgccgccgccgcgccgcctccccccttcccgggggcgcctccactccaccacctgccgctcgaccgccccgcgcctcgtctccacgaccctccccgtccttcgcgcactccgcagtagcaaaaaccctaaacccctgggtggcacgaagcttgtacgcggcttcggcggcgggcagcggcggcaatggcgaaggtcgctgtcggccagtgggtaccccatgtggaggccttcgtcgacgtctcccggcccccggcccaacactctgccagtgtggatgccctttctgccttggtgaataaggacaagctgactctctttgttttggtgtcaaagatggagatgtacttgacgacgactgaccacattgttagatccagaggaatcttgcttcttggggaaatattgtgtcgaatttcatttaaacagttagatgttaatgctatttcaacattgtcagacttctttatatcaagattgtcagattggcaagcacttcgaggagcacttgttggatgtttggccttgttgcacagaaaacgaactgttggtagtatcatcattgctgatgtcaaaagacttctcgagactttcttgcagaatgttcaagtccagtcacttgcagctgctgaccgcaagctatgctttcaaattctgaactacatactggatcactaccctgaggctgtcaaaacaatgggtgatgagcttctgtacggaatgtgtgaagcaattgatgaagaaaaggacccggaatgcttgaagctttcatttaatttggtcgaagctgtcatgaagctatttccagatccatctggtttggcagcacaatatgcaagcgaagtttttgagattctgagtaaatattatccgatctacttcacacatggagtgggtgatgatttagatgctacaagggatgatctttctaaggcactaatgcatgccttttgttcaaccccatactttgagccatttgcaattcctttgcttctagataaactttcttcctctcttccattagccaagcttgattctttaaaatatctggataattgcatccgctgctatggtgcagacagaatgggtagacatgtaatcactatttggtttaagttgaaagaagtgatatttagcctgtccatagaccaaattttatcaacctcaggggctaaagacatggagaagaataagaatgaaatagtatcagaagctctcacttgtttgaagacagctattattcaaatgggtccttcagatgaagatcgtttgatcaatttaattttactggatgaggacattgtaagtagcatccattctgtggcaagtgaagaagcctctggtttgacttcattgcaaaacccgattcaactgcatgcccttggaagtgtcatttctattcttgctgaatcatctgcatatttctgcactagagttcttcaagcgcattttgcacgcttggtagatagtttggaaatctcagctggtcgtgaatctcagcacttgaataattgcagtggaccatcttctggtgctattaactatggtgcactctatttatctgtccaaatgctttcatcctgtcgagaggtggccttgacatataaagaggaattttctccaattaaatcagcaaaggagtcttggtggcttatcttagagaaaaaattggactcactaatccatattcttcaatcattactaaccattgattctcaatttgtccagtcagcagacaggcaagaatatgttttgtgtgctgtgaagggtttgataatccttgcaactttcccggaaccccgtttacctctatcggctagtgcatatgaggatgttctgctgacgcttacttcagtaattatgagcaagtatgaaaatatgcatttgtggagattatcattgaaagcattgaccaccattggctcgtctattgtggagtttcatgcttctcaaaaggaaaatatttataacaaagttgttgacaagattagttctctggatgagccttgtcgaacttcaatacccctcaacctaagacttgaagcatgtttcgaagttggtacttcaggttcaaactgcatgttaaggattgctaaatctcttgaagaagctgttgtcggcaatatttctgaggcaactgaacatagctcttgttttcatagctcttgcatgtcccatttttataagcaactgaacaaaatattttgttgatcatgcaggttaatggaagagtaaaatgcagcgaatatgtagtcaatcttcttgaatgctactgtggtcgggtccttccttggttgtttaattttggtggtgtcaatgaacttgctttgaacttcgctatgcgtctctggaatgaaattagggacttggctacttcagatagaatcggatcacaggatcttcttagctcactaatgatgggaatgaagcttgtaatcggaatctgcacagaggaacaacagtcactgattgttcagaaagcatatgacacaatatcatcgatgctgtctcttccagtgaaatcaatgacaagacatcttttggctgttgatgaggcagttcctctatactctgttcgtgatacatttctcatgtgtatgctttcatcggtcatagttggtcttcggcctcaaacacctgtaccagatatgctgatgatgattaatctctttacggtcttcctactgaaaggacaaattccagctgcccatgcattagcttctattttcaacaaaaacctacacaattcggaattctcacatgagaataaactggataaagtgattgatactattcttgagaggtgtttctcaacaatatcagtgcgaagcaatatgaagacatctctctcttgtgctggccgttcagatgatgctaattgctcagagatcttgtctggaagcattgaatcaaaggacgatatcatctctggcttggcctggcttggcaagggattgcttatgagaggagatgaaaaggtgaaggatgtttcactgtttcttcttaaatgtctatgctcagatcagagtttggctggcatttcatcccatcaggaagaacatggtatcagtgattcatcatatgcttctcttgcaacatctgcagctgatgcattccatgtgatgatgagtgattcagaagtttgcctgaataagaagtttcatgcaagaataaaaccactatataagcagcgtttcttctcaatattgatgccaatttttctctctaaaatcaaggaatctactgtgatgactacaaaattggttttgtatcgagcttttgggc

SEQ ID NO: 19926 - DNA, 1096 bp, Oryza sativa
  ref <308>: DATABASE ACCESSION NUMBER: AK070265
  ref <309>: DATABASE ENTRY DATE: 2001-12-06
gagcagcagcagcgaacgagaactcccgtcttcagacgcaaccgcgaaaatatccggccgactcgccggagaggaggagagagaaggcatcgccggccgccggcggagattccgacgacccagcaatcgtgcgatggcgtgctgccgggccctcgcgctccgctcgctcctcgtccccgccggtcgcgccacctccgctgctgctccggcggcggggacccgggccagcccccgcaggaggccgtgctcgaggccatctccaaggtagccaggtctaaaggaagggttgcactcacaacaaacatggtccttggtggcactgtgacagatgatgcaagtgatgaatggcttgttctggatcagaaggtaaattcataccccacaaatagaggatttacagcaattggtactggaggtgatgattttgtccagtcaatggttgttgcggttgaatctgttcttcaagaacccattcccaagggccaggtgtctcataaattgtcatctagggggaagtatgtttctgtaaagattggaccaattcgtgtagtttccagcgagcaggtccaagccgtgtatcgtgccatgagaagtgataataggatgaagtatttcttatgaactgaaataatacgccatgtatattccatatttccgtccatgttgtttcatcatcatcctactgcattctggcatgcttgctgggagcctttgtaaatcgaagaggaatagggaggaccctttttgtgacatcagagcccaaccagaaacggctccaacgcatgcgctacaatgtaacaagttattagtctgtagcatagagatcacgattagctaatgtgtattgttttatgttgcatgtttatcgatttaataaaaggaaataaatatgcatgttaccacttcatagcttttttatggaagcatgtgtgagaaatctctgtatgtttagcaggcgagatgctcctaaacttttttaacagacgttttgaagcttgctgctagacaacttggcagagcgtcatactggtattctgtacattcttcgatacagtgatgtgtatacagaatggcacacatgcccaaaatttgttcc

SEQ ID NO: 19927 - DNA, 882 bp, Oryza sativa
  ref <308>: DATABASE ACCESSION NUMBER: AK070266
  ref <309>: DATABASE ENTRY DATE: 2001-12-06
gtggattaggcgaggagagggaaggaaggagggagggaagggacgcaccttggggggtgggaaggagaagggagagccatgggcgacgacggtggtggtgatggcggcgcctcctccgcgggattctcctacttcgccgtcttccacaactaccccctcgtcgccgccttgctgggcttcgccgtcgcgcagtccatcaagttcttcgtcacccggtataaggagaacagatgggatcctaagcagcttatcggttctggtggcatgccatcgtcacattctgccacagttacagcactagctgtagcgattggcttccaagatggttttggctgtgccctatttgcgacagcagcaatattcgcaagtgtggttatgtacgatgcttctggtatcagattacatgctggaaagcaagcagaggtgttgaatcaaatagtctgcgaacttccttctgaacatcccttgtctgaaacaagaccattgcgtgaactcttaggccatactccaacccaggttgttgctggagctttgcttgggtctatgctagcaacagcagggcaaatgttccttgtagtatcaggttctgtatgatgctgtgtttgaaggtggatgggaattgctagcatttgaaggggacttgagaagaagaagaagaggcttctccagtgtcctgtcacttaggtattggtaagatttgtaacaatgagatgttgtggtgctgttgaagttttgacggcacgtgatacatgtatgttcaggtgatgtacttctcaggatttttgtacagaatatttgttcgataacttcattattctggtgaaatctaaaatgtgagtatgtcagtgatggttgttgatctaccattttgttatatttggt

SEQ ID NO: 19928 - DNA, 1309 bp, Oryza sativa
  ref <308>: DATABASE ACCESSION NUMBER: AK070267
  ref <309>: DATABASE ENTRY DATE: 2001-12-06
gagcggcaggcggactgggcctactcccgccccgtcgtggcgctcgacctgctctggaacctcgctttcatcaccgtcgccgccgtcgtgctcgtgctcagccgtggcgaggactcgcccatgccgctccggacctgggtcgccggctacgccctgcagtgcgtcgtccacatggtctgcgtcgccatcgagtaccggatgcgccgggggcagcgtgacagggccccggcgtccgccgacgaggaaaggggaagtgacgggtcgtcttcatctagcgatgatgatgtcacggaggacgatcgccgtggtagctgcaccgattgcgtcagtattgcaaagcacctggagtcagctaatacaatgttctccttcatatggtggataattggattttattggatatctgctgggggtgaggatgttatccgtgatgcacctcagctttactggctttgcatagtctttctggcatttgacgtgttctttgttgtattctgtgttgctctggcttgcatcattggtattgctgtatgttgctgcctaccttgcattatagctattctctatgcggtttctgatcaggaaggagcgtcagaagatgatattcgccaaattccaagatacaaatttcggagaacagatgaacctgaaaaacaaactgctgatgagacaggaccttttggtggaataatgacagagtgtggcaccaatcaacctattgagaaagtactcgcacctgaagatgcggagtgttgcatttgcctttcggcatatgatgatggtgcagagctgcgtgaacttccttgtgggcaccatttccactgtgcctgcattgataaatggctgcatatcaacgcaacatgccccctgtgcaagttcaatatccggaaaagtggcagtagcagtggaagtgaagaagtatgattgtgtgaatatcctccggtcgagaacaccgatccatttcaacttcacacctgtctctgctaatgcaaccacaggacctgaccagtgtaaattttgtatccaaaatgtgtgattagcgtcatatatgtacttgaagtgactcaagactgctgttcatatccacatacatggttgtccaatgtgtcttttactgtccggaatacatgcttagttgccccgtgagttgtaattcttcgagtgatcctcacatttcctgcttgtgttagcatggtttgtgcttatgctcctgccttggtcattggttcagcacaaaaactgttgtaaatgggctatcggtcctgttgaattgtcaggtacaaacgaaatgcgtcctgcttatgattcg

SEQ ID NO: 19929 - DNA, 773 bp, Oryza sativa
  ref <308>: DATABASE ACCESSION NUMBER: AK070268
  ref <309>: DATABASE ENTRY DATE: 2001-12-06
ggcatatttgctttgctccccttccacgactttagccatcttggcttgcaaggtgagaagagcagatcgatcgagctgagagctggtctcaggtgtgtgttgcgtgagtgtgttcgaagacgaacgatgaagacccgccgggccgcgctgctaatgcttctcctcctggtggtggtggcggccgcctcgtggccgcagccttgcgacgctgcttcagggttctgcgggagcaagtgcgcggtgcggtgcgggagggggagggggcgggggagcgggtgcctgaggtcgtgcgggctgtgctgcgaggagtgcaactgcgtgcccacggggagtgggtcgacgcgcgacgagtgcccctgctaccgcgacatgctcaccgccggccccaggaagaggcccaagtgcccctgaatcctccccatccatctccatctcatcgattaccatcaacttcatctcattttcttgtacttgaaattagctactagtacgtggttgtgtatacgtcgcaggtgtgtatgtatgtatgtatatatatgcgtatgttgtcatgctgcgtagttatagttagtagtcctacctactccagtacgtacgtgttgatgcctgttaatatggctgtatggctagctaagctgtgtgcctgtgtcgatttgtaaagttgtactagtaggtagttgtactacttgcagcgcacgtactgtttgtttgtctgttgttaaatttcgtgttaactatgaacaggggatatgccgtatgcgctttacctgagg

SEQ ID NO: 19930 - DNA, 1182 bp, Oryza sativa
  ref <308>: DATABASE ACCESSION NUMBER: AK070269
  ref <309>: DATABASE ENTRY DATE: 2001-12-06
gagcctcatcttttggttggtttcgttttggtattcccatacactttgtttctcttccccgtctcgtggtcgagagaaaccgagaggagagagagggagaggagcgctgccgattttccggagggggagatctttttcttctccctgaaggttcgagatcgatctgcgacgaggaggagcggggaatcgtaactttatttccgaggaaatttcaacaaattgatgcactaatggagtccaagggtggcaaaaagaagtctagcagtagtcgttcctccctgatgtacgaagctcccctcggctacagcattgaggacctccgacctgccggcggcatcaagaagttccgctctgctgcttactccaactgcgcgaggaagccctcttgatagcccccttggctaccttgacctagtagtttagttactcctctgaattctcgttttgggctttcttacatctctctggctagctgcttcccagtgaccgggaaggtcatcagtcctgcttcctttcttcctcatctctggcatcgtccttcgaaacaatggcagtcctgtcagttgctgactctccaccggtctcggcgatcgggtttgagggatatgagaaacgcctcgagatcactttctccgaggcgcctgtctttgctgaccccaatggcagggggttgcgtgcactgtcacgtgctcagattgacactgttcttgatctggcgaggtgcaccattgtgtctgagctctccaatgaggtcttcgactcgtatgtcctttctgaatcgagcctctttgtgtacccatacaagattgtgatcaagacctgtgggactaccaagctcctgctcgccattccgaggattcttgagcttgctgaagagctatctctgccacttgaagctgtgaagtactctcgtgggacattcatttttcctgaagcacagccctctccacacaagaacttctctgaggaggttgcagtcctgaaccgctacttcggcggtctcaaatctggtggcaacgcatacgtgattggagatcctgcaaagccagggcagaagtggcatgtctactatgccacccagcacccggagcaacctgtggtcactcttgagatgtgcatgactgggctggacaagaagaaagcttctgtcttcttcaagacttctgctgatggacacacaac

SEQ ID NO: 19931 - DNA, 1031 bp, Oryza sativa
  ref <308>: DATABASE ACCESSION NUMBER: AK070270
  ref <309>: DATABASE ENTRY DATE: 2001-12-06
gaggagcagatgcagaggaccgccaaggagctgctcgagcagtatctcaagttccggcaggaggccgacgacgacggcgacggtggtgacaacaagaaggcgagcaagaaagggaagaagaagaagaaggagaaggacccctcaaagccgaagcagcccatgtccgcctacttcgtctacacccagcagcgccgcgcggcgctcgtcgccgagaagaagaacgtccccgagatcggcaggatcaccggcgaggagtggaaggcgatgtccgaggcggagaaggcgccgttcgaggcggcggcgcggaagcagagggaggagtaccaggtggagatggcggcgtaccggcagaggaagcaggaggaggcggcgtgccaggagaaagaggaggaggagcagaagaagatcatgaagcaggaggcgctccagctgctcaagaagaaggagaagacggacaacatcatcaagaagaccaaggaggagcagaggaagaagaaggtgggcggcgccgccgctgccgccgacccgaaccggcccaagaagccggcgtcgtcgttcctgctgttcagcaaggaggcgaggcggcagctggcggaggagcgccccggcgtggcgagctccacgctgaccgcgctcgtgtcggtgaagtggaaggagctcggggaggcggagaagcaggcgtggaacggcaaggccgcggaggccatggcggcgtacaagagggacatggaggagtacaccaaggcggcggccagcggcggcggcggcggcgacgcctccccctgtacgtcctcctcggcctcgtcctagtcgccatggatggcgatggtggtggtggtcctaacgctgacgaggattctcttctctgaatccaatggagaaaacagtagctttggtgattggtgcgaagttatctgttgcgtttggtctggtttaggcgtaacatttcgtatggattggggtattctgcttcaattttataactcagcaagcttgagaaatttcagcttattttcatacattctcgtatc

SEQ ID NO: 19932 - DNA, 1485 bp, Oryza sativa
  ref <308>: DATABASE ACCESSION NUMBER: AK070271
  ref <309>: DATABASE ENTRY DATE: 2001-12-06
gaaaagaaaaaggaaaaaagattcatctcttcctcctcgtcttgtccccttccctcgtcgaaaccctagctaggctcgccgccggcgacgcccgcctcgccgatgcgctcccccacctgaccgctccgcctcgctctcccgggtcgtcgttgcctcaccgctgtgcccgcccacccccacctgggcagcgggcgggatccagtcccagatcggcgccatgtccaaggccagggtctacaccgacgtcaacgtgctgcgccccaaggagtactgggactacgaggccctcaccgtccaatggggtgagcaggatgattatgaagttgtcaggaaagttgggagaggaaaatacagcgaggtctttgagggtattaatgtcaacaacaatgaaaaatgcattatcaaaattctcaagcctgtgaagaaaaagaagatcaaaagagagataaaaatacttcagaatctttgtggaggtccaaatatcgtgaaactgcttgatattgttagagatcagcactcaaaaacaccaagcttgatatttgaatatgtcaacaacacagatttcaaagtgctatacccaaccctgacagattatgacatccgttattatatctacgagctactgaaggctttagattactgccattcacaaggcatcatgcaccgcgatgtgaagcctcacaatgttatgatagatcacgagcttcgaaaactccgattaatagactggggccttgctgaattctaccaccctggcaaggaatataatgtccgtgttgcttcaaggtacttcaagggacctgagcttcttgttgacttgcaagattatgactactctttggacatgtggagtcttggttgcatgtttgctggaatgatcttccgcaaggagccaattttctatggtcatgacaaccatgatcaacttgttaagatcgcaaaggtacttgggacagacagcctgaattcatacttgaacaagtaccgtattgagcttgacccacagcttgaagccctcgttggaaggcacagcaggaaaccttggtcaaagtttattaatgctgacaaccaacatctagtatccccagaggccatcgatttccttgacaagcttcttcgctatgatcaccaggatagacttactgcacgtgaagctatggcacacccatactttctccaagtgagggctgcggagaacagtaggcctcgtgcacaatagacaaaagaacgggactattgctgactgtcgattagcagcagtcatggagctgcaccgtattagtgacttagtccagtcacttgtattgggagtttgagattcggtaatggttgaatcacctggcaagaggattctgggagagcatgtaacagctcatgtgtgcttaaccgcaaacgtggattgtgatttactcgtgctgtttgtatctttgtttctgacgattgattgaaacacattgttctcgttgagtataaatgttttttttt

SEQ ID NO: 19933 - DNA, 1167 bp, Oryza sativa
  ref <308>: DATABASE ACCESSION NUMBER: AK070272
  ref <309>: DATABASE ENTRY DATE: 2001-12-06
ggggcttttagttcaaactgacagcggagcggagaagcgtcggaggagatggaggttgcgacggcgacggaggcgtcggcgccggcggcgagcaggcggagccacccgttcccgtggctagacctggccatctccgagccctactacttcctccacctcgtcgccttcttctcctacttcgcggcccgcagcacggtgccctcggccgacgacggcctactcctccgccgggagatccaggcggtgctcacgttcctcgtgctcttcgtcgtgaagatcgtgaaagaggaaaactgggaaacatgcattgctgattcactgctctatgctaagggattattgctggcagttactttggttatcgattattggctgactgtctcctacttactgggatttgttgttatatatgctgttgctcaacagccaccttatgatggtcttggtcattcaaatcatttgactccattgcaactggaaggcctactaacggaggagccaacaacacgattttggctggttgaattccggacttccttttcaggaacatgtatagaagcaagcagtgttctgcctgaactctctaacatatactctaacaagaacatttcgtttggaataattgatcttgggcattttccaaatgctgcagcaaagtttggaatatccatgtgggatcatcttcccacttatgtactctttgacaaggccactgaagttgcacgattcccagaaatcatgaatgaatcaaaagtatttgtgccaaaaattacaaagaaacttctctgccagcacttcgaccttgacaggcgactgattgaatacctatctagatgacccatcatctatcccagctgtctcaaaaagaaagcgccaattcccttttgtcgacgaaccagatgaatgaaccggacagttgtgcggcagcaatcacttcagggggtatcttcaagcttgttttattctatgagtttacttgtacccatccaatcaaggacagtatactttagggtagggtgggggtgggcaggattatgatttgcatcttactaccatatgtcacctcttgaattacggaatgttaccacacctgtggagatcttgcaatgatatgccaactatgttttccactgcagttagtgatcaattcagacaccattcgtttcc

SEQ ID NO: 19934 - DNA, 1216 bp, Oryza sativa
  ref <308>: DATABASE ACCESSION NUMBER: AK070273
  ref <309>: DATABASE ENTRY DATE: 2001-12-06
gacacacgctctctcactctcactctcactctcactcagctcgagccacagccgagagagagccatccatggcggtgagcaacaacatcacggcgtgcgtcaacttcctggcgctggtgtgcgccgtcccggtggtggccacgggcgtctggttcgcctccaagcagggcgacgactgcgcccgcgtcgcgcgctggccgctcgctatcctcggcgccgccctcctcctcgtcgccctcgccggcttcgccggcgcctactggaaccgccggggcctcctcgccgcctacctcttcgccatggccgcgctcatcaccctcctcctcgccctcctcgtcttcgccttcgccgtcacccgcccctccggcgcctaccccgccttcgcccgcgcctacgacgactaccgcctcgacggctactccacctggctgcgggaccgcgtcgccggcgaccctcgccggtgggaggggatcagggcttgcctcgccgcctccgacacctgcaggaagctggcgcaggagagcgtcttcttcatcacccccgagcagttctaccaatcacacctcaccccgctccagtcgggctgctgcaagccgccgacggtgtgcgggtacgcgtacgtgagcccgacggtgtgggtgaacccggcgaacccggctgcggacgcggactgcgccgcgtgggggaacgacccgtcgcagctctgctacgagtgcagctcctgcaaggccgggatgctgggcaccctgcgggagcagtggcgcagggccaacgtcgccctcgtcatcgccaccgtcgcgctcatcttcttctacgtcatcggctgcagcgccttcaagaacgcgcagaccgaggacctcttccgccgctacaagtggcgcaactgatcggcgctgctgtctgatgatcaatcagctcctcgccggtgccggtttgcttaacttcttgctcttggctcttgctacatagtatcagtattatatctgctgattaattttacagtgcattgttctgttctgaagattactggatgctgctagtttgttttgttgatctagtgagtacaatctacgggctggtttcaaagcttagccaaatgtatatatgttgccggcttgtgttgttggcacgggttgtcaagtttgtcatggtcgtacctaccgtcagactgagtactcttttgctgtattattgatataatccgtgtttagttctt

SEQ ID NO: 19935 - DNA, 3348 bp, Oryza sativa
  ref <308>: DATABASE ACCESSION NUMBER: AK070274
  ref <309>: DATABASE ENTRY DATE: 2001-12-06
tgaagaatgtacttcacactgatattgatgttaacatatatgatggtgatactcctagagaagaccgtacgtggatcagagataatgcccgtctgttaattaccaatccagatatgctgcacatgtcaattttgccatgccatggtcaattccaaaggattttgtccaatctcaggtatattgtcattgatgaagcacattcatacaagggagcatttggctgccatactgcacttattcttagaagattgaagcgcatttgttcaaacatttatggcagtcatcctactttcatattttgtacggctacttcagcaaacccgcgtgagcatgtgatggtaggcttgatcttctctttatgttagcttagaaaaaatggttgcacacaagaaaaaaaaaaccagctgttgttaactactgctctaaagcacaagctatcctccaaatgtgtttcttttttctgaagagaaatattattatcactgttgcttatgttttcgtgcacatactctttcgagaatattggccgaacaacaagcatttttccttttgcaaaattctgttaatcacaggagctagccaaactggataatgtagagctgatcgagaatgatggaagtccttgtggttttaaatacttcctcttgtggaatcccccgctacatatgacgaaggaggggagttcaaaagatagcttattaactagacgctcaaggtattgacactttcttttcccttgaattaagctacttatttattttcattgtatttttacttttcaaatttgcaaagttccagatgattttattatagctcaataactgttgtctttcagatatacgcaaatttgttcactggccatcgatgcaggaattctaagaagttgtcctattaaatagtttcttggcaggatgatttgatagtcaagatagagaatacttctttgccaacctgaatttgaaaattttgggccaggggccatactgctttgccaacttcatctctgtactgtcctgtgatccttgagtggcatgttaatttccaacactcaacaacggatccttttatttgatgagatacagtaattgttgtggacttgaaagcaaaagttatgagttcatcacagtacaaagggacgatgtttaatttttaagtcaaaaattgtaaacatataattgttctgtagtggcatgtaaatgtgttagttattgcagtttaacacttcagcattttgtttcttatggcatgccagtacagcagtgtttgtttctatattcataattttcttataactactatgtgtaaagatacactaataatttgtatttcgtgtattagtccaatagttgaggtttcttatctattatctgagatggttcagcacgggcttcgctgcattgcattctgtaaaacaaggaagctctgtgagcttgttctagcatacacgcgtgaaattcttcaagagactgccaaagaattggtagatactatctgtgtatatcgtgcaggctacattgctgaggacaggagaaaaattgaggccaacctttttcagggaaaacttcttggtgttgctgccaccaatgctcttgaactagggattgatgttggccatatcgatgcaacattgcatcttggatttcctgggagtattgctagcaagctggaagatctggaagaagagcaaaacaatcattagccatttatgttgcctttgagggccctttagatcagtatttcatgaaattcccacataaactatttggcaagccaattgagcattgccaagtcgattcacataatcagaagcttttggaacagcatcttgcttgtgctgcttatgaacatccattgtgtgtgcaatatgatgcggattacttttgttctagcctgaacagtgtaatgatggccctgaaagacaaaggctgtctcataaacaatccctctggacctttctcatcaagcatgtggagttatgttggacctgagaaaagaccttcacaggcggtgagcatacgggcaattgagcatgacaaatacagagtaatagacaagttaaataaccggttactggaagaaattgaggaaagtaaggcctttttccaggtgtatgatggagctgtatacatgcatcagggtgtcaattacttagttgaggaacttgatttgtcatcaaggacagcattctgtaggaaagctgatttgaagtattacacaaaaacacgagactacacagacatcaatgtccttggaggagagtttgctcatcttccaccaagtatgtgtaaaactaacggggtgaagacaaccgcccaagcaaatgattgcaaagtgactactagatggtttggtttttatcgcatatggaaatcaaacaacaaaatatctgatagcatagagcttaacctgcctccatattccttcaattcccaggctgtttgggtgcgaatcccgcactcggtgaaaactaatgtcgaggaaaggaaactacagtttcgaggtggctcgcatgctgcttcacatgctctgctgaacatagtgcctctgcatatgacgtgtaatgcttctgacctaggaacagaatgtgcaaatcctcatgaaacccgtggtattccagacagaattctgttatacgataaacaccctggtggtatcggcatagcattgcagatcaaatcactctttggggaactactacttgctgctttagaacttgtttcagaatgcaactgtactagttcagccggctgtccaaattgtatccaaacactaacatgcggtgaatataatgaggttttggacaaggaggcagcaattttgattttgaagggagtaattgaatatgaaagatcatattttgaaaaagaagatggttccgaccaaggagtgagatgaggttttaacttttgacgtcttcgtgaagacgagtgaatttggttgacacaggagccatattaatattttcttcacaaggctttctccattggaaatggtcatgggatccccaaattgcctgccacctgcgatccccaagcttctgtgaagaaatatgtcgaaagatttgaacctgtgattaagatatctgcagttttcccttctgatgagatggaagaaaccatcaatttctgctgcgggtactgcaagaaccacatcatcacgtgtaatctaaacaagcctttgaagagttggttgcaatgtttttataagttccatgtttattatctggttcttttaatctctttttgggaaatctgggtgttataatctaggagattaaccaaccacagcactaaaattcaaacttctcagaaggataatacgttgattgctgattaatgaaggatggcg

SEQ ID NO: 19936 - DNA, 1773 bp, Oryza sativa
  ref <308>: DATABASE ACCESSION NUMBER: AK070275
  ref <309>: DATABASE ENTRY DATE: 2001-12-06
gatgcatcgccatgatcgaagcgaggaagaagaagaagaagaagctgcagttgcagcagcagcagcagcaactagtaactaataaagtgatgacgatggatcgtcccaacgtcgccgtggccgcggtggggctgctagtggcggcggtggcggcgacgctgccggcgccgtcgtgggggcagcagcagccagccaacaagctcatcaccagcacctccggctccggcaaagggttgtccaagtggctggcgatgaaccaggaggagtacgtggagaagaaggcgctgcacaccatggccaccgcggaggagctcggcgggaagaagctggacgcgaacctgacggcggcggaggaggccaaggtgacgtgggtgatcgaccccaaggggacgccgggcgacaccaccttcaccaccatcacggcggcgctggagaaggtccccgagggggacaagaagcgcgtcatcctcgacctcaagcccggcgccgagttccgggagaagatcttcctcaacctcagcaagcccttcatcaccttcaagtccgaccccaagaacccggcggtgatcgcctggagcgacacggcggcgaccaggggcaaggacggcaagcccgtcggcaccgtggggagcaccaccgtcgccatcgagtccgactacttcgtggcgcatggcgtcgtgttcaagaacgacgcgccgatggccaagcccggcgccgagggcggccaggcggtggcgctccgcctcttcggcaccaaggcggccatctacaactgcaccatcgacggcggccaggacacgctgtacgaccacaagggcctccactacatcaaggattgcctcatcatgggcagcgtcgacttcatcttcgggttcgggagatcgtactacgagggctgcaccatcgtctccgtcaccaaggaggtgtccgtgctgacggcgcagcagaggagcaagaccatcgagggcgccctcgagagcggcttctccttcaagaactgcagcatcaagggagaagggcagatctacctggggcgagcatggggggaatcgtcgcgggtggtgtacgcctacaccgacatgtccaaggaggtggtgcccgtgggttgggacggctggaacatcgccaagccggagagcagcgggatctactacggcgagttcaagtgcaccggccccggctccgacgccaagaagagggtgggttgggcgctcgacctcaccgaggagaggccaagcccttcatcggcacgcactacatctacggcgactcctggctcatcccaccagacgggacatcaacgtcatctagctcagcttcaacgtcgagcaactcaaccgcggaagcaccgacggcgagtagtaactcaactgcatcggctaataaaaaggaaagcaattcaactgcagaagcgccgacggcgactagctactcaactgcgtcagcgacgacgagtaattccactgcgtcagcgaaggcgactaattactcgagttcaagtccaccggcaaaaggcaagtagttaatacaagtgcagcggcgacgacggcgccgacgcgatgaatcgcgttcattggggccaaccaattctgttttggaagcccgtttaattgttcattctttgtgtcaatttgggccggattaatcaatcggccggctacttagatgtttcacgtacgtgtaacagttgtattttcttcccatttcgtttgggtcttttatcagtgtacgcatctttaaaactatagtgaattttacacatgttttcctttt

SEQ ID NO: 19937 - DNA, 1256 bp, Oryza sativa
  ref <308>: DATABASE ACCESSION NUMBER: AK070276
  ref <309>: DATABASE ENTRY DATE: 2001-12-06
ggttgagatttcagacaattaacatcactaggagagaaatcaagaaacaagctagccagcaatggtgtctctccgcgcggccatcgtcctcgtcgtcgccgcctcgtcggtcgccgtcgccttctctcatgcggaagggaacgaggggccggacttcacctacatcgaaggcgccatggacgggccgtcgaactgggggaagctgagcccggagtacaggatgtgcggcgaggggaggtcgcagtcgccgatcgacatcaacaccaagaccgtcgtcccgcgctcggacctcgacacgctggaccgcaactacaacgccgtgaacgccaccatcgtcaacaacggcaaggacatcaccatgaagttccacggcgaggtcggccaggtgatcatcgccgggaagccgtacaggttccaggcgatccactggcacgcgccgtcggagcacaccatcaacggcaggcgcttcccgctcgagctccacctcgtccacaagtccgacgccgacggcggcctcgccgtcatctccgtcctctacaagctcggcgccccggactccttctacctccagttcaaggaccacctcgccgagctcggcgccgacgagtgcgacttcagcaaggaggaggcccacgtcgccgccgggctggtgcagatgaggtcgctgcagaagcgcacggggagctacttccggtacggcggctcgctgacgacgccgccgtgcggcgagaacgtggtgtggagcgtgctcgggaaggtgagggagatcagccaggagcagctgcacctgctcatgtcgccattgccgactaaggacgccaggccggcgcagccgctcaatggcagggccgtcttctactacaacccgccgggcagcgccgtctccttccaggaattcgccaagtgattctttcttttttttttctttcttttttttttggttttttgtatttgatgttgagttgatttgattaacatttcgacgtatgatatgcactatatataattaattaacatcgcaaaatactttttttttcgagaatacataaagggctcgcgtatctttgtattaactagtgggggtggggattaattactatatgcttggacatttttccgttcttcaagattgacgcatcgatcgataaatgtatatatttgtagctaagaaggggtaaatatactaggagagaatacactctattgtcattgagtttgtctctgtcaacgatttgctactgacattgtatgtttct

SEQ ID NO: 19938 - DNA, 1741 bp, Oryza sativa
  ref <308>: DATABASE ACCESSION NUMBER: AK070277
  ref <309>: DATABASE ENTRY DATE: 2001-12-06
gggtagctcagctgattcgatcgatcagccatggcgggggagaggaggtggagcacggcggcggcggcggctggatggctgcgagtggccgccgttgtggtggccgccgcctctgccgcctcgtcggcggccggcgagggggtcggccggcagacggtcccggcgatgtacgtgttcggcgactcgctggtggacgtcggcaacaacgacttcctgccgccgccggcgccgaggccgccggagccaccctgcggcatcgacctcccgcccgaggccgccgccgccgacggcggcggcggtggccgcttcaccaacggcttcaacctcgccgacgtcatcgcgcagcatgtggggttcaagaagagcccgccggcgtacctctccctgacgacgccgggaagagacggcgaactccggcgaggcctcgtcggcgccaactacgcctccagcggatccggcatcctcgacttcattgggaacggcacaatcagccttggagagcaggtcaagctcttcaccaaaacaaaggaggcaatgatcaccgccggcgaggtcgacggtgagaacatcgacaacttgctctcccagtccttgttcattacctgcaccggcggcaacgactacaatgccttcactgatggcatcgtccccgtcagcgacgcgccggccttcatcgcccacatggttgccacttacatcaagcatatcaagacactgtacaatctaggggctcggaggctggggatacttgacgtgctacctctagggtgtctaccgatctccagggtccccattgaaaatggttcatgcagtggcactgacaactggcaggcacggctcttcaaccgtctcctccgacgagagatgaccgccgccgccacagcctccatgccggacttggtgtactccatcggcagcatttactacaccttctacgacatgataaagaatccatcttcggctggggtgagggaggtggcgagggcgtgctgcggagacggcaagctgaacgcggaggccgactgctcggcgaccacccacctgtgcccggaccgggacaactacatcttctgggacaaggtgcacggcacccaggccgcctaccacaactgcgtccacgccttcttccacggctcgccgcgctacgccgagcccatcagcttcacccagctggtcgcctcgccggccgtcgatctggggcggccgtccccgggcacaaaccggacggccaggatttgatcacccaatggactcatattggtataagcattgttcattggtaaacaatgaaaatcgctgggtttcctttggttttgggagtcaggagatggagatgttgaattggggttgatgatggtatatatgtgcataattgaagtgtggtgatacctcacggtacatcctaaggaccacagattctcagataagacattgtacaagtttttgtgtttttttcctgaataattcctcctatgctatagagcacttgttgtcatgcctggaaattaagcagtgtctagttgatcactgcaggaagaaagaaatgcttgactagagaagaagaaaaaaaacatattgacctatctcagcagcacctctgaattatggactacaagatcttggataaaggcattatacaaacagcctttttttttctctcctgaataattgctcctatgctatggagcacttgttgttgtcatgcttggaaactaaagcagtgtctagtgatcactgcagg

SEQ ID NO: 19939 - DNA, 1579 bp, Oryza sativa
  ref <308>: DATABASE ACCESSION NUMBER: AK070278
  ref <309>: DATABASE ENTRY DATE: 2001-12-06
ggtgtgtttcactcgaaggctcgctccactcgaagaccgaggcgtccaccaccaccaccaccactcgagttcccccacgatccccaacccttcctcctccgattcgccgccggtagctgccagcgtctgctccccggctcgccgcgcgccggccggcgagtgcaccgcgcgcgggcgcttggtcgacgctatctccggagtactccgcgtggatttgggtgaatagtggctcgtttcgacagggtgacttgtgctgtgctcgatcgcggtcgtcgcttgctgttgatcgaccggtccagatccgcgtcgtttacacggtgcgtggctgttcctcaatctacgggtgagtgttttctgaacgaatcgatcctacctgttcgggattgcttgtagaagagacaaaaagagagtgatgttgtttcacgcaaccgagaattaattaattaaatcgtctggcatggtagattttgctgcgtgcgtagaaaagagatttcctaaatttggggatactagtggacgatcgatcgagcgcctattctgtcgatcggttcgtggattcatggcttgagctcatgagttggttggtacgttcccgcgttttgtagatcggacctcggactcatggagaaccgcgtcggtgagtcgtcggcgaccgccgtcgatggcggcggcggcgccaaggactcgggcagcttcgagtgcaacatctgcctggagctagcccaggaccccgtcgtcaccctctgcggccacctcttctgctggccgtgcctctacgagtggctccacgtccacgcgcactcccgcgagtgccccgtctgcaaggccggcctcgaggaggagaagctcgtccccctctacggccgcggcaaggcctccaccgatccccgctccaggtcggtggccggcgtccagatccccagccggccggccgggcagcggccggcgacggcttcccagcctgatcatcaccacgaccatttgccgcaccacgacccgtggttcatgggcggcgccggcgcccctgtggccggcggtcgctgggggaactacactttctcggcggccattggggggcttttcccattgctgagcttccaggttcatgggttcccgcaggcggcggcgtatggacctgccgctgggtttccttacgggtatggacattcgttccatggctggcatggccatggtttcccgcaccaggcaccgcagggccagcatgttgatgtgttcttgaaggtattgcttgttctggttggtgttcttgtgattgccagcttgattgtgttttagatgtgtgcagttagctatggccaatcctcggtgatgagcctgtatgaaacggttttattgtgtcaatattaggtagtagctcccacgggttgatcagtgtggagagatagtacaaagatgatgcttcagtagttactagtaggattctgtgataatgagtggtagctgataatgttgtcgtgcttctcgatatattacttgtgcagttgcaagtcttgtttgtagtttttaagtgaagtttgaatccttgttatcttttcataatgcatttgcattccaaccc

SEQ ID NO: 19940 - DNA, 2186 bp, Oryza sativa
  ref <308>: DATABASE ACCESSION NUMBER: AK070279
  ref <309>: DATABASE ENTRY DATE: 2001-12-06
gtcatcgtccccgctagtcgccgccagtcaccaagccccgagcccacccccccaagctaccagcacagaacgaatcggagcgccgcgccgcgccgcgctgcgtcaccggcgatggactccgactacggcgtgccgcgcgagctctcggaggtgcagaagaagcgcgcgctctaccagcccgagctgcccccctgcctccagggcaccactgtgagagtggagtatggtgacgctgcaattgctgctgatcctgcaggcgctcatgtgatcagccacgcgttcccccacacatacgggcagcccctggcccattttctccggaagacggctaatgtccccgatgctactgtcatatcagagcatcctgttgtcagggttggtgttgttttctgcggaaggcagtccccgggaggccataatgtcatctggggactccatgaggcaattaaggctcacaacccaaacagcaaacttattggttttcttggtggaagtgatggtcttctcgcacagaaaactttggagatcaccgacgaagttctttcttcatataaaaaccaaggtggttatgatatgcttggccggacaaaggatcaaattagaacaacagagcaggtcaatggtgccatggctagttgtcaggctttgaagttggatgctttagtaatcattggaggtgttacatccaatacggatgctgctcaacttgctgagacttttgctgaggctaagtgtgcaacgaaggttgtaggtgttcctgtaactttgaatggggaccttaagaatcagtttgttgagacaaccgttggttttgataccatatgcaaggtgaactcacaacttataagcaatgtatgcaccgatgctctttcggctgagaagtattactactttattcgcatgatggggcggaaggcttctcatgtggcattggagtgtgctcttcaatcacatccgaatatggttatcctaggtgaggaggttgctgcatcaaaacttaccatctttgatatcacgaagcagatatgtgatgcagttcaggcaagggctgagaaggataagtatcacggagttgtacttattccggagggactcgtggagagtattcctgaattatatgctttgcttcaggaaattcatgggcttcacggcaaaggtgtttccatggagaatatctcctcacagctttcaccttgggcatctgcactatttgagtttttgcccccatttattaggaagcagctgcttctccatcctgaatctgatgactcagctcaactttctcagattgaaaccgaaaaacttttggcccaattagttgaggatgaaatgaacaggcgtatgaaggaaggcacttacaaaggaaagaaattcaatgcgatctgtcacttttttggctaccaagctaggggttcactgccttcaaagtttgactgcgattacgcctatgttcttgggcacgtgtgctaccacatcttagctgctggtttgaatggttacatggctactgtgacaaatcttaagagtcctgcgaacaaatggcgatgtggtgcggctccgatttcgtctatgatgaccgtgaagagatggtcacgtggtcctgcggctactcaaatagggaaacctgctgtccatatggctactgtcgacttgaaaggcaaagcattcgagctattgaggaacaattctaccagcttcttaatcgacgacatctacagaaacccaggaccactccaattcgaaggagcaggtgctgattcaaagcctatttcactgtgcgtggaagatcaagactatatgggcaggatcaagaaactccaggaatacttggagaaggtgaaaagcatcgtgaagcctgggtgctcgcaggatgttctcaaggcagcgctgagcgctatgtcatctgtgaccgagacattggcgatcatgacatcgtcttccactggccagggaaccccactctgagtcaaatggattactaaatccacattcgcttgtgtcatctgacatgtggggttagaaacagtgatgttgcaaccccacggctttctttttcgtgttttttctttggagagttttgccatttttgagccggtagcgtgagtctgctattgatgtgtttggttggactggaataataattgttcagacagcgatgttcttaaataaaccaaattttggtaggc

SEQ ID NO: 19941 - DNA, 3050 bp, Oryza sativa
  ref <308>: DATABASE ACCESSION NUMBER: AK070280
  ref <309>: DATABASE ENTRY DATE: 2001-12-06
ggctactacagcttgtctagagcatttcggcggaaagctccccgaaaactaaaaatttccccgcctcttcccgcctcgccaccgccgccgctcgcctcaccgatgacgccgtcgcacggcgccgcggctgcggcggcgtcgtcctccgccggcgccgggcggagggccgcgacattcgcgggggcgagcgtgttcctgtcgcggagcctggtggcacccgaggtgtacgacgccgtgcacgacgcgctccgcctcaacggcgccgaggtcttcctctgcgccgaccccgcccggacggggccgctcgacttccacgtcatctcctcctcctcccacgagaggttcgcggatctgagagccaaaggctgcaatttactcggaccacagtgcattctttcctgtgcgaaggaacaccgcttcctacctaagcaaggttatacttgttgtcttgcaatggatggggttaagatactttgctcaggttttgaaaaagatgagaaggcaaagattgaacaattagtgacagctatgggaggtactttacaaaacaaagcatacacggatgctaactttgtaattgcaaaggatgtattggctgccaaatacaaatgggctgtgaatactctgaagaagcctattgtcagcaggaactggttagagcaatgttggattgaacatcgtgttgtacctcatgaaccttacagaatccctcctttttctgggttgaatatttgcatcaccaaactgaatgtagacgaacggagggagttggcaaaaataatagtgcagaatggtggccagtattcagcaaatcttacacggcggtgcactcatttagtttcaaatgaacctggaggtgacaagtatgttgtggcccaaaaatggggtaatatccacatagtagttcccaaatggatcgaccaatctgttgctcgaaaagtttgccttgatgaaagtgcataccttgtttgtcagaattccactaatattaatggtgtaaaacattcccttaaggaacaacacaaccctgagatcagtagtgcaagttttcaacctgttccaacaacatctgtagatgactcagtatcaacgtcacagtatgtgcctgcttcatttgatgacgcttcaaagatctgcagtactgatattggcgcacctagtttccaagagacaaaagaactacaggttgatagccatgttgctgaggactcagaggcagaagatgatgacctttatttatcaaattgtagaatttctctggtgggttttgaggagaaagagtcgtcaaggttagtcatgatgatacgcaatggtggtggatcccggcatgttatgttaagtgagagactcacacatattattcttggtgcaccatcagaggaagaaaaaaaggaggtgagacgtctggctgcttggggtgtaatcaatgtggtaaaagcaacatggttagaagactgcaacaaagcaaaaaaggaggtgaaagtatccccaagttatgtggctaatgagttgctcgcgaaagagttttcatgtgcggttatggaaaaaactgttatgcgggaaacaaaagcagccaaaaactcaggtggaatttttcatattccaaccgtcaatgacttgcatgataaacaacttggaaacgatctgtcatctgaaagaaaatcagcacggggcaaacatgaaaccatgaatagtaaccggacagcaacgaagtctgcaatatcaagtcaacagaatggagtggctagtactagcgagtaccaccccaaatttcaagtaaactcttctgcaataaatcggcagagtagcagatcatcaaatactttcaaagggagaatattttgtttctcaaattcattttcccacgatcggagagctcaggttgttgactgggtcagagaaggtggaggcattatggtggatgatgcacaatcaacagttgtggatttcattatcgagagccacggacagaatagcatgctccgcgactcttctcattcaactgctgtttccactcattggatacgctcatgtttggaggagggctgcttccaagatgtgggaagccatcctattttctcacctttgtgctgtcgcatcccgtttcctgggtttgaagattttcgtttctgtgtgtcacaatatgaagagaaagatagacttctgctgaagaacttgtgctttatcctcggaagtaaatttacagagaaagcaacaaagaaagtgacccatcttatctgcaaatttgcaagtggtccaaagtatgaggcttactatagtaggggaattccaaccataacagcagagtggctctttgagtgtgtaagacaggatagaattgtcccttttgaccagtttcagccaaaaccacctacttctcaggacagagatgctggtctatgcactgttagtcaatatcccacacaggccgcaaagacaatttccagatttgactgctctgagtcgcatactgaatctcaattaccaagaagcagttcaaaatacaactccggtaatgcctctgttaatgaggaaccaaatgatcctggtgttagtaaaaggaggcgattatccgagtttggcaaagctaatgatacatctggaaacataggaagaactgaggaactccaggatagtacccctgttcctgatgttgcagatgcaatagaggacctactggttcaatcatccaagattcaggacgtacaacctcctaggagtatttttgcacccgatgattctgttcttaatcaagatcaggaaaatacacactcttttggcatttcaaggcactggttgaacatgtaagttggtcattgttcagccttttccatcatgtctgtcatacaggaacatcgaaacttctgatttttgtatatttccttaaagtgcacaactacatgggataatggattattctgcaaatataaacttctatggctactataactttcctttttttgtttatcaagctgtagatcgtccctaattgtaatagcttttgcaatcctgtatacaccgatctattcaatcacagatatctgcttgct

SEQ ID NO: 19942 - DNA, 1603 bp, Oryza sativa
  ref <308>: DATABASE ACCESSION NUMBER: AK070281
  ref <309>: DATABASE ENTRY DATE: 2001-12-06
gtcggcggcgccggctccggcggtttcgcgagatggtgcggcggcgtgaggcggcgttgcgtgggtgacccggagactccaaccaaaacgctccggccgatcgagagcctctcccggatctgacgtcagatgaggccgtaccgtaaccacctcgctttctatcacacaaacggctcgttggattgggggagtctcctctgcgcgacggacatggcctcctcgctcgtctcgcgcacccacctcactccgcgccccgccgccgccgcctcgacggcctctccttgcagcgcccgcttcgcggtccggcggcgccgtggcctcgtcggcggtgtgcggtgccaggcgcaggcgagcgacatggacggccactacatgcggcggtgcgtggagctggcgcgcaaggcggccggacacaccagccctaaccccatggtcggctgtgtcgttgtccgcgacggccgcgtcgtcggcgagggattccatcccaaagccggccagccacacgccgaggtgtttgctctgagagatgctggggatttagcagagaatgcaacagcctatgtgagcttagagccctgcaaccattacgggcggacacctccctgcactgaagcactcatcaatgccaaagttaaagatgttgtggtggggatgactgacccaaatcctattgtggcatccaaggggattgaaaggctcagaagcgccgggatagatgtgaggttgtgcgtggatgaagaagcgtcatgccgcaagctaaatgaggcttacatccatcgcatgcttactgggaaggcctttgcaactttaagaactacactctcgatgaatggagttgtcatcaatcagattgggagtggagctgatcaaccagaaggatactactcgcagttattgaaagaatacgatggagtaataatttcaagcaattttgccaagacaaataccttgcctgtatcccgtgaagctggtgcgaagcagcctctttatatcatcatagcgcagtgcgaaaattcccaattaaacattccgtttctcaaagaagagcgtgcagccgaggcagtagttctgtcggatagtcctatcactgtggagccagcaggagttgatgttttagtccttgatcagatgaacctggatgccattcttcaacttcttgcacaacgagggctatgtagtgtgctggtggatttcagggaggctggaggaggcattgcatcacttctgaacaattttcaggatgacaagctggtacagaaggttgttgtggagctcctgcctgtctgggcggtcagcaaagggccgagcgacctggcgtttggtgggagccagtcatttccactgaaggatgtggagcacagtgaggtaaatggatccgtgctgcttcagggctatgtgtaacaaacttttttggttcgaggttgatcctgccctgagtagcgctgcgtatttttacctctcactctctctcgttctggctctggtaaactgtccgtcatgtaaacttacctgaatctgcagtcaatgcggtggtgctcctagacagggatctggttcttctgatttttacagtatcatgcaataaatctatgagagaactgcg

SEQ ID NO: 19943 - DNA, 1506 bp, Oryza sativa
  ref <308>: DATABASE ACCESSION NUMBER: AK070282
  ref <309>: DATABASE ENTRY DATE: 2001-12-06
gaaaggcagaaaagaaagccaatggcgtcttcaggcctcgcagttgcagcaacagcctcgtcagcctggctctgctgccccaatcatcacatccataccagcagcagcagatctcgcaagcatcttcttctccatggcctgtacgggtctgcacctgcacgtactaggggacgacggccgccggtgtggactgcggcggcggccaccgcagcagcgccggcggacacggcggcgtcggcgcggcgggagcaggtggagatcgcccggtcgctgaacgcgtgggtggaggagaacatgctcccgctgctcacccccgtcgactccgcgtggcagccgcacgacttccttccctgctcggccgcgggcggcggcgaggcgctggcggcgttcacggagggcgtggccgagctgcgcgcgggcgccgccggcgtgccggacgaggtgctggtctgcctcgtggggaacatggtgacggaggaggcgctcccgacgtaccagagcatgggcaaccgcgccgagggcctcgccgacggcaccggcgtgagccccctcccctgggcgcgctggctccgcggctggaccgccgaggagaacagccacggcgacctcctcaaccgctacctctacctctccggccgcgtcgacatgcgccaggtcgaggccaccgtgcaccgcctcctccgcaacggcatggagatgctggcgccggcgagcccgtaccacggcctgatctacggcgcgttccaggagcgcgccaccttcatctcccacggccacacggcgaggctcgcggggcagcacggcgaccgggcgctcgccaagatctgcggcgtgatcgccgccgacgagaggcggcacgaggcgggctacacgatggcgtccggcaggctgttcgagctcgacccggacggcatggcgcgcgcgctggcggacgtcatgcgcgggaaggtgaccatgccggggcagctcatgtcggacggccgcgacggcgacggcgagcacagcctgttcgcccggttctccgccgtggcggagcgcgccggcgtgtacacggcgagggactacggcgacctcgtcgagcacttcgtgcggaggtggcgggtggcggagctcgcggcggggctctccggcgagggccgacgcgcgcaggagtacctgtgcgggttggcgcccaagatccggaggatggaggagctggcccaccggagggcggcccgcatcgagcccgccatggcccgtttcagctggatcttcgataggcccgtcatgctgggctgatcaacccggggcttctgttatggttttatgggcccgtttactgggctctgcttgctcaaattataataagctacatcgtgtgctaaaataatttatctttgttattaaggattcgtgtgagaaagctattttgttttctgtagcaagtttaggaatgtaatgtaatgtaatgaagcggcaggacgactgccatttgattaagaaaagactcgcgcttgtttgtagccc

SEQ ID NO: 19944 - DNA, 2469 bp, Oryza sativa
  ref <308>: DATABASE ACCESSION NUMBER: AK070283
  ref <309>: DATABASE ENTRY DATE: 2001-12-06
ggggaagctgctgccgttgcatccgcttcttacatgtgttcgtcttcgtgctccacatccatggcggccactcccagatgtgcgaccccgccgacctggcgtcgcttctggccttctccgatggcttggacaggatgggcgccgggctggtcggatggggtcccaacgacacctcctgctgctcgtggacgggcatttcatgcgatctcgggagggtggtggagctggatctctccaaccggagcctctcccggaactcttttcggggcgtggcggtggcgcagctcggccgcctgccgtgcctgcggcgcctcgacctcagcacgaacggcctcgttggcgcgttcccggcgagcggcttcccggcgatcgaggtggtgaacgtctcctccaacggattcaccgggccgcaccccgcgttccccggtgcgccgaacctgacggttcttgatatcaccggcaacgccttctccggcggcatcaacgtcaccgcgctctgcgcttcgccggtcaaggtcctgcggttctcggcgaatgccttctctggtgatgtgccggccggctttggtcagtgcaagctgctcaacgacctcttccttgatggcaatggccttactgggagcctccccaaggacttgtacacgattccagagttgaggtggctaagcttacaggaaaatcagctctctggcagcctcgataaggccctcggtaacctctccaagcttaccctgattgacttgtcatataacatgttcaatggcaatatccctgatgtgtttgggaaattgaggagcttggagtccttaaacttggcttccaaccaattgaatggcacattgcctctatccctgtcgagctgcccgatgcttagagtggtcagcctgaggaacaattcgctgtccggtgagattaccattgactgcagattgctcacgaggctgaacaactttgatgctgggaccaacacgctgcgtggtgctataccgcctcgccttgcctcgtgcactgagttgaggacgctgaaccttgcaaggaacaagcttcagggggagctaccggagagcttcaagaatttgacatcactgtcatacctttctcttacggggaatggttttaccaacttgtcatcagcattgcaagtcttgcagcacctgcccaacttaactagcttggtgctcaccaataacttccgtggtggtgaaaccatgccaatggacggcatcgaagggttcaagagaatgcaggttcttgtcctggcgaactgtgcactcttgggcacggttccaccttggctgcagagcttgaagagcctcagtgtgctggatatttcatggaacaatttgcatggggagatcccgccatggttaggcaacctcgacagtcttttctacatcgatctgtccaacaactcattcagtggggagcttcctgcaacctttacacagatgaagagtttaatttcaagtaatggctcaagtgggcaggcgtcaacaggagacctcccattatccttcgtcaagaagaattcgacttccactggtaaaggcttgcagtacaaccaactcagtagcttcccgtcatcactgatcctctcaaataacaagcttgttgggtcaatattgccatcctttggccgtctagtgaagcttcatgtgctggacttgggctttaacaatttttctgggccaattcctgatgagttatcaaatatgtcgagcttggaagtactggatttagctcacaatgatctcagtgggagcataccatcatctctaacgaagctgaactttctgtccaagtttgatgtttcgtacaacaatttgtctggagatgtcccggcaggaggccaattctccacgttcacagaagaggagttcgcgggcaatcctgcgctgtgtcgtagtcagagccagtcatgctacaagcgggcggtcacgactgaaatgagttctgagacacgttttacttttgggctttttttgaccgtggaagctggatttgcctttggactgttaaccgtctggaacgtactgttctttgcaagttcttggagggccgcgtattttcagatggttgataatttctttgataggttttatgtgataacaatggtgaacttgaacagactcagaaggaaatgggaacataaagatcatccttaaaacaaagtcagacggggttctccactagttctaactaggctcttcaatcgaattatgtactctgtatattgtatttctccagcttttggtgtcttgattgttttcaactcaggtgtcatttagcagtgctgctttcacatcgtattgtagacatgatttccatttggtacagatgtgccagtgttgatagctgcgtggtggatacttaagcttcaagttgttctctctctctgtaataactgtagctgaacaaagccgttttgttaatagagatgggagagctcttcttctcttttatatgacc

SEQ ID NO: 19945 - DNA, 1579 bp, Oryza sativa
  ref <308>: DATABASE ACCESSION NUMBER: AK070284
  ref <309>: DATABASE ENTRY DATE: 2001-12-06
ggttgcatttctcgtcctgatttgcgtcctgcagctctctctcatcacagtttcgcaatggccaaaaaaacaatactgcaggtggtttgcgcggtggcgctggtggcgctgtgcgcgtgcggcgtcgcggcgtcaccgtcgtcgccggcgggagcggggtgccggaagcacatcgcgaggatcacggagtacggcggcgtcggggacgggaggaggtccaacacggcggcgttcgccaaggcggtggcggacctgtcgctgcgcgccggcgacggcggcgcggcgctggtggtgccgaaggggaagtggctgacggggcccttcaacctcaccagccacttcaccctcttcctcgaccacggcgccgagatcctcgcgtctcagaacttggaagattggcctctgatagctcctctgccatcctacggaagaggaagggacgaaccaggcccaagatacagcaatttcattgctggatccaatctcacagatgtcatcatcactggtaggaatggaacgatcaacggccagggccaagtctggtgggacaagttccacgccaaggaactcacctacactcgcggttacctgctcgagctcctctactctaacaatatcatcatctctaatgtcaccttcgtcgactcgccgtcatggaatctccatcccacctactgcaccaatgtgaccatcagcggcatcaccattctagcacctctcaactcgcccaacaccgatggaatcgacccagattcttcctcccatgtcaagatcgaggacagctacatcgtgtccggcgacgactgcatcgccgtgaagagcggctgggaccagtacggcatcaagttcaacatgccgagccagcacatcctcatcaggaggctcacctgcatctccccgacgagcgccatgatcgcgctcggcagcgagatgtccggcggcatccgcgacgtgcgcgccgtggacaacgtcgccatcgacaccgagtcggccgtcaggatcaagtccggcgtggggcgcggcggctacgtcaaggacgtgttcgtccgcggcctcagcctccacaccatgaagtgggtgttctggatgaccggcaactacggccagcacccggacaactcctccgaccccaacgctctgccggaggtcaccggcatcaactacagcgacgtgttcgcggagaacgtcaccatggccggcaggatggaggggattcccaacgacccctacactggcatctgcatgtccaacgtcaccgcgcagctcgcgccggacgccaagaagctgcaatggaactgcaccgatgtcaagggtgtcgcctccgacgtctcgccggtgccgtgcccggagctcggggcggcgggcaagccatgcgccttccctgaagaagagctcgtcatcggtccgcctgaattgccaacgtgtagctactgaaatactgatataggatgatagtatggtgtgggtaatggcctgggctatgagatgcttgggaccaaagagatatatatgatgtggtttagtgagtaaagttaagcagtttgaaaatgctgccggataatctctttacacccaatcc

SEQ ID NO: 19946 - DNA, 1063 bp, Oryza sativa
  ref <308>: DATABASE ACCESSION NUMBER: AK099131
  ref <309>: DATABASE ENTRY DATE: 2002-08-28
gtaaccctaaccccggaggagagggaggagcagccatggccgtgggcaagaacgagaggatctccaagggcaggaagggcagcaagaagaagaccgtcgatcccttttccaagaaggattggtacgacatcaaggcgccgaccgtgttctccgtccgcaacatcggcaagaccctcgtctccaggacccaggggaccaagattgcatctgagggtctcaagcatcgtgtctttgaagtctccttggcggatcttcagaatgacgaggatcaggcttacaggaaggttagacttcgtgctgaggatgttcaggggaggaatgtcctcacgaatttctggggcatgagttttaccacggacaaacttaggtccttggtcaagaaatggcaaacattgattgaagcccatgtggatgttaagaccacagataactacatgctccgcctgttttgcattggtttcaccaagcgccgcccaaatcaggtgaagcgtacctgttacgctcaggctagccagatccggcagatccgccggaagatggttgagatcatggccaaccaggcatcaacatgtgacttgaaagaactggtttcaaaattcatccctgaagtcattggaaaggagatcgagaagtcaacttcaagtatattccctctccaaaatgtgttcatccgcaaggtgaagatcttgaaggcaccgaagtttgatcttgggaagttgatggaggtacacggtgactacaaggaagatgtcggtatgaagctggacaggcctgctgagactgacgaggcggtggcaggggaggttgcagcagctgagtagagatggtgttgctagttgctttaccttttaggagatttgggctgttactaaattatggatgatcaaaacttaatgtcagttccgatacccttttttgtctgccgagttggtttctctgattaaaaccatggaaaattgtgagactgatttcatggccagctcattttgaatgcagttgaatgattagtactatatgatagtataatactactggttagatcattgctatgcatttgatcatg

SEQ ID NO: 19947 - DNA, 606 bp, Oryza sativa
  ref <308>: DATABASE ACCESSION NUMBER: AK070285
  ref <309>: DATABASE ENTRY DATE: 2001-12-06
ttggtattcaatcagtttattcgatcgccggatacccgaggaagaagaagaagaagaaaagatgagctactacggccagcaacctcccgtcggcgtcccgccgcagcaaggttacccggggaaggacggctacccgccgccggggtacccaccggccggctacccgccggcgcagggctacccaccggctgggtaccccccgcagcagggctaccctccgccgtacgcgcagccgccgccccagcagcagcagcacagcagcggcccttccttcatggagggatgcttggctgccctctgctgctgctgtctcctggacgcctgcttctgaggatagaggcgacgggtgcaagagagctgaagagatttgtttcatggagctgatcaaaccgaactgctatgagaaaatgctgctagatttcgtgttcggcattattacctgttattcgccttgtttatgaacctctctgaacctgatttatttgatcagtgtttgatggatggctaaaactatatagttgtgtactactgttgattccaatcttgctggtggaattcaacccgggttgcggagtgcaagttgaattcgttcttgttatgtctgcc

SEQ ID NO: 19948 - DNA, 2460 bp, Oryza sativa
  ref <308>: DATABASE ACCESSION NUMBER: AK070286
  ref <309>: DATABASE ENTRY DATE: 2001-12-06
gagagttgcaagacccccaaacccccgtgacctctccgccgcagccgcaacagcaatggaggcgcaggcggacgccggcggcgacgacctcgccgccatgcgggagcagtgccggagcctggaggaggccatcggcttccgccgggagacgcagatgggcctcgtcgcatcgctccagcgcctcgtccccgacctcgtcccctccctcgaccgctcgctccgcatcatcgccgccttcaacgaccgccccttcgtccccaccccgaaccccgacggcggccacggtaagagccccgccgccctcaagccccaccaccgccgcgccctccctgacccggcgcgctccacccgccgcaagacctcgcccggatcctcccctgcctccgtcgccgctgcccccggcggcctcgacgccgtgcgcaccatggtcgccgtgtgcctcctggagctcgtccccttcgccgagatcgacgccgccgcgctcgcccgccgcctgcaggcggagagctcatccgccagcgaggccgagcggactgctctcgctgacctagccgccgaactcggcggctcggcggcctccgctgtagtcctcgccctccgccgcatagccgaggacaccggcggtgtgcagatcgaggaggccatgattgggggcaagtcgatgacgatggtctgggccatcgaccggaacaagctcctcaaggagctgccagaatccgctactttgccgctactccaacctcctccagccccccagatgcccccctctgagaccgatgccggcagcgcaatgataccaagaacaccgcagcagcagcagccgcagccggatatgtggccgcattcgatgcctccgatattcccacggccaaggggcatgacgatgcaggggatgcagagggtgcccggcgtgccaccagggttgatgccgctgcagcggccattcatgggaccagctggagttatcacaatgggtgggggtgtggggcctagccctaaccagcagaagcagaagagcgaggaggacgaacttaaggatcttgagttgctgctgaacaaaaagacatatagagagaagcagaacaccaagaccggggaggaacttttagatctcattcaccggcccacggcgaaggagacggctgtggcagcgaagtttaaaacaaaaggtggttcccagctgaaggaatattgtaccaacttaactaaagaagattgccgacgccaaagtggatcttttgttgcctgtgataaggtccatttccgccgtattattgctcctcatactgatacaaacctaggagattgttcttttctcgacacttgccgtcacacaaagacctgcaagtatgtccactacgagcttgaccaaacaccagatatacctccaatgatggctggtgctcttgcacccccaaggcaaataaggctccagagagctgaatattgttcagaagtagagcttggagaagctcaatggataaactgtgacatccgaaacttcagaatggatatcttaggacagtttggagtaattatggccgatcccccttgggatattcatatggaattgccatatggcacaatggctgatgatgaaatgaggacccttaatgtccctgctttacaaactgatggattaattttcttatgggtcactggtcttgcaatggaacttggtcgggagtgtttggagctctggggttacaaacgtgtggaggaaattatttgggtgaagaccaatcaacttcaacgtattattcgaactggacgcactggtcattggttgaatcatagtaaagagcattgccttgttggaataaaaggaaaccctttagtcaacaggaacattgacactgatgttattgttgctgaagtccgtgaaacaagcagaaaacctgatgagatgtaccccatgctagaaagaataagcccaaggacaaggaagctggaactgtttgcaagaatgcataatgcacatgctggatggctttctctgggtaaccagttaaatggagtaaggcttgttgatgaagggttgagagcacggtacaaggctgcctatcctgattcagaggtgcagccaccatcaccgcccagagcaagcgcccctatagatggtgatcaaggcacatcacagaaacctactgtatcagacggcgagaggcctgcctgatgtgaagcagtcggcaccttactttgaggactatgacattgaggaatcatcgtgcaagaatacaaacactttggacgacataagtattttatcactcgtcagctttaactccggttgtaaaattagttaagtcggtttacttagaagttactccagttgtaaaattagtaagtcgattgtttttggtcgcttgaggaatgcaggaggagggaagaattgttgggttttgtaatgttggcagacatccatcttgataatggaacgcgtgagccattactgatctg

SEQ ID NO: 19949 - DNA, 983 bp, Oryza sativa
  ref <308>: DATABASE ACCESSION NUMBER: AK070287
  ref <309>: DATABASE ENTRY DATE: 2001-12-06
gtcaattcaacacctcttcctcttcttcttcttgctgcttcttcttcttcttctgccacttggttgctatatacaccaagctcgatcacgaaactatcttagctgctgctgctgctgctgcgttggagaagaagagagtggcagggtgaggatggccggggtgcaggtgatgccggcggtgggggcggtggcgacggcggaagggagctgcagggcggcggggcagaggaggggccgcggcgtgagcagcttgttcgccggagactggaggcggcggcctcgccgggcggcgtgcacggccagggtcaggggcaggaggcagcagcagcagcagcagggcctcgccgtcgtctgcaacctcggtggcacctacgatgaaggtttcgaggacatccacgtgcaactgattaatgtgttcacctacaaagccgtcaagaccgtgctcacgcagctctacgaaatgaacccaccaagctaccgatggttatacaacttcgttgctgtaaacaagcctaccgatggcaaagtgttccttcgtgctcttggaaaggagaagcaggagcttgcagagcgagtgatgataactaggcttcacttgtacagcaaatggatcaagaaatgtgaccatgcgatgatgtacgagaggatatctgacgagaacctggcgttgatgcgagagcggctcatggagacggtcatctggccaacagacgacaccaacactgagaagattggctgaaaaataatgcctgatctgtctgcctgacgcatacacttctttttgagttgctcaacttaattaaactttagctcgttaggtagagcattctaaattattcctgctcgatcgagtccgatgtatatgtatatatattaagtgtacaattaatgtaccaagccagtgtaatgggtacaaattcaagatgcattcagggttaagtatagattaagatctagctgatagcgtgtggtttagtttggcc

SEQ ID NO: 19950 - DNA, 1726 bp, Oryza sativa
  ref <308>: DATABASE ACCESSION NUMBER: AK070288
  ref <309>: DATABASE ENTRY DATE: 2001-12-06
catgtgaattcataaagacaagtacccagtggagaaaagttcaagaacgtcttgaggatgatgaacgctgttcccgacttgaaaagatcgatcgactggagattttccaagagtatataagggatctggagaaagaagaggaagagcacaagcggatacataaggaacaagtaaggaggcaagagcgcaaaaatcgtgatgaatttcgcaagatgttggaagaacatgtagctgaaggaatgcttactgcaaaaactcgttggcgtgattactgtgcccaggttaaagattcctctgtgtacttggctgtggcctcgaacataagtggttcaatgccaaaagatctgtttgaagatgtaatggaggagcttgagaaacagtatcaagatgacaaagcccgaattaaagaagcagtgaagtctggaaagattcctatgacgacttcatggacactagaggatttcgaaactgctgttacggaggatgatactttgaaaggaataacaaacataaacatgaagcttatttttgatgatcaagttgaaaggctcagggaaaaggaggtaaaggaagcaaagaagcgccagcgtctgggtgaaaatttctcagatcttttgtactcaatcaaggaaatatcagcttcttcaacatgggatgattctaaagcactattcgaagatagccaagagtacaaggcattggacagcgaaacatactctagagagcttttcgaagagtgcgttgtccacttgaaagaaaggttaaaagagaaagagcgcttgagggaggaagaaaaggcaagaaaagagaaggaacgtgaagagaaaggacggaggaaagagaaagaaaagaaggagaaagaacgcaaagaaaaagaaagagacaaggagaaagaaagagaaaaggacaaaggaaaggatcggtcgaggaaagatgagatggatattgatgctgttgatgcagatagccatggctcaaaagacaagaaaagagaaaaggacaaggaaaagaagcataagagacaccaccatgacactgcagatgatgtgagctctgaaagggatgagaaggatgactctaaaaagtctcgtagacatagcagtgatcgcaagaaatcaaggaagcatacccatgcttcggactctgatagtgaaaatcggcacaaaagacacaaaaaggatcgagatagctcccgcagaaatggcacacgtgatgaccttgaagatggtgaacttggagaagatggggagattcattagtcattcgtttctccgctgagatttatcacaatacagtcccccctcctgttttggacatatgaaatggtgcattttgttggcaactataaatgctttcctccagagaaggacaatttctttatggggattatcttcttgtcttgatctggcttgttggaaatggacaataatagccttcattgtttggatgctcacaatgtagtcatgaaggttcttgtactgcaaaacttttgttgcctttagttatcttcttatccccttccctttgtcagtctgggtataggttgtatttgttataggagggggagggctgtaaagtgtttagtggctgaaaaagatcctttagaaggttaggtgcgaaatgcatgcaatgctgaggtttataactgaatttcgttgaatcatctgtgcccagtggccactgtatcctgattagagctcttgatctacaagacttgtgtttctcc

SEQ ID NO: 19951 - DNA, 2183 bp, Oryza sativa
  ref <308>: DATABASE ACCESSION NUMBER: AK070289
  ref <309>: DATABASE ENTRY DATE: 2001-12-06
gttttgaaagaacatcaaccgaacgcaagaatcacacacaacactcggttaaccatattgcagtagagatcgatgggtagactccaaaatttgatgcttctatcggcggggttcttctccacgctattgctcgcacaggtgacgagtgctgctgcagggatgacagtgaaagtgagcacaacgcccatcttctccaagatcccacgagctcagacgaacaaggattttcaggtgctactacgcatcgaggcgccgcctccggtggatctcaagggtcgtgtccccatcgaccttgtcgctgtgctcgacgttggtggtggtggaatgagcttggaaccggttaagaaagccatgaagttcgccattcgacagctcagtgatgaagactctatcgccatctttgggccacccatgagccgagaggtcatccctaagtttatgaatattcatggtagccgaaggattgctgagaagaaggtagatgagctggagggccgtcgctttgcccatccagcaaggtctagcttggatgaggccctcaagatgctggaggagcagccggcgagctcttccgtcggccgcgccaagttcatcgtgttggtcaccgacatcacccgattcagctctgacatgccggagttgtccaagtaccccgtgcacgccttcggcctgggcgcctcgcacgacgcggcggcgctgcgcctcgtcgcccagcggtctcagggcacctactccttcctcgacgacgccaacgccgacaaggtcgccgccgcgctcgccctgtgcctcggcgggctcaagtccgtcgccgccgtcggcgcgcgcgtcgtcctcaaggcggcgagcggcagcggcgtgaggatcgacaggatcagctccggtgggtacgcgagctccgtctcccaggtcgacggggcctccggcgagatcgccatcggcgcgctctacgccggcgaggtgaagaccttcgtcgtccacctcgacgtgcccgccgcgcctgagatttcgccgggggagggcgtctgctgcgaccagcagcagctgctcgtcgccagcctcgacggccagctctacaccagtggcggcggcgtcgacgtcatcgacgacgacgcagcagctggtggtggtggtccgatccaagacgtgctcgtcgtggagaggccacccgccgccgtgctgcccaaggtcccctccgccattgtcgtcaaccacatcttccagttcagggtgctggagatggtcgacgccttcatcaacgacgagatcctcctgcgccgcactccggcgacgaccgggaggacgaaggacgtcgacgtcgacgacgaccgggggatgaagctgctggcgaggtgggagaggttcgtgctcgagcaccagttctgggtcggcctcgacctgggctccctcgacggcgagatcaccgcggtggcgaacagcctgcggaagcagcagcacgtcgtcggcggcgtcttgccgtcgtcgtcgatggcggcgtacatattctcgtggatgtccagctacaagatgcagcggccgacggcgatggggtcgccggcgaaggtggtgggcttgttcgtgacgctggaggttcacctcacgctgcaggtggcgatcacggcggagaacggcggcggcggcggcgacggcgagtgcgagtacagctgcgtggagcagctgccgcctgcgccgccgctgctggtggcgtctggacgcgatgacgacagctaccgtttcaacgccgcgtacgagggcgtcatatcgctcgacgacatcaaccaattcatgatcaaaatctaccagggtatggtgaaagcgaacaatttgaagcaatgccatctgatgaatcagcagccgcgtgctgtcgcctgaatctgattaatctctctacgttgttgagtaataatatgcccatccatcgattgatcgatccctgaataatgcgtggtagctgcagttgccttatcagcaggagagattgatgaggacgtttgttcagattcgtatctacaagtctagtctagtacttattttgaacagagatagtattagctatttgctagctaatactactattaaggttaaaggttgagaataataagagatgtaagtaggggtgaaaacggttacaaaaattaccgatcgaccgggcgccgtttccgtttaaggggtaccatttccgaccg

SEQ ID NO: 19952 - DNA, 2394 bp, Oryza sativa
  ref <308>: DATABASE ACCESSION NUMBER: AK070290
  ref <309>: DATABASE ENTRY DATE: 2001-12-06
ggccgcgctccttttccctcgcaccactccacccccctcattccccccctacaccgcgacggccgacgaggtctcgggctccccgaagcttccacaacaatggcgaggctactcgtcctccgctcggcgccgtaccaccgctcccacctctccgccaccgccacgttcctcctttccccctccaactccaagcacccacactccgcctccgcctccgcctcattcccctccaccgcgcgccgaatcctactcccgtcgcctctccgcgtcccggcccgcgccatcgagtcctcccccggcaccacaaagcaggagccgactccggctgccggtgagggtgaggcccaggagccgccgccccccgctgcgtcggcgttcgaggtggaggagctcgggtgggggacccagctcgccgtgaagctacgcatgctcgtggccccgccatggaagcgcgtccgcaagggcagcgtccttaacatgaagcttcggggcgagatatccgatcagttgaagacacgcttctcttccgggctgtcattgccacaaatctgcgagaattttgttaaagctgcatatgaccagcgaatatcggggatctatctgcacatagagcctctgagatgtgggtgggggaaggtggatgagatcagaagacacattgtcgatttcaagaagtccggtaaatttgttgttggttatatgcctgtgtgtggggagaaagagtactaccttgcttgtgcgtgtggtgagctgtatgcaccgccaagtgcttatgttgctttgtttggtctaactgttcagcaaacatttctcagaggtgttcttgagaaagtcgggatagaaccagaaattcagcgaattggtcgttacaaaagtgcgggaggccaacttgcacgggagagcatgtcaaatgaggttagggagatgctagccacactgctcgacaatatttatggaaactggctggatacaatatcttccaaacatgggaagaaaaaagaagaaatcgaggaattcattaattcaggagtctatcaggttgccagacttaaggaagaaggttggataacagatttactttatgatgatgaggtcatggcaatgttgaaggagagagtagcacagaaagacaagaaaagtctgcgtatggttgattacagtaaatattcacgtgtaagtaaatggactcttgggttacaaggagggggtgaacaaattgcagtgatcagagcatctggaagcataacacgtactcgcagcccattgagtgttcctagttcaggcatcattgctgagcagttgatcgagaagatacgtactgttagagagtcagaaaagtataaagctgttatcctccgtatagacagccctggtggtgatgctcttgcttctgatctgatgtggcgggaaattcgactcctagctgacaccaagcctgtggttgcttcaatgtctgatgttgctgcaagtggtgggtactacatggcaatggctgcaccggtcattgttgctgaaaaactcacgctaacaggatcaattggagttgtaacagggaagttcatcctgcaaaagctatatgagcggattgacttcaataaagaaattatatctaagggtagatatgcagagcttaatgctgctgatcaacgccctttaagaccagatgaggcagaactttttgaaaagtcagcacaaaatgcttatgcattgtttcgagataaagcagccatgtcacgctcaatgaatgttgatcagatggagactgttgcacaaggtcgggtgtggagtggccaagatgcagcttcaagaggattggttgattcactgggtggattctcacaagctcttgctattgcaaaacagaaagccaatataccccatgataggaaggtccagctagttgagatctcaaagccctcaccaacattaccagagatcttgtcaggaattggcagttcattgcttggagttgacagggcagtgaagggagtgctccaggatgtcacttccctaaatggagtccaagctagaatggatggaatattgtttgaaagattggaagatttgtctggagaaaatcaactcttattgctcgtaaaagatattgttaattattttgattgattccaccagtcagtaccctatgttttacaaacagttatacatagaagaagaaaatgtcaacatgtcaataataattcaccttacctagaggctagaagcaggtagacttgggatccgttcagtacttttggcactgtatattctattttgttcttttcatactgctgcctatggaaatgttgtacatgccttactgaaaattcaagcgatcttgattttctagttcgcttgaactggaacccaatagatcacatttactctttgtttatg

SEQ ID NO: 19953 - DNA, 1849 bp, Oryza sativa
  ref <308>: DATABASE ACCESSION NUMBER: AK070291
  ref <309>: DATABASE ENTRY DATE: 2001-12-06
gaatctgaagagcacacgaagccctaattaaccaaaacctccgccgccgccgccatggccgccgcggtcgccgcctccccggcgcaatcccgcaagacggagacctacaccgacaccaagcgccgcgacgacgtccgcggcctcaacattgccgcggggcgcgccgtcgccgccgccgcgcgcacctccctcggcccacgcggcatggacaagatgatctcctccagctcctccggcggcgaccaggccgtcatcatcaccaacgacggcgccaccatcctctcccgcatgcccctcctccagccggccgcccgcatgctcgccgacctctcccgctcccaggacgccgccgccggggacggcaccaccaccgtcgtcgtcctcgccgggtccctcctccgccgcgcccagtccctcctctccgccggcgcccaccccaccgcggccgccgacgccctccacctcctcgccgcgcgcgccgtggaggtcctccacggcatggccatccccgtcgagctctccgaccgcgacgccctcgtcaagtcggcatccaccgccctcaactccaaggtcgtctcccagtactccaccctcctctccccgctcgccgtcgacgccgccctcgccgtcgtcgacccggcccacccgtatctcctcgacctccgcgacatccgcgtggtgaagaagctcggctgcacggtcgacgacaccgagctcatccgcggcctcgtcctcaacaagaaggccagccatgtcgccggagggccaactcggatcggggacgccaagatcgccgtgatccagttccaggtctcgcctcccaagacggacatcgagcacagcgtcgtcgtgtcggattacgcgcagatggatcgaatcctccgcgaggagcggaattacatccttggcatggtgaagaagatcaaggcatccggatgcaacgtcctgctcatccagaaaagcatcctgcgtgattcagtcaccgatctgtcgctccattatctcgcaaaggccaagatcatggtcgtgaaggatgtcgagagggacgagatcgagttcatcaccaagaccctcaactgcatgccaattgctagcatcgaacatctccgcgaggacaagcttggtcatgcacatctggttgaggaaatctcggttggtgatggtaacaataacaagattgtcaagatcactggcatcaagaacatgggaagaacagcaactgttcttgtccggggatccaaccagatggtgatcgacgaagctcagcgcagcctccacgacgcattctgtgtgatcaggtgcttggtgaacaagaggtttctgatcgctggtggtggtgctcctgagatcgagatgtcgatgcagctggctgcttgggcgaaggagctgagagggatggagagttactgcgtcagggagttcgccgaggcgctcgaggtcatcccttacacgttggcagagaatgcagggctcgatcccatctccactgtcaccgagctccggaatcgccatgccaagggcgagaagaacgccgggatcaacgtgaggaagggtcggatcacgaacatcctggaggagaatgtcgtgcagccactgctggtgagcacgagcgccgtcacgctggcctgcgagtgtgttaggatgatactgaagattgatgatattgtcaccgtgaggtaaggttaattaattatgtggtggctgaccgtgctggcctctgctctattttgtctgtcatgttatttaggagatttgatattttgacaccttctaaagtggcacgctttcgttgattcagatggttcgaaatatcatgcattctcacaactgtcaataaaatcaaattggt

SEQ ID NO: 19954 - DNA, 1231 bp, Oryza sativa
  ref <308>: DATABASE ACCESSION NUMBER: AK070292
  ref <309>: DATABASE ENTRY DATE: 2001-12-06
ggtggccaccctcaccctaccccgacctctctcatcctcgccctcaccgtctccacccgccgcgccgcgtcccggccaccgcgccgcccgccgcgctccgctccggcgagacatgtcgcgcttcggccgctccggcccgccgccgatccgcgacacctactccctcctcgtcctcaacatcaccttccgcactacggcggatgacctctcccctctcttcgagaagtacggcgaggtcgtcgacatctacatccctagggaccgcaggactggtgattcgcgagggtttgcgttcgtgaggtacaagtatgaggacgaggcgcagaaggcagtcgatcggcttgacgggagagtggtagatggaagggagatcatggtgcagtttgccaagtacggcccgaacgctgaacgaatccataaaggaaaaatcatggagacagttccaaggtctaggggtcgttccagaagccgcagtccaagacgggggtaccgtgatgactatcgggagagagactatagaaagcggagtcggagtagagatagatatggacgtgacaggtatagggagagagattatcgtcgtcgtagcaggagccgcagctacactcctgatgattacaggagacgtggcagagacagtgtgtcacctgcacgcagaagcctgagtcgtagcaggagtcgtagctacagtcctgatgattacaggaagcgtggcaaacacagtcaatcgcctgtgtgtaaaagccccagtgcaaaaagaagccccagtatgtcgcctgcacgcagaagccccagtgcttcgcctgcacgtagaagccctagtgcttcgcctgtgcgcagaagccctagtcgctctcctcgcaggacaccatcttctcaagagggatctcctgtcaagcgctatgatgagcctaggcgctctcgtagcccttcgacgtaaagctgaatatcaagaatatgcatcaaacagctgaggatgaatggagtagagctgctcatgtcaagaggctgttcggtgcctgatgatggaaggctccggtgaaaaattggaagttacagggagtgctatcagttgctgttacaagtgaacactggtttcttgtgaacaccttaacgcttgttaagaactatatgtacttcaattccttttcatacagacttgtctcttagcatttgatagtatcacttctcttttggtacttggtacttactataaatggtaatttgaacc

SEQ ID NO: 19955 - DNA, 3065 bp, Oryza sativa
  ref <308>: DATABASE ACCESSION NUMBER: AK099132
  ref <309>: DATABASE ENTRY DATE: 2002-08-28
gattctcatagcttgccagtttctgatgagccaagggagctctgtgcgtcgtcagctctcctgcccgggacagtgatgagggcaaggagccatgcttgtcaggttaggcgtcgttgttgtagcctccgtcgcagctttaactcttaagagagccaacagtggcaacagagatggccaagcaagggaaggaaaggataaaactcgctactctgaacatggggagaaagaagaagagaaggaagaggttaaaacaatcagcggcataatcaattcagctctttcagatgatgacgacatgctctccgagatcgagagcctcctatcaggggagattgacatccccctaccaagtgacaggttcgacgtcaaagaacgctctcggtacaacagtgttaactccgagctggagaggctgcgtggacttgtgcgtgagctggaggagagggaagtgaagcttgagggagagctgctagagtactatggcctcaaggaacaggagactgatgttgtagagctacacagacagctcaagatcaagatggtggagatcgacatgctcaaaatgaccatcaactcgctgcaagaggagaggaagaagctgcaggatgacgtcgcccgtggcacaggagccaagagggagctggaggctgcgaggaacaagatcaaggagctgcagcgacagatacagatggaggcgaaccagacaaaagggcagctgttgcttctaaagaaccaggtgattgcgctgaagtccaaggaggaggaggcagccatcaaggacgcagaggtgcagaggaagctgaagaagctcaaggagctggaagtggaggtagttgagctgaggaggaagaacaaggagcttttgtatgagaaaagggatctcatcgtaaagctggatgcagcacaaggaaaaataacagagagtgatgtagtttcccatgcaagagaggagatcaacaagctgaggcatgcaaatgaagaccttaccaagcaagtagaaggcctacaaatgaacagattcagtgaagtagaagagttggtttacctgcgttgggttaatgcttgtctgagatatgagctccgcaactaccaggcaccgtctgagaagatttctgctcgtgaccttaacaagaccctgagcccaaaatcgcgtgagagggccaaacttctaatgctggaatatgcaggatcagaacgaggacagggcgacactgaccttgaaactgcttcttctgcaccttcttcacccagaagcgaagacttcgacaacgtttcagttgacagttcttctagcagatacagcttctttggcaaaaggcccaatctgatgcaaaagctcaagaagtggggaaggggcaaggatgacggaagcagcttagcttcaccgacacagtccttcactagtgactccccaaagagcgccagccagaaaccaaaggggcccctagaggctctcatgctcagaaacgcaggagatggtatgggcattacaacctttggaaagagggaacaagatcccagtgatatcatggatgaggcaaatgttgcatcttcatttcatttgatgtcaaagactgtacaaggttttgctgatgacaagtatcccgcttacaaagataggcataaactcgccacagaacgggagaaggcaataaaagagaaggccgagaaagctagggtacaaagatatggcggtgtcaacagttcaggtattgtgccatctccaagatctgcactccctccaaaacttgctcaaataaaggaaaaggctcctacagctaatgctgaatccagtgaccaacctagtgataaccagaacaaccctctagttgtgacacaactgaaacttgcaaatattgagaagagagctccaagagttcctaggccacctcctgcaccatcagccactgccaacactgcaagtgcgttacctccaccaccgccacgcccgccaggtgcacctcctccaccaccgcctcctggcaaacctggtggcccgccaccgccgccaccacgccctggttccctacctaggaatcttgctggtggtgacaaggtacaccgtgctccagaggttgtagagttctatcaaagtctcatgaagcgtgaagccaagaaggacacaacttctctgggatcaacaacatcaagtgtctctgatgtgagaagcaacatgattggagagattgagaatagatcaacattcctcttagctgtcaaagtggatgtggagacacaaggagactttgttgagtctctagcaaatgaggtccgagcagctagttttgtaaatatcgacgacgttgttgcatttgtaaactggcttgatgaggaactatccttcttggtcgatgagcgggcagtactaaagcactttgattggccagagagcaaaactgatgcactaagagaggcagcctttgagtatcaagacctgctaaaattagaacacaaggtttcgtcgtttactgatgatccaaagcttgcatgtgaagaagctctcaagaagatgtattccttgcttgaaacagtggagcagagtgtttatgcgctacttcgtactagagacatggccatatcacgctacagggagtatggaataccggtggattggctgtctgattccggggtagttggcaagatcaaattggcatctgttcagctggcgaagaagtatatgaatagggttgccacagagctagatgccttgcaaggcaccgagaaagagcccaacagagagttcttgcttcttcagggtgtgagatttgctttccgagttcatcagtttgccggaggctttgacgaggaaagcatgaaggcgtttgaagagctaagaagcaagatgtgtacaacacagacatctgctccacaaatttcatagctctaaccatgcatgctgcattccacagttgactggtttattttctttgttgaaacttgaaaggcaagattaattgagtggctaaaaagtagaaaaatacaagtgtaaatcccaatatggcaggaaaggatgattaagtgtacagacgatgaatacatgcatactagattatgtatttctttgt

SEQ ID NO: 19956 - DNA, 2613 bp, Oryza sativa
  ref <308>: DATABASE ACCESSION NUMBER: AK070293
  ref <309>: DATABASE ENTRY DATE: 2001-12-06
ggagggaccttcggtgtaccttttcctttctcctcctcgagaatccccaaatctcgctcgctattcacgcgaccacgcaaaccgaccttcctccgtcgctcggccagcggccggcgccggcgcgcggggtccacctgaggcggccatccccttcccaggctctcaagccaggaatccgctcgccgtgcgacttaggcggagttacgagagggcgctccctgccgtcgcgaaccaccatcgccggcgcgggcggcgccgaagggggccgcggccaagacggcggccgatcagcttgagagattgttgtcatggcagcgaaacaatctggtgactactcggccgcgaaaggtgatgcgcattgttatcaactcttggtcgaggttcatgccccattacatccctgatgatgtgatgttcaacatcctgtcatggctgccatccaagtctctcatccgatttaagtctgtgtgcaaggcttggcatgccatgatatccagcccgtgtttcactgatgctcaccttgagtgttccaagagaaacccatcgatactcatggtccctggtgcttatgagaagcaggaggacggtgagaatatcgccttcatgatggtcctctataagtaccatggaggtaaaacaatggaactggtccatatgcagaactttccgctaggcattggtgtatggactcgccctgtgcactgtaatggtttactcctcattcccaccatgaacctcgaaatgatgatctgtaacccttcaacaagacagattgttttcctaccaaaagtcagtggcaacatttgcacaggcacaagggctggatttgggtttgatcctcacagcaacaaatacaaggtggctagatctttctatcaaagggatagtgaaacacaagaattagtctgcaagtttgaagtgcttactctgggcactaatgcatggaggcaaactgaagatccaccatatccaattgatgctttaactccagtccatgtgaaaggcgccatctactggatagtgtgtagttcactttgcccagatccacctaatgcattcctccgattctgtttgactgatgagaagttcagtttgtttccgtgtcctccatccaatgtaaagtctgtccgtttcacagaggtggagggtgaactgtgttgtgcttgctttttcagtgagacgctagcgctggagatttggaactgcagtggtgggcagaaccttgaatggactcgacgctatgttatacagattccacctgatgttgttatgaagtaccctgtagaaagaccccctttaattgtttttcgtgaaaaaatgttgctgctggcattcaaaaaggtctacaggtatgatatcgaaacctgtagaatagtagaattagcttcaaaggtttcagacttcacctgctatgaaccatatttggagaaggaagcaagggatttgcatctatttaattatgctgagagtctagttccaattagagaattttgagaagttacttctgtctgttagtgtgagcttctccacaacttgtaatgatccaaggtagggagaagtttgttttttttggttgcaagtgtcagccaaggttcattttcattgaattcatctgtgctactattttactgtaacaatcaatttttctttctagcggtattgaccatgaaacgcaataagtatcatgtgaattgtcctcagttatgttgctcagaataactcctatgcattttgccacttacatatgtgatatgttcttttcttgttttaattaacattttatattagcaaatatattcttactaatgccatattttcattgttgtttattaatatgttctatcatctgaggagatcatcaaaaaataatctggtccatctgaaactagtactcccaacagagctagtgctttttaagagggagaagaaagcgggctacagatatgtgattcagcgctgcaagtgaatgatcccaatctttgctcttgcaccattgctcaaacttgtgccatgttttttttatcaaggagtttcaatcggtcagtcacttgtgattctttttacagattacatttgttgcacttgctgaagattaaggtatctgttgttgcttgctggttctcgtgctattgttctctactgtttttgctgaattcttcagctggtgctgctgttgatgtgctgttgtcgaggccacgatcaggagttcgtgaccgtgatttcgcagagggagagacggaaataaaattcagttggtggtttcgtagagggcccacttttaattttagaaagtcaattttagacaatctcctggagggatcaatattttagcacatcaaattttgtttagcattcccataaaaatagttttgggaatgaaatattgggatactcttggtgatcttggtgatgctctaattcccacggcagccagcctaaacgtcgccgtgcagtgtgcggacgcggcctgtgccacctccgtaccatgcgtatccaattctcggtttattcgggaaaaccgaacaagaaagctgaacactttcatatactatggatgtgtttagttctttggtgtaaagtttttgaagtatacggacacatatttttgggtgt

SEQ ID NO: 19957 - DNA, 1333 bp, Oryza sativa
  ref <308>: DATABASE ACCESSION NUMBER: AK070294
  ref <309>: DATABASE ENTRY DATE: 2001-12-06
gagaggcttatctgttgccacatggccacaccaagtccaaaccctcacctctccatgtccatcaatggaggagccaccgtttcggctggttgggcggccacccaacctcgccggcgacgaacagtggatcacagtagcagaagctgcttacttcgaccatcatatggatctaccagaggcttcggtacgaggagaattgcagttcgttctgcctcccagaagaactcgtctcctccattgatgaccactgagcaagaagccgaagacgaggtggtgctagagtcgccggcgcacttccgcatctacaagagcggcaagatcgaccgcctcaaccggccacccgtcctgcccgctggtctcgacgaggccaccggcgtcacctccaaggacgtcgtcctcgacgccgacaccggcgtctccgtccgcctcttcctccccaagcttcaggagccctccaagaagctccccgtcgtcgtcttcttccacggcggcgcgttcttcatcgagtcggccggctccgagacgtaccacaactacgtcaactccctcgccgcggcggccggtgtcctcgtcgtgtccgtcgactaccggctcgccccggagcacccgctccccgcgggctacgacgactcgtgggcggcgctccagtgggcggcctcggcgcaagacggatggatcgccgagcacggcgacacggctcgcctcttcgtcaccggcgacagcgccggcgccaacatcgcgcacgagatgctcgtgagggcggccgccagcggcgggcgcccgaggatggagggcgcgatcctgctgcacccgtggttcggcgggagcaaggagatcgagggggagccggagggcggcgccgcgatcaccgcggcgatgtggaactacgcgtgcccgggcgccgccgccggcgcggacgacccgcggctgaacccgctggcggccggcgggccggtgctggaggagctcgcgtgcgagaggatgctcgtgtgcgcgggggggaaggacgtgctcgcggcgaggaaccgcgcgtactacgacgccgtggcggcgagcgcgtggcgcgggagcgcggcgtggctcgagtcggagggggaggggcacgtgttcttcctggggaattcggagtgcgagaatgccaagcagctcatggatcgcatcgtggcgttcatagccggtggatgagctgcttggatcgtatataagtcaacattgaagttgaatcgagttatttgttcactcatcattcactgggttgaaatcgaatcgaagtaaatagtgtacaaacactactaagctttcgaaggtgaaactgaaattgattgcgtgccgc

SEQ ID NO: 19958 - DNA, 922 bp, Oryza sativa
  ref <308>: DATABASE ACCESSION NUMBER: AK099133
  ref <309>: DATABASE ENTRY DATE: 2002-08-28
gagcggcggcggcggcggcggcggcgggcgtcgccggcgagcagagcggaggagggaggaagcgcgcgagcgaacgatggaggcggcggcggcggttacgaggttgtccttcgtccccctcgcggcggctgcgaggccactcctcgccggcttcatgcgcccccgagtcttcgcgtccatctcctcctcctcctcctcctctcccttctccggtggaggcggaggccacttcttcggaggcggaggcggacgcggtaggggcggcggcggaggcggaggcggagaagaatacggtgcaggtgctgctgcagcggcctccgccgccgccgccgtggttctcggcgagaccgagacggcggacgccgacgtcatcctgctccgcgtcggggggatgtcgtgcggtggatgcgccgcgagcgtgaagcggattctcgagagccagcctgaggttacttctgccacagtcgactttgagaaaaaaacggctgccgtgtggacaacacctgaagccaaggcaacaaaagactggcggaagcaactgggcgaaaagctttcacatcacctgagcacttgcggatttcagtctcatctgcttgatgaagaagaacctgattctggatctcaacagtgagaacccttgcagttttacaatcagagggttcttgagagcagtacctacctacttacccttgtggaagttatatatcgtctctgaaaaagtacattctgtttgagagttttgtaggtctcaatcacgattttgttcttgaatccagccactgacaactacaaggcctagagattatgctcaaatccttatacaggaaatagagaaatttcttttggatttaaggttcaaatacagaagtagaattcgatcattgtatattgtcactaccgatatcaatgaacatatattgtc

SEQ ID NO: 19959 - DNA, 1522 bp, Oryza sativa
  ref <308>: DATABASE ACCESSION NUMBER: AK070295
  ref <309>: DATABASE ENTRY DATE: 2001-12-06
gaacgttttcgctaatccccgtacgacgccggcgcagccccgcacgcagaaagacgcgacgcgaggagcggccgccgccggcagctgttgcgatgaagcgcttcttccagcccgtgcccaaggatggctccccggcgaagaagaggcccgccgccgccgccgccgcctccgcctccgactccgactccctcggcggcgacgcccccgccgcagccgcctgcgccgtcggggagggggattctcctcccgctccccgcgaggaggaaccgcggaggttcgtgacgtggaacgccaacagcctgctcctccggatgaagagcgactggccggccttctgccagttcgtctcccgcgtcgaccccgacgtcatctgcgtccaggaagtgcggatgccagcagctggttccaaaggggcaccaaaaaatcctggtcaactgaaagatgacacaagctcatcacgagatgaaaagcaggtagtgctgcgtgctttgtcgagtccaccttttaaagactatcgtgtctggtggtctctttcagactccaaatatgcaggcacagctatgattataaagaagaagtttgaaccaaagaaagtgtcattcaacttggatagaacatcttccaagcatgaaccagatgggcgtgttattattgcagaattcgaatcgttcctcttgctgaacacttatgctccaaacaatggatggaaagaagaggaaaattcatttcaaagaagacggaaatgggataaaagaatgttggagtttgttcaacaggtagacaaacccttaatctggtgtggagacttgaatgtcagtcatgaagaaatcgatgttagccatcctgatttttttagcagtgctaaactcaatggatacatccctccaaataaagaggattgtggacagccaggattcaccctgtcagagaggcggcgcttcggcaatatattgtcccaaggaaagctggtagatgcttacagatatctgcacaaagagaaggacatggattgtggcttttcttggtctggacatccaattggcaagtaccgagggaagagaatgcgaattgactatttccttgtttcagaaaaactgaaggaccaaatagtttcatgtgacattcatggtcgtggaatagagctagaaggattttatggaagtgatcactgccccgtttcacttgagctctcggaagaagtagaagcaccaaaacccaagtcctccaactaatttctatatttcgcacttaaccagacatggtggagattttagattagctgaagcatatctgctttgtatctcttgagtcattatccattattcaaatattgtctcagtctagcagtatttctgatgatgaattggatgatctagctaggatcctgattgtaattataattagtatgttactatggtctgcaatgctatctttagatcctataagatcaaaaacttctaccatttgttccattgtttttaatccgaagaaaaacaatatatgcaagctaattctggtccgc

SEQ ID NO: 19960 - DNA, 824 bp, Oryza sativa
  ref <308>: DATABASE ACCESSION NUMBER: AK070296
  ref <309>: DATABASE ENTRY DATE: 2001-12-06
ggtagtggaagggtacggtctgcagcgcgcggtaaccgccgtcactaaaggcccaggtgcggcagacgttgaggccggcctcggcggcctcggcgatggcggcggtgacccgcgggcgcgtggcttggtcagcggcgaatgacatgagccagtaggtgttgaagccgtggatgatgaaggggcggccggaggcccagagctgagttccgctgcactccaccattgtccagtggtggtggtgggcgtcttccatgtaagaggcgagggcgaggaggaggaggagcaggtggtggtggaggggaaggcgaggcgtcgcggcgctctagctcggcgggatggggcacatgcccatcgcacgggcattcatgtgcatgtgcgcttccattttcaacgtcggtggtcaacgccacagccgacttcaccgctcttatggtgagtatgagaccgacacgtgggtcccactgcgcgccgcacccggaaagcttgagacggcgtcactcatggcgactgcagcggtggacgcatgagaagccggacgtgtatggtgttctccggcgaaggctggtgcgtcccaacgccggcgaggttcgccgccactggtcgctgccgtggaaaaagagagagacggagaagaagatgacggtacggtaagtttcaggaggggttatgcccacacaagggccccacctgtcattcacactattacatatatttgtttgcgatacgcttatcttcctcgatagcgtaatatcagtttccgttttgctctgctcgctctctactctgtttcgcctgttgtaaccgccggtgtgataaaggtacat

SEQ ID NO: 19961 - DNA, 1769 bp, Oryza sativa
  ref <308>: DATABASE ACCESSION NUMBER: AK070297
  ref <309>: DATABASE ENTRY DATE: 2001-12-06
gactgatcccattctgcgtcgagctgcctagctatcgatcttcgtacgtaaatacgtctccctcgtctccggcgagccaccggccgtgagagatggcgccgccgtcagccatgaacacgtcgagggcggaggagaaggccatcgacgactggctccccatcacctcctcccgcaacgccaagtggtggtactccgctttccacaacgtcaccgccatggtcggcgccggcgtcctcagcctccccttcgccatgtccgagctcggctggggtccgggggtggcggcgatgatcatgtcgtgggtgatcacgctgtacacgctgtggcagatggtggagatgcacgagtgcgtgccggggcggcggttcgaccggtaccacgagctcgggcagcacgcgttcggggacaagctggggctgtggatcgtggtgccgcagcagctcgtcgtcgaggtcggcgtctgcatcgtctacatggtcaccggcggcaagtcgctcaagaagttccacgacctcgtcgcgccgccctccgcgccgccgatccggacctcctacttcatcgtcatcttcggctgcctccacctcgtcctctcccagctccccaacttcaactccatcagcggcgtctccctcgccgccgccgtcatgtcgctcagctactccaccatcgcctgggccgcctcgctccaccaccacaaccacaacaatggcgctgccgccggaggtgtggactactcgctgacggaggcgacgccggcggggaggacgttcaacttcctgagcgcgctgggggacgtggcgttcgcgtacgcggggcacaacgtggtgctggagatccaggcgacgatcccgtcgacggcggagcggccgtccaaggggccgatgtggcgcggcgtcgtgctggcgtacggcgtggtggccgtatgctacctccccgtggcgttcgcgggttactacgtgttcggcaacgccgtcgacgacaacgtgctcatcacgctggagcggcccgcgtggctcatcgccgccgccaacatgttcgtcgtcgtgcacgtcgtcggcagctaccagatctacgccatgccggtgttcgacatgctcgagaccttcctcgtcaagaagctccgcttcaaacccggcatgcctctccgcctcatcgcccgatcactctacgtcttgttcaccatgttcgttgccatcgcggtccctttctttggtggactgctaggcttctttggtggctttgcgtttgctccaacgacctacttcttgccatgcattatgtggctgtcgatcatgaagccaaagaggtttggcttgtcctggtgcatcaactggttctgcatcatcatcggcgttcttctgtcggtgttcgcaccaatcggaggtctccgctcgatcatcgtgaatgcccagagttacaagttcttctcttgagtgattaattgagagaaaaggtgttttaccgttcaattaagtgtgttcttaattaattaggggattgttttagataatgcacagagttctatttaattaattagatgaaagagaaattcgtgtgtccctatgagacatctgtgtggattgatatagtagtcgatcaaatgaaggcatattatttatttggcctttgtttgtcgatctagtactctagcgttaatttaattcgtgtcgagtttatcccaatttttgatgatgtttgtgctctattatcacgtggtgtggcattcgttttaagggtttatgattggttcaaacttcgtcctagttttt

SEQ ID NO: 19962 - DNA, 3246 bp, Oryza sativa
  ref <308>: DATABASE ACCESSION NUMBER: AK070298
  ref <309>: DATABASE ENTRY DATE: 2001-12-06
ggccggtctcctcccctccgccgcagattcctccctccgtcgatcgccccttcatcacccagccctctcacccttgctccctccctcccctaaccctaatctcatccgcgccgccgccgccggtactgcggatccccgatccgtcgcccgcctccactcagctgccgccgcctccaagacgtcgtcaccaccacctccatccgccacgacgcccccacaacctccgtccgcgccgaccccacgctgccccacaccgcccggtccttcgtcgacgcgccgccgttgcgggcaccgcccccgcccacatcgccgcctcgccccaactgctccgccccaccgcgccgcgcgggtgctcccaatcctcgccgccgctggccccgcgccgccggggggtgggcggcgatggaggcatagaccggcccgccgcgacgggcagaggcggtgcaaaggcgctattgaattaatttactctggttatttatgctgcatccttatgacttctgtttgccaagattccaactgcttatttgcccttaccagtgagatcttataataattgccaccctgactacaaagaagcaactatgcggctgtcttcttcacttcaagatttgcctacgttctcaagaattgatgcattagaaaggggctctagcactggtagtgatttggtctcagggcgtgcaaaacctatccgcacacttcaaagagatggcgctgttgcaagcttttcaaaagagaaaacacccccctcatcaccaacaaatcgaaagaaatgcatgagagctgctggttgtgctattgctctgttccttttggtgttctttatatatgcttctttgagatatttccatgtctttctctcggaaggaagccctgaatactatgttattcttgattgtggaagcactgggacaagagtgtatgtttacgaatggtctgttaaccatgacgatggaaacacatttcctattgctttgaaacccttaggaaatgctcctaagaaaaaatctggtaaattaactgggcgagcctatcagcgaatggagactgaacctgggttgaacaaacttgttcacaatgaaactggattaaagatgacaatagagcccctccttcgaatggctgagaagttgattcctagacgtgcacacaaacacacgcctgcttttctatatgccacagctggtgtgcgcaagctaccgagtgcagattctgagtggcttctggacaaggcttgggatattctgaagaattcatcgtttctgtgttctagagacagagtcaagattatcagtggcatggatgaagcttattatggatggatagctcttaaccatcatttgaatatgcttggcacctcatcttctaaaatgacatatggttcacttgatttaggtggatcatcattacaggtgacatttgagactgataattccattcaggatgaaacaagtatgagtctaaggattggttctatcagtcatcaacttagtgcttattctctgtctggttatgggctaaatgatgcatttgacaaatctgttgcacatcttgtgaagaagttgggaggggcagctggtaatggaaaagttcaggttaagcatccttgtctacaaacgggatacaaagaagattatatttgttcttactgccacccgctcaaactagatggaagtcccagtgttggagggaagacaacaggcaaagagaagcagggaatggcagttgaactgatcgggatgcctcagtggaacgaatgtagtgcccttgcaaaattaacagtgaatctttctgagtggtccaatgcaagctcagttgactgcaacactaaaccttgtgctcttcctagtacctttccgcaaccacatgggcagttttatgctatgtctggtttctatgtggtttttaaatttttcaatttgactgccgatgccactctcattgatgttctaaatagaggccaggaattttgtgaaaaaacatggaaggttgcaaagagtagtgttccaccacaaccttttatagaacagtattgtttcagggctccttatattacatcacttctgagagaggggctgcagatcaaagataaccaggtgataattgactctggtagtataacttggactcttggggttgctttgttagaggctggacaggtgttgtctacacgaatcgatattcaaggatacagaatactccaccgagagataaatccaaatattcttattgtgttgtttctgatttcaattgtgttagtcatatgtgccatattgtgtgtcagcaattcaatcccaagatcattccgcaagtcttatctgccactttttaggcagaacagtgcaggcagtcctgtgcttagcatgggatcacctttcagatttcatctatggagtcatattacttcaggtgatgcaagaacaaagacacctctgagtcctactgttgctgggtcagagccccatccattcagcatgagccatggattaggaggcagcagtgttcagcttatggagtcctccaggcagtcattgggcgtctatcacagctattctgttggaagcttaggtcagatgcagttttctagtggaatgtggaagccaggtcaaacaacactccaaagtcggagatcccaatcgagagaagatctcacttcgtcactagccgatcttcatcttccaaaggtgtagccttacatttcagaatgacatgactagtatgagaataccatcccataacaaaccttgtgtaaataatagctccggactatttgatttcttctctaatcaaaagtcaaattttgtcggtatactgacacttcagtgagatctagcattcacagaattggaggtatgacttggtgcctgctgcctagtcctgggcatgatattttcattacgatgtatgcgcaacagtacatgtcacaaggtgaaattgcaagaagaaatttatatggttcaccaaagtggttggccgtgggctggaggtatataaatcagctcctagccccaaaatgtcactgtttctaaattgtgatatcaattcaaccgagcaggctgtgtacttcaaatgtttcttattcttttgttctacaacataataaagctgcctatgggctatggtcttgtgtctgtagaattgctgtacgacaccatgtaagagttttcccttgtggaaggacatttggtaccaacagaaaacatgaattattagtaattccagtgctcttatgtttactcatcc

SEQ ID NO: 19963 - DNA, 1315 bp, Oryza sativa
  ref <308>: DATABASE ACCESSION NUMBER: AK070299
  ref <309>: DATABASE ENTRY DATE: 2001-12-06
gaccattcggtcggcctttacaaattgccggtcgcttcgctcgccgtgcaaaccaagccagcgtcgggccaagccaacgccgaccaccgaggcgaccggagaagcgcggcgaggtaggccccgatggcggcggcggcggcagccggagcgggcgcggacgaggaggtggacttcgagttcttccccatcatccgccgctacaagggcggccgcgtcgagcggttcatgaacatccccccgctccccgccggcaccgaccccgccaccggcgtcacgtccaaggacgtcgtcgtcgacccggccgtcggcctctgggcgcgcctcttcctcccgcctggcggcggtgctccccagggtaagctccccgtcgtcgtgtactaccacggcggggcctacgtcgtcggctcggccgccgacccgttcacgcactcctacctcaacggcctcgtcgccgaggctggaattctcgccgtcgcgctggagtaccgcctcgcgccggagcaccacctccccgcggcgtacgacgactcgtgggaggggctcaggtgggtggcctcccacgcgaacggcggcggcggcgtcgagccgtggctgctcgagcacggcgacttctcccgcgtgttcctggcgggcgccagcgccggcggcaacatcgcgcactacgtcgccgcgcgcgccggcgagcacggcggcctcgggctcagcatcaggggcctgctcgtcgtgcacccctacttcagcggcgcggcggacatctgcgcggaggggacgacggggaaggcggagaaggccaaggccgacgagttctggcggttcatctacccgggctcgccggggctggacgacccgctgtccaaccccttctcggacgccgccggcggcatcagcgcggcgcgcgtcgccgccgaccgcgtgctggtctgcgtcgccgagaaggactcgctccgggacaggggcgtctggtactacgagagcctcaaggccagcggctacgccggcgaggtggacctcctcgagtccatgggcgagggccacgtcttctactgcatggatccgcgctgcgagagagcgcgggagatgcaggcgcgcatcctcagcttcctccgcaagtgaagctcctccacgacgcgaaggcttcgccatgatggaataattctggcgctttgtgatgccgccattgttgagctcgagggctcctgtagcttgtcgctcgtcagttcaggcatcttttgtgccaattgacgatcttattcttcaagagttggaaatcatcgaacaaattggaaatttctattcgaatcatcaatcagttatc

SEQ ID NO: 19964 - DNA, 2147 bp, Oryza sativa
  ref <308>: DATABASE ACCESSION NUMBER: AK070300
  ref <309>: DATABASE ENTRY DATE: 2001-12-06
ttggggctaatcataataatcatgatttcttctcctgcgctcttcttcctcctccagccaggccgcccctccatcgccgcgccgccgctcccctcctcgccggcgcctcccctccgcggcatctccatctcccccgtcgccgcccgccccatctcctccctccgctcctcctcctccatcaggatcatctcgccgccgcacgccctccccgacccgctcctctccctcccgtccatggacccccaagaggtgcccgatctgctgcccccgcgcccaccggagcgcgacttcgccggaacgccatacgtccccgtctatgtcatgctcccgcttggagtggtcaatggtaatggcgaggtggtcgacgccgacgtcttggtgggccagcttcgggtactcaaggctgccggcgtcgatggggtcatggtcgattgctggtgggggaatgtcgaggcccacaggccgcaggagtacaattggaccggttacaagcgactcttccatatgatcagggagctcaagctcaagctgcaggtggtcatgtcattccatgagtgtggaggcaatgttggagatgatgtgtctattcctctcccacattgggtaacagagatcggaagaagcaatccagatatctacttcaccgacagggctggcaggcgtaacacggagtgcctttcatggggcattgataaagaaagggttcttcaaggacggacaggggtcgaggtattttgactacatgagaagcttccgagtagaatttgatgaatattttgaggatggtatcatttcagaaattgagattgggctaggggcttgtggagagttgaggtatccatcttatccagcaaaacatgggtggaaataccctggcattggagaatttcagtgctacgacagatacttacagaaaagtttaagaagagctgcagaagcacgaggacataccatatgggcaagagcgccagacagtgcaggccattataattctgagccaaatctgactggatttttctctgacggaggagattatgatagctactatggtcgttttttcctcaattggtattcccaggtgttggtggatcatgctgaccgtgtattgatgttagccaggttggcttttgaaggttcagatattgctgttaaggtttcaggtgtacactggtggtacaaaactgccagtcatgctgctgaattgactgctgggttttataacccatgcaaccgtgatggttatgcctcaattgctgctgtcctgaaaaaacatggtgcagctttgaactttacatgtgttgaactgcgcactatggatcagcatgaggtatttcctgaggcctttgcagatccagagggccttgtatggcaggtgctaaatgctgcatgggatgctggcataccagtagctagtgagaatgctctgccttgctacgatagagatggctttaacaaaattttggagaatgcaaagccactgaatgatccagatgggaggcatttactaggattcacgtacctgaggctcaccaaagtcctcttcgagagagctaattttttggaatttgagcgtttcgttaagagaatgcatggtgaagcagttctcgatctacaggtataagttgtgttcagggttcttacatacatacatatatatacatgccattgtaattggcataggccttatggcttatgatgggggaacagagatgccatttttgtttcgtaggttgttgtagtataccatcagcagatttttgaactatagagggtttggctccatggtgtaaagcatacccttggcaaagagttgtcatgcagaaaattgatggtttcattcggaatgaggttggaagcaggtgtatttctttcgatgcggcagacatatttgatttgtcatgagatgaggattgggtgagcaggtggtatccttctgaaagatttgaggctgtattgaagagaatgtgctgatgcatgtttatcatggagcaagcgacattaatggagttagcaaaggttctcgcggtgtatgtgtttgtatttgttggtggaatgtcactcgaggatcttggctgtatacaatacatacatgtgcttttttttgggtcttttctacagtgtatgagaaatgcatgtttcttactgcc

SEQ ID NO: 19965 - DNA, 1410 bp, Oryza sativa
  ref <308>: DATABASE ACCESSION NUMBER: AK070301
  ref <309>: DATABASE ENTRY DATE: 2001-12-06
gcggggatctctgggtgttcggtcgcatctggtcatgaattttcgatcggttcgataggtcgttggtcccggtgaagaaacggatctcgtagcttcggagttgttgcgtgggtgtggaggttttgggcggaacggatttggtgcgattttgctttgattcaggggtgtttggggcgtcggaggaggcgtagatgggttggatgtgttcgtttgggggtgatgggtggtttgatttggggggatttggggagtctcatggttaatttcgcgattttggggtggggtggaaaccctaatacgatctgattcgttcttccttgctttggggaattcatgaacaaccttgagatggttagatatagtgatccgttcactggagtttcatattacgatttgtgcagcgtatgagtaagatttgggggaatcgtgaccttgaaaatctgtcgcctcgtcctgcccagaaattgggggaactcatgtttggtggttgatttattagcatggaaggtacgggcatcgaagggaataagccccgtacaataacgatttgggaaccatgaccttgaattcatcgccccttcccgccgagaaattgggggaactccatgtgtaggggttgatcgaatacgaagaacatgattaggctgtgcgcttctgctatagaaaattttatgttggggggcttgctggatattgttctgtgctagctgcaatttaatttcttcattgtgcctttggtatagcatattgatgtgagtgatctgtgcaggttccacataaagaccaacgagtaaaagcttgatctgtccggtgccaaccaatcaacaaacaagtttcatgtctgatctcgacgttcagcttccatctgccttcgatccgtttgctgaggcaaatgctgaggactccggcgctggccctggagcaaaggattatgtgcatgtgcgcatccagcagcgcaacggcagaaagagtctaactactgttcagggcttaaagaaggagtacagttacaacaagatcctcaaggatctgaaaaaggagttctgctgcaatggtactgtagtccaagatccagagcttggccaggtcattcagcttcaaggtgatcagcgtaagaatgttgccacgttcctagttcaggctgggattgctaagaaggacaacatcaagattcacggtttctaagctgcctatagatgctcgtatgcaatatcgtgtgctgccagatattgggaagcctctgaagctaccagttactgttctctatatttgaagtcataagactatttgttgctattaaagcgattcttgcttgatgcaagttgtgtcctcattatgcactaccggcatattatgagtatggtttgtctgggatattgtcaatctaataaaagtacttgctatttgact

SEQ ID NO: 19966 - DNA, 1335 bp, Oryza sativa
  ref <308>: DATABASE ACCESSION NUMBER: AK070302
  ref <309>: DATABASE ENTRY DATE: 2001-12-06
ggcacgcggcataccaagaaaccgcgcggcgcgcgcttcccgggggggcgcctgccttcgatggaggtcgcggccgcggaggacgcgctggaggagagcggcgtggcggtgtacctccccaggcttctcgccggcgtcatctccggcgctctcaccggcctcttcgctctcgctggggccttgaccggagcggtgaccggcgcgctggccggaagggcttcagacagcggcgtgctccggggagctggattgggggcgttcgccggagctgtgctctccattgaggtcctcgaggcttctcgtgcttattggtgctcggaccggctgggctctcatggcacatcctccatggcagatttcatagagcagctcctccaagcgcggtttgtgcaagagcaaattgtaccttcaggatatgcaacgcatcgttggcaggtcagcatttcagattttggtcatgatgatctgtatgatatttttggagattgttcatccaaagggctttcacgggagtcactgaataaattaccacactatgtggtcactgaccaaacacggaactcgtttggtgaagacctctcttgcactatctgcctgcaggatattgtaaccggtgaaacggcgaggagattgccgaattgctcccacactttccaccagccttgcgtggacaaatggctcgttggccatgggtcttgccctgtatgtaggcaatgtgtgtaacaacagaaggaatccatatgcgagtactgcaagaaatagctgcatcagatacattgaagcaccaacaaacaaacggtggcaaagtacaaacagaactacaggattcagaaaatgagaggttaaagaaaaagggaggaaaggtagcagaaagcctgaaactcgcctgggcattcttcagaagttcctcttgctggatatcatcacttgttgcaggatccatagctctctgatgaatcaatcagaaatgtgaagacaaattagtaaacttgatcagtggtaactgaatcgattgtgcatgaaggggcagaaattcattgccttgggcaatccatgacttagtatcctcacaatagtctctttggcctcaacatcacaatcacggagttcaggtactttcatgtcgcgggggtcaagttcagggtcaccttttatcactgatgtccaccattccttctggttttcctttgtcaaaagtatagacagtgtattcccatcctctgaaggaattatcacaaaataatgcatgtcaagtcagtaacaagagtcatgtaggtattgctatcgatgagaaatgtaacaagtatcatcaaactatgtatgtaccaatggtcc

SEQ ID NO: 19967 - DNA, 979 bp, Oryza sativa
  ref <308>: DATABASE ACCESSION NUMBER: AK070303
  ref <309>: DATABASE ENTRY DATE: 2001-12-06
gagggcgagagggtcgatctgctggccctgccactcgatccgttcaagtaggggtggtggtgatggagatcaaccgggctgctggtgatggagaacgacaacgaggtgatcgatctgctggcctatcgctagatccggtgggtacatgcactcaagttcgccatgaagccgatgcaatccttctccatctccacagtgggttggcgcccttctgctcaagtttgaagctccgctgccgtgcggcgccgacactgtttcgcaattgcagatctggctagcaacagtggtcggaggtatgatattttgcatgcctcttacaagtaatgctatggcctatgtaaatgtctgcaagactacaaggaatctatgaatctatcctgctctgctgagggattctttattttagtacagtagagaactgagatcagtgcaaatcgagaattcaggctctatttctgctccttaacatcagaattgaagttatgtggcagattgtgttagaacaaaaaccttcagagaagctcaacatttactaataggagtacgtttttggacttgtgatgcttctggtgaggtttttggactagaccaaccaatagcatttaggttgttgggctcggtgagatcattacaagcacttgaaggtgtggctaagtaattggatgattcactgtggtgctgatgcaagtcagcattggtagtctttgaagatgcagaatgaactctactaatttagggctaagccatgctgatttaaactgatatatatttagtgctcctatagcaattggtgaagaaattgtgtggaagtttctgttaaaatgatgaaattaagaacatgtttggtaatatataaatactatagattggatctgaaacgtgttgtggtgagctatggcacaaaatcctctttccatgaattgaacacataatggttagaggtcggagattaatgatatggcctatgcaaatatctacc

SEQ ID NO: 19968 - DNA, 2472 bp, Oryza sativa
  ref <308>: DATABASE ACCESSION NUMBER: AK070304
  ref <309>: DATABASE ENTRY DATE: 2001-12-06
ggtggtggcgttcgtctgatcgtcgtctccgagcggtgctgctgttttcgcagggaggacagtacagccgccgcggccaccggtgccgccgccgacgtctcggagctcgagctgctagtccccagggggggcgcctcgtcgggtgcggccggcagcatggaccgccacgcgctgggcggcggtggcgcgctggagatcgagaagacgccggaggcggcggaggacatggagtcggagcccgcgctggcggcggcgcgcgaggcggagcgcgtcccgccgtggcgggagcaggtgaccgcccgcgggatggtggcggcgctgctgatcggcgtggtgtacacggtgatcgtgatgaagctgagcctcaccacggggctcatccccacgctcaacgtctccgccgcgctgctcgccttcctcgcgctccggggatggacgcacgcgctcgaccgcctcggcattgcctcccgccccttcacccgccaggagaacaccgtcatccagacctgcgccgtcgcctgctacaccatcggctacggcggtggattcgggtcgttcttgctggggctgaacaagaagacgtacgagctgtccggcgcgagcacgccggggaacgtgccggggagctacaaggagcccgggatcgggtggatggcggggttcctcctctccaccagcttcgtggggctcctcaccttgctccctctccgaaaggtgctggtcatcgactacaagctaacatatccaagtgggacagcgactgctgttctcataaacgggtttcacacgcctcaaggagataagaatgcgaaaaagcaagtccgtggattcctcaggtatttcggcatcagcttcttgtggagcttcttccagtggttctacaccggcggtgacgtctgcggattcctccagttccctacctttgggctgaaagcttggaaacatacatttttcttcgacttcagtctcacgtatgttggtgccgggatgatctgttctcaccttgtcaacctctctctcttgttcggcgcgatcctctcctggggaataatgtggccgctcatcggcaagcagaaggggaattggtactctgctaaggcatctgaaagtagcatgtcgggcctgttcggttacaagtccttcatctgcattgcacttctcgttggagatggcttctacaacttcgtcaaagtgatcgttgtcactctcaagagcgtacgcgaaagatcaaggcgcaggggtcttaacaacagagtggcggacgcggacaccatggcgatcgacgacatgcagcggaacgaggtgttcaaccgggacaacatcccgacctggatggcgtacaccgggtacacgctgctcagcgtcatcgccgtggtcctcatcccggtgatgttccggcaggtgaagtggtactacgtgatcatcgcgtacctgctggcgccggcgctggggttctgcaacgcctacggcacggggctcaccgacatgaacatggggtacaactacggcaagatcgcgctcttcatcttcgcggcgtgggccgggaaggacgacggcgtggtggccgggctcgtcgggtgcgggctggtgaagcagctggtgctcatctccgccgacctgatgcacgacttcaagacgggccacctgacgctgacctcgccgcggtcgatgctggtcgggcaggtggtgggcacgctgatggggtgcgtcgtcgcgccgctcaccttcttcctcttctacaaggcgttcgacgtcggcgaccccaacgggtactggaaggcgccgtacgcgctcatctaccggaacatggccatcatcggcgtggaggggttctcggcgctgccgaggcactgcctgcagctgtgcgcggggttcttcgcgttcgcggtgctcgccaacctggcgcgggacttcctgccgcgcaggtacgggcggtacatgccgctgcccatggccatggccgtgccgttcctcgtcggcgccagcttcgccatcgacatgtgcgccggcagcctcgtggtgttcctctggcacaggttcgacggcaagagggccgcgctgctcgtgccggccgtcgcgtccggcctcatctgcggcgacgggatttggacgttcccttcgtcgctgctcgcgctggccaaggtcaagccacccatctgcatgaagttcataccgggaaactagccaatgcatcgctgtaatttacagcgtcaatgcagacgtatagatcgtaaaaaagagatcgtatagacgtatagcgtcaatgcagaaacactagaaaagagatcgtgtatcgagcgttttggacttagatttaagatttaggcgcagcgagaggaagaacgggtgtagctatgacggataaatccccaaaagcagaaatgctgttcataggggttggggttctgtactgtgtatatcagttgagaagaaaattagatgaaaacacaacaattagttgtgcttattggc

SEQ ID NO: 19969 - DNA, 1248 bp, Oryza sativa
  ref <308>: DATABASE ACCESSION NUMBER: AK070305
  ref <309>: DATABASE ENTRY DATE: 2001-12-06
gggcgctcgtcgaggtatgggacatcgtcgccggcgtgtgctccaattggagtaagatggccatgctcggccactacatcaggcacgagccacagtggcgtcggtgtcgccgcgcccacgcggcgctcgacgccgtgctgcggttcagtcccgcgaggcggtggcgcaacaagatcgggcagaactcggtgctggagccccgccgcttctgccggcggtccggcctcctctccgagaagctctacggccgcgccgggctcatgaggtcggtggaagtctcgccggcggtgaaggacgcggttctcaggtccttgatgagcagctacggcaggtcgagcagaggacgcgcggcggagcggcgagtcggcagcaaggtcgactggctgtggtacggctcccgaaagagctgggcgtccgacgacggcgacggctgcgtcagcaccaccgacatcatcctcgcgtggcacgtcgccacgaggctctacgagatgagatgctcgctgcacgcttcgtctccgacgccgtcggcatcatcgtcggacatggccgccgcgtgccacctctccaactactgcgcgtacctggcgtcggccgcgccggagctgctgccggacatcgccacgtggaccgagaaacggtacagggaggtgacggccgacgtcaccgcgggcgctgggcaaggacagcgccgccggtgagacgacgacggcgcagcagaggtacgagcggctcgtggcgacgctgagcgccggcgcgcgcgacaaggcgctgcgtcgcggcgcggagatcgcgcgccgccttgcggaggagtacacgaccgccgccgaggacgacgacgaggcgtcggcgtggctgttcctggcggatttctggtcggagatgatgctctacgtggcgccgtcggagaacgtcaaggggcacgtggaggccatggcgcgcggcggcgagttcgtcacgctgctctgggcgctgctcctgcacgccggcatcaccgctaggcctgaggcgccaagccgtattatcccgtaggttgttacagtgaagtctcctgtcggctgtggcccccgcgttgtagaatcaattgccgtattggtagtttttgcatagtataagctggtagtagttcgcttgttgtcgttctcgtttagttaagctaatttgattgtttaatttagtatcgaactgtagtccgatttgcaccagcacgcattatcttgtcctcacactatagtgtatcgtccttttctt

SEQ ID NO: 19970 - DNA, 1363 bp, Oryza sativa
  ref <308>: DATABASE ACCESSION NUMBER: AK070306
  ref <309>: DATABASE ENTRY DATE: 2001-12-06
gactacaatatcctacacaatgcagcagcacatcttctaccttgttactacctggtagccgtcgcatagaagcggctgaggccgaccttggtgccgacggccttgatgtcggcctgcacctgctcgcggaattccctgtaggagaagggcctgtagacgccgccgccgatgccgctgggggcctcgacgacggcgtcctcctgcgggaaggcgaagtagcagcacgacaccctctccgtggaggggcggctcgcgagcaccctgtggcgcacgctctggtacgagccgccgctgatggccgtcatcatgtcgcccaggttgacgaggagctcgccgggcgcgggggcgacgtcgcgccacgcgccgtcgcggatcacctgcaggccgccgacgtggtcctggccgaggatgatggagagcacggagctgtcggtgtggggctccatcccgaggcaggaggcggaggaagggcagggcgggtagcggtacaggcggaggaagccctggcgctcggcgaggtaggacgccgcctggtgatgatccaggcccagctcggcggccagggcgtcgaacagcttgcgggcgatgcgcgccatgtggtcgccgtacttcgccatcagcgccctgatccgcatccagccatcatcatcatcatcatcgccatcgccgacctgcgacgacgacgacgacgagccggggacgagatcgacatggagtccctccagccagttgacctccttgacgcggagcgacttcagcgcagccgtgccccagaagtagcccggccgcgccttcttcagctcgaaggtgtcgcgacccagcagctgcttccccagctccagcagccgccgccggagctcgccggggacgccgtggttcaccacgcggaacgcgcccagatcccggcaggccgccaccagcgccgcccggtcctcgccgccgacgcgctccaggtccagcgtcggcagctccagcctgggcagacccggctgcagctgcagctgcagcggcagcggtggcgcctccggctgcgggaacggcgggcacgacgggtccatctgcgtggtcctcgtcgtcgtcgttgacgacgactcgcccccacctcctcctggttgaagcctgccgcacgtggcggcagctgaggcccagcccatcagaagcctacggcctccatctcagcccattagtgagatggcggccaggcccggcccgtagtcgtttctgccctactcgttttgcagtatgataggatctgccaaaaggccattcaattgctgccaaaagtgaaatttcggacggtgcggtacagatgtttgaaaaccgagcttgaaaaattgatgatgtagagcagatcagcagattc

SEQ ID NO: 19971 - DNA, 1422 bp, Oryza sativa
  ref <308>: DATABASE ACCESSION NUMBER: AK070307
  ref <309>: DATABASE ENTRY DATE: 2001-12-06
ggtccagtgggcccgcgagacaatctagccgttcttcatttttttcgctttcctgccacgtaaaccgacccgtgggatatctcgcccctttttctagtatttttttttcttttcggtactccacgctcgttctttcgcttttcatccccttcgcgtccgtttcttccctttctccccccatttttctacctcccttctccatagctcacgctccttcacgcacacgcctcgctcgcgcgcgcacacaggggggaggaggaggcaggtcggcggcatggcggtggcgagctggagcattccggcgatcccgcgggcgggtccgacagcgaggggtgtgctgctcggcggcgccttcgtgacggccgcgcggccgcccgtggcgtggcggtgccgggccacgctccctaggagagtgaggctcggtggcgtggtggcccgtgccggtgcggcggagacgccggtggccggctccggggaagccgggttgctgttctccgagaagttccccttgcgccgatcccgaacggtggaagggaaggcgtgggtgagggtcgatgcggagccggatggggagggcaagtgcaaggttgtgatcgggtgtgatgtagaggggaagtgggtgctgcattggggtgtctcctacgatggtgagcagggaagagaatgggaccaacctccttcagacatgagacctcccggttcagtgcctattaaggactatgcaattgaaacatctttggacactccacacaattcagaaggcaagacgattcatgaagtgcaaatcaaaattgataagggcacatcaattgctgctatcaattttgttctaaaggaagaggaaacaggtgcttggtttcagcacaagggtcaggatttcagaatacctttaagtggatcctttggtggagatctactaggaacagaacaagatattgatgtcaggccaggggctttaggtcacctatctaacgtgttacagaaacctgagggacctattgctgagcctcataaaactgtacccgatgataaaggttcaagaaccaaacacatttcaggtttctatgaggaatacccaatcttaaaaacggtgtatgttcagaattttataactgttaatgtgagggaaaacaatggaacaactaaacatgctgtggaattcgacactgatattcctggagaagttatcattcattggggagtttgcaaagacaataccatgacatgggagatccccccagaaccacatccacctgcaacgaagatattccgacagaaagctcttcagaccatgctacaagtaaggaccttgatcccttggtagaggcaaagaaatgacatttaattgtatcaagctaaagtacaagataaatgtacttacaagctgtgctatataaaaattaacaagtaaaggtgttctgg

SEQ ID NO: 19972 - DNA, 1506 bp, Oryza sativa
  ref <308>: DATABASE ACCESSION NUMBER: AK070308
  ref <309>: DATABASE ENTRY DATE: 2001-12-06
gggcgtcctccccggagggttcctccccgcgtgaccccgactccgacgaggccgagcagcccgacaccccgagccgccgcggcgtcaaggacgacatctccgagctcaccgagaccctcacccgccggctctggggcgtcgcctccttcctcgcgcccccgcccccgccggagtcctccaccccgcgcggggaggaggaggaggagggtagggatggggaagaggagtcagcgcagtcgccgcggatcgcggggatccggagcgatctggcggagattggggggagggtgaggagcggcatctcgatgctgcagagcaacaaggcggtggcggagatatccaagatcgcgtcctccctcctgccatttgggcagggggatgcggacgagggggagcccgtggctggcgtcactgaggaggttgtggtgttcgtgcggcacatctcgaccaggcccgagacttggctcgatttcccactgttcatcagtgagcgctatgcagatgactttgaactttcggatgctcagtatgtgcatgcattatccatggagcaccttgtgccaagcctgtcagatataaaagctgccatttgctctactgatatgagtgaagcatgtttctggaagatatattttgtgcttctgcactcgaaactcaacaagcaagacgctgaacttctttcaacaccacagatcctacaagcaagggaggaattgctgcaaagtttacagactaagaataagcgaggatctgaggttccggaggaagaggaatcatcaaaaactgtgattatgtcctctgcccctgctgaagagaaagtgatacaaccttcaagcattgaaaacaaagctggaaaaccagaggtttcatcgttcgaagaacccagttctgatatctcgccagatgtcgaggctgaaaagttccccattgcaattacagagatggaaatagtagacaagtcggtaattgaagaagagttgtcagtgaaaaatgaaaccaagagtttagccatcgagcccaaaattcattccgagactgatgaagatgaagttgatgaatggcctgatgatgacgacgatgcagaagaggtggttggcacagaaggtaacagaacttcactgggacaggaggaagatgtatcgttcagtgatctggaggatgacgatgacgatggcaataaagggatagcgaagtagctaggcgggctcaaggtatggtcccagactcccagtgcaatcatcactttccgacagtcccataagcacatgctggcttcatttcagtagcggcagatacgcattaagggatcattactttgttattattaggcccatgaagtgatgaacccccaaacttgctcagtctgggataccctgcttagagccgtaatgatagggcaatgcctcagctcgtgttaatgctgatggcgactacatctgtattattgacctctctgcctgtacatagagccctctgggcgtgctgttataacccaaggtacgtact

SEQ ID NO: 19973 - DNA, 874 bp, Oryza sativa
  ref <308>: DATABASE ACCESSION NUMBER: AK070309
  ref <309>: DATABASE ENTRY DATE: 2001-12-06
gatgttacaaacaaatcgttggttcctcttttttcttcagtttgtttcagtgcaactcagttcttggaaagaaaggttggatttttactctgaacaaagcgaaaggtaaaaccatctcttttgtaatgcagcaatttatgtatattttggcgtcctttcagttattttgtttgatcaggtgtggcaatgggcggcagcggaacgctgatctccatttaccctgaggatctcactttcctatgtaagttcagaggacttcttgagattatctaatgttgttaacatttacggatggttagccttaacccacttgtgtgggttcttcactccattaaattctcgtgtgtagttgagctggataagcggtgctattgcaatctcaaggtggtgaacaacagcgagcatcatgctgcattcaaggtccatggccttccatttcatgaccaatattttctaaaacttggcgagaaggcttgatgaaagtttgtttcatgtcaagacgacattaccgaggaagtattttgtccggccgaacacgagcattgtccagccatgggattcttgcacaataacaagtaaatagtaccttcgccgcataataagttaatctaatacgagatgtgacatatcccagtacttgtccaaattcatagtactagtatatatcacatcttgtattagattaatttattctgggacggagggaatacatgttcctaatttggccattttatggtatgccaagccatggctctcttcaggctccttgtttggtcttgatatttggatatctgcattgttcttgggtgatgtagttacgctccaggcacataaatagtgcccaccaaatatgcaatgcaaggataaattctcg

SEQ ID NO: 19974 - DNA, 3048 bp, Oryza sativa
  ref <308>: DATABASE ACCESSION NUMBER: AK070310
  ref <309>: DATABASE ENTRY DATE: 2001-12-06
gagatctccccacgttccgtctcctgcctgcgccgccgcgccgatctccatcgccgccgccgccgccgccgccgccgccgacgagcagcggcgccggtgccggcgccgcgccgcacacactcccccctcctactcctccttgcgccgggccccaagtctcgtcttctcggcctcgactcccggaggtctctcctcgctcgctagctctcccgcctcgcctcgccccccaccgcacctcgacttccatccatccatccccgcgacgggagcggcggtgggtggccgtgctgcacgtcgcccttctgcttccgcctccgggagaagtgaaagttgcggagctagggctaaagggggatccacttggtattcttggctccaaagctgtctgggtagggaccgtccaaaattcagcgaccgggatccgggggcgacctgccccagggtggggagatcgctccttttcctgtgacaaggagggcgaactcttattcagccatgatggaagcggacatggagaacgggaggttgtatccggagagacccagaactttctctaccgtacgaactaaatcatctctgccaccgatcttccgtgtgttgatgaggataaatccccgtgctttcattgttcttcttcttttggtattcagtggtgtgctctatgtaggagccagtacatcaccaattgtgctctttgtgttctgcatatgtactctaagtttattcttctctctctacctcacaaagtgggttcttgccaaagatgaaggtcctccagaaatgtctgagatatctgatgccataagagatggtgctgaaggattttttaggacacaatatgggactatttctaaaatggcttgtatcctggcacttgtcattcttggcatctatctctttcgttccaccaccccacagcaggagacatccggtgttggaaggacaacatcggcatatattactgttgcttcctttctccttggagctttatgttctgggattgctggttttgttgggatgtgggtatccgtacgtgcaaatgttagagtttcaagtgctgctcggcggtctgcaagagaagcactgcagattgctgtccgcgctggtggtttctcagccattgtggttgttggcatggctgtttttggtgtggcaatactgtatgcaacattctatgtttggcttgaagtagattcacctggttcaatgaaggttactaatctgcctcttctccttgtgggatatggttttggtgcgtcttttgtcgccctttttgctcagttgggtggtggaatatacaccaaagctgctgatgtcggagctgatcttgtgggaaaggttgagcagggaataccagaagatgatcctcgtaatcctgctgtcattgctgacttggttggtgacaatgttggagattgtgccgcacgaggggctgacctttttgagagcatagcagctgaaattatcagtgcaatgatactcgggggaacaatggcacaacgctgcaaaattgaagatccctcaggctttatactgtttcctcttgttgttcattcatttgatctggtgatctcatcagttggaatactctcaattcggggaacacgtgactctgggttaatatcccctattgaagatccgatggcaatcatgcagaaaggatattctatcactatactgctcgctgttgttacctttggagtgtctacccggtggctcctgtacactgaacaagcaccttctgcatggctcaattttgccttgtgtggcttggtgggcatcatcacagcatatgcttttgtttggatttctaagtattacacagattacaaacatgagcctgtccgccttttggctctttcaagttccacagggcatggaactaatattattgctggagtaagcttgggactggaatcaacagcgttaccagttctagtgataagtgtagccatcatatcagcattttggttggggcatacatctggattagtagatgaatctgggaacccaactggtggtctttttgggacagctgtagctacaatggggatgcttagcacagcagcatatgttctcaccatggacatgtttggtccaatagctgacaatgctggtggtattgtggagatgagtcagcagcctgaaagtgtaagagaaatcacagacattctagatgctgtgggcaatacaacaaaagctactacaaagggatttgctattgggtcagcagcactggcttcctttctcctgttcagtgcatatatggatgaagtagctgctttcgcacaattgccattcaaagaggttgacatagcaatcccagaggtttttgttggtggtttacttggttcaatgcttatattcctgtttagtgcatgggcttgttctgctgttggcagaactgcacaagaagttgttaacgaggtcaggagacagtttattgagaggcctggcttatggactacaacgagaagcctgattacggtcgttgtgttgcaattgtggcatctgcttccttgagggaaatgataaggccgggggctttagccattatatcacccatggctgttggtattatcttccgtatgttgggtcacgctactggccggcctcttcttggagccaaagttgtagccgctatgcttatgtttgcaactgtttctggtattctcatggcactcttcttgaacactgctggtggtgcctgggataatgctaagaagtacatcgagactggcgctcttggtggcaaaggcagtgagtctcacaaggctgcagttactggtgatacggttggagatccatttaaagacacggcggggccttccatccatgttcttattaagatgctcgctacaatcacattagtgatggctccaatattcttgtgattaaccatgaatgtatcacaactaatcctgcggcgaagttatcaaagggtcctgtaggtgagctgtttacgtgagtgggatgtattgattcgctagctttgtgtttattttgcccgattaaagagaatcactactgcccattttgatagtgtcc

SEQ ID NO: 19975 - DNA, 3455 bp, Oryza sativa
  ref <308>: DATABASE ACCESSION NUMBER: AK070311
  ref <309>: DATABASE ENTRY DATE: 2001-12-06
ggtgatggtgagaatcaagtgagttaggctgatctcgccaccgattcccctccgattaacccacctagaagtcgcttagaggcgaggcgaggcgactaggctggctctgcctccttctgctggcggcagctcccagcaggttgccacctccaccgtgcgtcgctcctttcccggcgtctcctcccgtggcgcggagcacgaatcaagcagttgagagtggaacagagatggcaggagcatttgttagtgcttcagtaggggtgctgaatcctcttctaaccaagctttccgccttggtcgagggagagtacaagctgctcaaaagtgtgaagaaggatatcatctttttgaggaatgagctcagcagcatcagtgtcttgcttgagcatctgtcgaccaaggaggacaagcttgatgggccgaccaaggagtggaggaacaacatgctcgagctagcttatgatattgaggattgcatcgacctcttcatccacaagttgagttgtggcgatgcgaatgccaactttgttcagaagataggaagcaagataaagaagttatggggcaaacaccagatcacagagtgtatccaagaactgaagaatcgggttatggaggaggatcaacgtcgcaagaggaatcagatcgatgatttcatctccgagccaagtgtggtggaaattgatccccgtctaccggcattgtatgaggaggtggagaggctcgtggggattgatggtccaagggagaagatcattaagtggatcatgaccaaaggcaagccattagagcaacgtaaagtggtttctattgttggtttgggtggtcttggaaagacaactctagctaatgaagtgtacaagacaatacaaggggattttaagtgtataacttttgtgtctatttcacgtacccctaatataaggaagatcttggttgatatgcttaaagggctcgggagcaatggagatgtatcggaagatgagcagaacctcatcagtcatcttcgaggattcttgaaagataaaaggtacctcattgtttttgatgacatttgggacataggtgcgtggaaggtggtcaattgtgctttcccagagaataatttgggcagtataatcataacaacaacaagaaacactgccgtagctgaagcatgcagccgtaccacatctgaaggctatcttcacagcatgcagccactagaagagcaagattcacagagattattttaccggagagcttttaattctgagagttgctgcccgcctcacctggaagacatctctcatgccatcatatcgaaatgtcgtagtttaccattagctataatctccatagctagcttgctatcaatcaaacctgatacagaggaccagtggatgcaagtgcacaattctattggtgttacactaaactcagacgtcgaagtgagaaaaattttgatgctcagttattatgatcttccttatcccctgaaaaattgtctgttgtatctcagcatgtatccagaggattatgtaattgatagacaagaacttatatggagatggatagctgaaggattcatcattgaagcgaagggaaaaacacgggagcaagtaggagagaactacttcaatgagcttataaatagaagcttgatccaaccagtttatatccaatatgatggtagggccagttgctgccgagtccacgatattgtgcttgatcttatcattagcctatcaactggacagaatttcgtcacaatagtgcatgaacaacagcattggagttctttcaagaagattcggaggacctggttcccatccaatggcacagataatagaatagtcaaggagattacgaacaactgctcacatgttcgttcgctgttctttgacagtcctaaaccggagcaaataccacaatttaagaaatgccatgctctgcgggtattggttctggatgggtgcatgagcctggagagccagcatattaacagcctaacataccttttccagttgaagtatctgaagctcaatgttgcaaatgttaccgagatgcccaaggatattggacggctgcagcaactagaaacactaattattcgtggaggaggacatgtcaacgaaataaacattccgtcaagtgtttgtagactgcaaaaactagagcgcctaattgttgattacccaatgagattgccagatgaaattggatttttgcaagctttggagatgctatctcttttttacaacatagagtacagcataaaatgtttacaagagctccgtcggctgaccagactaaggtatctgcgcataaggacgccttttggaggtgatgtagcaaggttcgagaggtacaaggacgccttttacatgactctcgatgagttaggtaaaaatagccttcaatcattacatgtacatgttacaaccaagttttcagatacattgatggattcatgttgtagtagtgctcccggtctcagagagctttctacttctggcgttggaatatcaaaactttcggagcagatgatttccctttctaatcttgcctatcttgtgatcttctataatactagaagcaatgatcagaaagatatcaacctccttgggtgtatacccaagcttctctatcttaaagtaatattcgcccaaggctgggaggatggactcactgtaggctgtggtggatttccctgtctaaaggagttgatgttcaggcatagtcgcctgcattggttgttgtttgaacctggcgctatgccaaaactccaaaggctttctattgagttgtttgcacaaaaagcagcatccaaacttgggtttgagcagagctttgtgcacctttccagcctccagcatctaatcgtcgttctcgattgttctgatgcccactacaagggacgtgaaagctttggaagatgccattaggaacgtggccagcatccagactcgctgtcttactctcgaaattctaaggcgctatgaagatgaaatggtaaaggaagatgaagaggagcagctaaaaggcagtacagagggaggtggaactgaagagcatcatattcagcagccactgatcatagtcggaaaccagaagcgctggaagccagtgctattcgggaattcagacaaagtgcaagctagctaaacatttaatatatggtcctgttgagttagcgccgtacccatttctgctctgcgtttcttcatggtacatgatgtctgtgtctggggatcgtgtgcgtttgtaccatgggctcttacgcatgcttgttcatgtgcgagcgcgtcggagttagtaggcgtcatgtggacatgtgctttctgccttgggattgcgcggctcagtcgggaagcgcatgatggagtcgtagggcgcatggcgaggagagcgctcgatcgtgggatggcacgatcgccgagctatttaagttaataaatgcatcagaaaatgct

SEQ ID NO: 19976 - DNA, 2582 bp, Oryza sativa
  ref <308>: DATABASE ACCESSION NUMBER: AK070312
  ref <309>: DATABASE ENTRY DATE: 2001-12-06
gacactctcctcaccgatgatccatcgccgtcgccattgccagcgaccggcgcccgcgaggacctcgcgtcttggccgcataaagcggcggcagcagcgccccctggccctggctggtcgaggggagggcgcgagtttccgtggattccgcggctctaccgttcacagccgctcgccatgacgccatccatgatggcgcaagaacggggggagccgctcctgcagagcggcaatggcgccgccggcgggggagccaaggggtggccgccgccggcgctggccaggaccgtgctcaaggtcctcatgtgggcggtgttcctcacctgggccgccgcgatcttcttctacccgaccaagcccgcgcaggcggcgttcgagggttggatggcggccaccaagcagtccctctttggcatcaccgggagtattttcctcgcattcagcgcgccgattctgatcgtcgcggctctggcgtacgtctacatctccgccttcccgagtgaccatatccatgtggagaagaacaagctgaagacactgtgtttccggctctggactttccctgttcttgtggacgggcctttcggggttgtctccgcggtagaattcatcggaatcgtcctgtttatcgtctatgttgtctattcaatgacctattacgctgtggagagcgtgagtctcatctcaaaatttggccagatttcgcttacttacagcgagttgctattgtacattattggcctccggttcggatcgatcgggttgttttgcatggctttcctgttcctccctgtctcaaggggttcagttcttctccggcttattgatattccatttgagcatgctactagataccacgtctggctcggccatctcacaatggctctcttcacattacatggcctatgctatgtgatcgcatggtctctcgaggggaatctacttggagaattggctgcatggaaagaaatcggagtggcaaacttacccggtgtgatcagcttggcagccggcctgctaatgtgggtgacatcactccacccagtgaggaagacatacttcgagctcttcttctacacccaccagctctacataatcttcgtcgtgttcctggcatttcacgttggcgacttcatcttcagcttctcggccggacccatcttcctcttcatgctcgatcgcttcctgaggttctggcaatgcagggccaaggtggacatcatctcggcctcatgccgcccttgcggaaccgtggaactagtcttctcaaagccagcaagtctccggtacaatgctctcagcttcatcttcgttcaggtgagggagctgtcgttcttggagtggcacccgttcagtgtgtcttcgagccccatggatggaagataccacatgtcgatcctgatcaaggtgcttggatcatggactgaaaaactgaggggcatcatcactgatgcccaggaacagggcaggaatggctctgagtcagagaccggccggatcaccgcctgcgtggaagggccttacgggcatgaatcgccataccacctgatgtacgagaatctcatcctggtggccggaggcatcggcatatcaccgttcctggcgatcctgagtgacataatccataggatcgaggaaggcaaaccatgcatgcccaagaatgtgctggtgctgtggtcggtgaagaagtccaacgagctctcgctcctttctgccgtcgacgcgcagttcatcagctcgtctgtctctgacaagctacatctcgacatccaggccttcgtgacccaagaatcccaacctccattggaagaaggcattgttggggatgaccagaaggcgaccggcatgttcgtcaagaacgggacgaccatgtccgggctggtcggcaccgggaacaacttctgggcgggcatgtacttcgccgcgtccacgctgggcttcgtcctggcgtacgcgctggcgcaggcgtactacgtgcggcgcctcaacgtgttcgcgtggtggcacctgggcctcgtgttcgtgctgtgcatggccgccggcgtcgcgctccccggcggcctcgtcgtcctcctgtggcacctgtccgagaagcggaaggcggaggacgacaggtgggacgccgccgccaccgccgtcccgcgcgcacaggacggcgaggaggaggccgagcagacaacgaacggcgccgacgcggccgacggcggcgtcagcctcgccgcggtgaagacgacgcggtacgggtgccggccacagttcgaagcggagttcgcggcgttcgcggagaaggccggcggcggcgcggcggacgtgggcgtgctggtgtgcgggccgccggggctgcaggcgagcgtggcgagggagtgcaggtcgcacaacctcggccgccgcggcgggaggcgccgccgcgccggcgccgtcttccatttcaacagccacagcttcgacctgtagtctgtagaccagagctagtacgacactctgcgcaggtggcgaacatattaatttttaattgataatagtagttaatatgtactgtataaaataactaaagattaaaattatagccgaggccctgcacc

SEQ ID NO: 19977 - DNA, 3512 bp, Oryza sativa
  ref <308>: DATABASE ACCESSION NUMBER: AK070313
  ref <309>: DATABASE ENTRY DATE: 2001-12-06
gatacttaattaccatcaccactcccaccctgcttcactctgtgtccctgtgacagacaaaaaaaaaaacactgagggagttacagctgttgtggttctgactgatctcgagctcccttgaccaaagaatcccaagcaacggagaagcatatgctgctttgctttgtcagcttccttgggtatgtacatatggcacagctgaaacagcaagctccattccatagctaggtgtcccaaggtctatttgatctgcagttataaggacagttttggaggtagcagctacggcagattgtactgtcaagattccaaatgatgaaacaaacaggaggtacttgcatattctgatctagaatctctctcactgggtgtgtcggttgggcactcttcacccttgatggtgacatgctgatggatatatggagcagaaaaactgccttgaaggtgaaaagaagagctagctgaggactctgaggaaatgcagtggttggaggccttgaagtagaactgaccttttcttgagaggtgatagagaccttggaaccccaagaaggatttaagcaatgtatgcgttctccagaggcagctcccacacccagcattctccttgctcttgcagtccgtagacatttgaccgagtatggaagtgaagcctgtgcaggtggaatcaccagcagagaagcaaataggatcagtaggatagagatcagcggcactggttcttggcaacaactggtgtactatatacatggatgtgcaacccgcaagaaccatgcggaatctcccagatacactgtcatccctcatggggttcaacaagcacctcacgcctagttggattgaatcagtgtctcacatcattgatgggttgtcacctaccaagccacaaatgaaagtaatggttgagaaggatgaaaatatcagtgatgacaatacagaatcagaggctaaagttcaaaaaattcaagatgaactggtttcactgaatgctcaactaaagcaggtaacactgcagaggagagaggcactaaataactacttggatttgaaaggaaatataagggtgttttgccgtataaggccttttcatcatgaagaaagttacagttcaagaaatctgttcactctggatgagagcaatgtttttctgaaagttgctgaaaccaagagaaaacaatacaagtttgataaggttttcgatcaattctcaacacaaggtgatgtattttccgaagttgaaccagtggtaaaatctgctttagatggctacaatgtttgcatatttgcctacggtcaaacaggtagtggaaaaacttatacaatgtccattaccatatgaattaggaaggcaagcctacaaatttgggtgtcataccacgtgggattcaaacactgttcaaccaagcttcagaatgcaacaataggtttctgttcactttcagtatgcttgagatatatatggggaacatacgagatctactagccccaagaagcaagactaacgggattaagaatgtaccaagcctctccattaaatcagaccctgatggtggcattgagattgaagatctggtagcagttactgtgaatagttttcaagaagtgaaaagattgtatgaaatggggacccgtcttagatcaacagcttccactatggcaaattctacttcaagcagatctcactgtttgattcgcatctcattgacttccttgaatgcaactgagagaagaaaagcaacaagtaaattgtggatgattgatctaggtgggagtgaaagacttgtaaagacaaaagcaactgggaaaaggctcaaggaagggaaagccataaatttgtcgttgtcagccctaggcgatgtgattgacgcactacagactaaaaaaccccatgtcccttacagaaatagtaagcttacacaagtactgagagattctctaggatgtgaatccaaaacattgatgcttgtccatatcagcccagatgagggtgatttgtgtgagacaatttgcaccttgggttttgcaacaagagtgagaggtattcgcctggaaagtgaagaaccaccagagatgaaagcaaggaaggaaacattattaatagatttaggacagagggtcaatgatttggaacatgaatgtgaagatattagaagaaaaattaagaatctcgaggagagtatggagcatttgacaggacctcagccaactatttactctaattttgacatgtcacatctatccagtgaagaactgaaaacagatgtatcaagtaatgtgaggaattcaaagaatcgcagagaagcctcttccaggttaccaaggttcatgaagccaactgcttctagccagcacaggataggcttaaataatcgcactcccattattaacaggctaaaaccaccagtaccaccaaggaggcggccttcctcagtttatgctgagtctgtaatggtcccagtaaatgctgccccttggcaatcagaatgcagctccgaatgcagtatgtccttaacaagtgacatgaattggacaccaagcatacgagatggaactgaatgtagccaggatgcatcagaatacgagattaaacaggtgattttctcagaacatgagaaatcatcgcatgatcaagtgacctgctacacagattatccacttgcagaatctagagatatacagattaaaatcgaagagaagggaattgtagacattgacaattggctccaccaacaaatcgttgagaagactagcacatttcgaagcaaaatggtgcttgatattcccggagtaactgaagctgaaatccatgtttctagtattccttcaccaactactatggcatgcactaaagaagatagccaggtaaaggatgaagtaatgggcctaacccttcaatcctcaacagactatgtcgaggatataaagcaaagcaagactgataatcaattcacagcaaaagaattatgcactccaccatttaaagaatttagcagcaacaatgaagtgaagggacataaaaacgaacatcctgtgtaccatgggagacccagaaggtcactacaggaagaactggaaaattgcacgctagagaagccaaacatggactcaaaatctcacaggtcacatgatgataaacacaaaacagggaagttcacaaagttctttcaagctcttcaaacagcatggattggtgctcttctagcactgggaactgtaagcattggattagagcatggcttctttcagagtttgacactctaaagtacctagaatctcatcactttgagatatagtattgaattttaagagaaactactacaggaagtaatgctctcggtgtatattgtaccacgagcacacaatgaaatatgtccagccagtaccacaattgcaggtgaactgttgattgatgctaaaagagctcctttgatttctgatggattctttcagaaagccaaaaaaattggggtatttgagtaagaatgaaggaatgatcatacaagaaaattggt

SEQ ID NO: 19978 - DNA, 1359 bp, Oryza sativa
  ref <308>: DATABASE ACCESSION NUMBER: AK070314
  ref <309>: DATABASE ENTRY DATE: 2001-12-06
taccatgcctcccttcccttcccttcccccttggaaccaccaacgcatgcgaacgcccccgcgcgcgcgcgcccctccctccccaccattccttctcgccgctccctccgcaacccacccacccttcctcctcccttccccggttgcaggcgcggcgtcgatgcgatcctgccgcggcatcgcatccgctgcgtagctcggcggccggggggtggcgcgacttcttcctctttctcttttgctttcctggcttagctccgatcctgcgctgattcgatcatcctccgatttcggtggcttttttttttgcctggtgtttctgctcgaccatgctggcaggttcttcatctaagagggtgatgctgcttcagcaattggcagctagctaactctttagaccaaaagaagaattctgtggttatatgcaacagagaagcgcattcttgctttgatattcgccgttttaccgggtcggcagcgatcagggtgtggtgaccatggagaagtggtcggagggaagtataagctcgggaggaagattgggagtgggtcatttggggagctatatctcggtgttaatatacataatggggaggaagtgggaataaagctggtatgtcctgataaaatttattataatttatttacgggttgcatttgttatggcatttcccttgcctagatatcctttttttcttttcttttctttttttgaagttatgtataggttagagttgaaatgtttgctaaaaatatcggtttcttttttattccccctctatctctgatttgtgccaggaatctgtgagatcaaaacatccacagctgcattacgaatccaaagtttatatgcaatgcaaggcggaaatggtatcccacatatgaagtggtacggtgtcgctggggagcacaatgttatggtgattgatcttcttggcccaagtttggaggacttgttcaacagctgcaacaggaaattctctctcaaaaccgtccttatgcttgctgatcaaatagtaagttcaccaggctctaactatgaatgaatacaagatgctgcagtgctgggtgctcctagagttagttaggaagaaaatccacctatggagtttgatcacaactttcttttttttctctccaaatcctgtctggaacttgttcgcatattcttacccataacccatgcaacaaaaatgttcgagataatgatcatgcaaaatacacaaactccaccaaaggctaacgtgaggagatcgtgatcctgaacatgattaggatgattatctaattctcttcagaaaaatgcaaagttaagtcaggcctttaagaacaagggaggacatttaaatatgtgaagcg

SEQ ID NO: 19979 - DNA, 621 bp, Oryza sativa
  ref <308>: DATABASE ACCESSION NUMBER: AK070315
  ref <309>: DATABASE ENTRY DATE: 2001-12-06
gaaagaaatcgcttcttcttccgcctccgcctcccatggcagctcccagctcgtgggacacctccttccacgaagcaaccacagcaaggcaatagcgccacccaccgctcgcatccacagctgctgattcgtaggaggagcaggccagggagggattcgttgattttatttggcagggaaggagatccgagaggaagaaggggaatatagatcgatggggaagtacgtggagctgctcgacatgggggtgcgcatcgccgcgcggttccactcccactgcccgcagacggcgaggatgtactaccacccgccgccgtcctcctcctcgtcgccgtcttcctccgccgccgccggttcggccgacggcggcggcggcggctgcgcgggcttcgccgcgaagaggatgccccgggccgccgccgacaccgcggagatcatcctctacgccgtcgtctagagttagcctctagactctcgatccagacgcttcacgcggaaatggaggaatgtatttttcttttgtttttctttaaagaggaaaaaaaacaaagtggacttggagattggttggtttattgatggagtgaaatgaaatgaatggaatgatttgatatttacgtg

SEQ ID NO: 19980 - DNA, 2539 bp, Oryza sativa
  ref <308>: DATABASE ACCESSION NUMBER: AK070316
  ref <309>: DATABASE ENTRY DATE: 2001-12-06
gatgcacctcggccgcatcgcgatccaactccacgcctccgcgccgcttctcttcagccgccgtgcaactgcaactgcacttgtcctcccacattcgcggcgggccgccttcgccatggccgccacgccgccggtggccaggaaggtgccgcgggaactcgcccagcacggcgacgtccgcgtggacaactactactggctccgcgacgactcccgctcccaccccgacgtcctcgcccacctccgtgccgagaatctctacaccgccaccatcatgtctgatgtcaagaacctcgaggatgaaatatatgctgaaattagagcaagaatcaaggaagatgatataggagcgcctcttcgcaaaggccagtattactactataacagaacactgactggcaaggagtatgtgcaacactgcaggcgtctcgtgccaactgatgctcctgttacagtctatgatgtcatgcccacaggacccaatgctcctcatgagcatattattttggatgagaatgtaaaggccgagggccatgactactatagcattggggctttcaaggtcagtcctaatggtaagctagttgcttatgcacaagacactaaaggtgatgaaatttacactgtttatgttattgatgcggagagtggaaaatttgttggccaaccacttgaaggaattacttctgacattgagtgggctggtgatgaccaccttgtttacataacaatggacaccattctccgcccagataaagtatggttgcacatgttagagtctaatcagtcagatgatatttgtttgtatcatgaaaaagatgacatgttttcacttggcctccaaacttctgaaagcaagcagtatttgtttgttgaatctggaagcaaaaacacaagctttatattctacttggatatatccaaacaaagcaaggagcttgtggttttaactccttgtgtttatggtattgatacaacagccagtcatcgtggaaaccatttctatattaagaggagaagtgaggaattctacaactctgagttgattgcttgcccattggataatgtagctgagaccactgtcttgctaccacacagagaaagtgtgaaaatacagagtttccagctctttgagaatcatattgctgtatatgaacgtcaaaatggtctaccgaaagttactgcgtatcgcctaccagccactggagagccaattgggcaacttcagggaggtcgggagattgattttgttgatccagcatatgacgtggaacctgagcaatcacagtttggttcatctgttgttcggttccattatagctcaatgaggaccccaccctcggttttcgactatgacatggattcaggagtgtctgtgctgaagaagattgatactgttttaggtggatttgatgcatcaaactatgtaacagaaagaaaatgggctgccgcttctgatggcactcaaatacccatgaccattctatacagaaaagatcgggtgaatcttgatggctcagacccaatgctgctatatggctatggctcctacgagatatgtatagatccgagttttgggagatcgagattctctctagttgataggggctttatatatgtgatagctcatattcgtggaggtggtgaaatgggacgtaagtggtatgtggatgggaagctgttgaataagagaaacacattcactgatttcattgcttgtgctgagcacttgatagaaaacaagtactgttccaaggaaaagctttgcatcaacggaagaagtgcaggtggcctattgatgggtgctgtcctaaatatgaggcctgatttattcaaggcagctgttgctggagtcccttttgttgatgttcttaccactatgcttgatccaactatcccgttgactacatcggagtgggaggagtggggtgatccaaggaaagaagaatactactactatatgaaatcatattctcccgttgataacttaaaagcacaagggtaccctaacatccttgtcactgctggcttaaatgatcctcgtgtgatgtactcggaaccggcgaaatatgtcgcaaagctaagggaactgaaaacggatgacaatcttctgttattcaagtgcgaacttggtgctgggcacttctcaaaatcgggaaggtttgagaaactacgagaagatgcgtttacttatgcgtttatcctcaaggcactgggaatggctccaaaggcagcgttgtaaaagaaagcccttctgttccgggttaagatggtggcggttctcaagcattgattggctgattgtagtaaaacttaacttgagtcgatcggttgtgttgtgttgtgttgacatattcgactaaggccctgtttagatttcaacttttttctttaaacttccaactttccgtcacatcgaacttttctacacacacaaactttcaacttttctgtcacatcgtttcaatttcttcaaacttacaattttggcgtggaactaaacacagcctaattgatgcaagtcagtcagacattagct

SEQ ID NO: 19981 - DNA, 1348 bp, Oryza sativa
  ref <308>: DATABASE ACCESSION NUMBER: AK070317
  ref <309>: DATABASE ENTRY DATE: 2001-12-06
gagaagatcgatgatgaatggaatgcataatctgtgcatactagctagctagctaataacacataatattcctagctagctaattggttgctgctgattgcatatatatatgtgtatgtaattaggaagctgagctgaggagaggagaggagaggagagtacatacatgatggccgcatctgcaggtccaggcgtcgtggtggtggcgctggtggtggtggtgtacctcatcttgttgatccggccggctgcgtcatttcgcgtcaacgtcggcgtgggtatcggcggcggcatcggcatcggcaaccagaatcagaaccaggaccagaaccagaaccagaatcagaagccgtactatgatgatagcaataacaacaacaattacgatgagggcgagggggagggcggcgatgatcaggaggagggtccggaggcggcggcgccggtggggccggggcagtcgttcaccggcgggcgcgggacgtacaagtacatggcgcacgagttcctggatgctcacaacaaggtgcgcgcccagtacgggctgcagccgctgaagtggagcaacaagctggccaggtacgcgcggcggtggtcggcggcgaggcggttcgactgcgtgatgatgcactcgccggagtcgccgtacggggagaacgtgttctgggggaccgggtggggctggcgcgccacggacgccgtcaagagctgggccggcgagtcctccgtctacgactggcgcgggcagagctgcaacccggggcagatgtgcggccacttcacccagatcgtctggaacgacaccaagctcgtcggctgcggccgctccgagtgcgtcgccggcggcgtcttcatcacctgctcctacgacccgccgggcaactggaagggagagaagtcatgctgctgctgctgctactggaggattggacgcctatattcagctggatcagttgctactgtccggcgatccatacccgtaggggttcttgctcgcccaattccacagttccttctcagctttggcagtttgagcgtaaacgatctcggcatctccaggccttcgtccagcaaatacaagcgggattttctgttcaagttggcattattattgttaggacgacatcatatgatcaacaaaagcaaaggacaagttgggaattaatgattattatagtaattaagaggaagtacacttgtcctgttagtttacctttccagaagctttctcgaatgctgcaaccatttccagcacagatgtcccctttccagtgcccagattgtacacctcacatcctggaagaatatagccacataaattattaatttatgagatgatgatgttttc

SEQ ID NO: 19982 - DNA, 1167 bp, Oryza sativa
  ref <308>: DATABASE ACCESSION NUMBER: AK070318
  ref <309>: DATABASE ENTRY DATE: 2001-12-06
gtccctctccctccgctcgtccctgcacacagaatcctcctcctcttcctccgcggcggcgccgccgccgccgagttctccattgatccggcgatggccggcaaatccaatcccgtctccaacaatcaggaataattaagaccctgtcgttgtcgggtctgatcgatttggagaggagatggacgccggtgtgggtctccgggcgaagcccggcgcctgggccggactcggaaacccacgccgctcttccacggcgagggttccggtgaggttcgcggtggagaagttcgctcagccgttggttttgggctccgatcgccggagctgcggtgccaaactgaaggtttcgtgttccaggaaaccggcaggtattgacaaaacctattactctgctgatgaagctcttgttctaaagcaaaaagcagaggacgtggtcccttatttgaatgaccggtgtatttacttagttggaatgatgggttctggcaaaactacagttgggaagatattagctgaagtattaggctattctttctttgacagcgataagttggttgagaaggcagttggcatatcatctgttgctgaaatctttcagctccatagtgaagcattcttcagagataatgaggagttacatgaagaaagggtcaacaatctggttagatgttccattggatgcacttgcaagacgaattgctgcagtaggaactgcttctcggcccctcttgcatcaagaatctggtgatccttatgcaaaggcttatgcaaaactgactgcactttttgaacaaagaatggactcatatgctaatgctgatgccagggtttcactcgaacatattgcagtgaaacaaggacatagtaatgtgacgacacttacaccaagtgccattgctattgaggcattgctaaagatggagagctttcttactgagaaggcaatgatcagaaactaaccacttttgggtggttaaaagcacatcaacaaacaaaatctcttgtttgttctgttgtatttatcgcatatacctaaggcgtgtttcttagtatagcatgaacttgttagtcacccctatgaaggagggtgatttgagtttgaacttgtgtaaatggataagtaatagctttcaattgaaagaaaagtttgtgttgtgttttgtgccg

SEQ ID NO: 19983 - DNA, 1140 bp, Oryza sativa
  ref <308>: DATABASE ACCESSION NUMBER: AK070319
  ref <309>: DATABASE ENTRY DATE: 2001-12-06
ggggcacgcagcgcatcacgaagcccccgcgacgatccatccatcgatcgcgacgccgagggagcgagcagcgccggcggcaactccggtagctcgctcgcttccccggcccggccggaagatatggccgatcacgccgtggtggtggacgacggcggttcacgaaggatgaggccggcgtccctgtcgtcgtcgtcggacgccgaagacgacgacgccggcagcaagaagcagttcctgcgggcggcgggacgagcgctggaggcggcgccgcccgtgcggcggaggccggggaggccgtcgcggccggtgaggatgttccacaccatgtgccggtcgctcccggtgctgacgccggggtgcgggcggctgcagccggccggggcggcgtgccggatcgcggcgccgtcgcggctgtccccttccgcctccctgatgtcgaagctcgtggcgtcggcctccaccggcgccgccggggcgtcgcgccggcgcatgacggggacgctgttcggctaccgcgacgcccgcatcgcgctgtccctgcaggacaacccgcggtgccagccgacgctggtggtggagctggcgctcccgacgcacgcgctgctccgcgacctcggcaccaccgccggcgcgcgcatcgtgctggagagcgagaagcgcgcggcggacggcggcgacggcgccggcgccggcgccagctcgaggcgcgagcgcgagcagcaggacgggtgggtgctcgaggagtccatgtggaccatgtcctgcaacggcaagaaggtggggtacgcggtgcggcgagacccgaccgacgacgacatcgccgtgctggagactctgtgggcggtgtccatgggcggcggcgtgctccccgggatctcggacatggacgggaaagacggcgagatggcgtacatgcgtgggagcttcgagcacatcatcggctccaggaactcggagtcgctctacatgatcagcccgcacggcggcgactgcccggagctcgccgtgttcttcgtgaggctatgaaattaatacaccacgcgcgtgcatggccatctctgtttatttttttaaaatctcttgctacctccggccacaaatacacatttgaaaattttaaactgttaattaacatct

SEQ ID NO: 19984 - DNA, 1188 bp, Oryza sativa
  ref <308>: DATABASE ACCESSION NUMBER: AK070320
  ref <309>: DATABASE ENTRY DATE: 2001-12-06
gaatcccaaagcaaagagaagcgcaaagatcatctctttgcttctcgccttctcctcctcctcctcttctccctcctcgtgctccgcccgatccgtccgccgcctccagatccgcgcccatggcgtcgcgcaggcgaatgctcctcaaggtcatcatcctcggtgacagcggggtcgggaagacgtctctgatgaaccagtacgtgaacaagaagttcagcaatcagtacaaagcgacgatcggcgcggatttcctgaccaaggaggtgcagatcgacgaccggctcttcacattgcagatttgggacacagcgggacaggagcgatttcagagtcttggtgtggcattttaccggggagctgactgctgtgttcttgtatatgatgtcaatgttaccaagtcatttgaaaggctcaacagctggcgtgaggaattcctaattcaagctagcccatcagatccagagaatttcccttttgttgtacttggaaacaaaattgatgttgatggtggtaatagccggactgtttctgagaagaaagctaaagcttggtgtgcttctaagggaaacatcccttattttgagacatctgctaaagaaggcttcaacgtggaggctgcttttgagtgtatagcaaggaatgctatcaagaatgaaccggaagaggagatatatcttcctgatacaattgatgttggaggtgctggaaggcaacagcgctcgtcaggctgtgaatgctagaagatatggcaccagcgatatcgccagttgattctaccggatcggtgtagatcatcatcctcacctcttccactgtgtgatatctttagtttgaaagcctctatctatgtccaatgctacatattgtttttttagtgctccaacataattggagaagattcatttgtaactgtttttactcctacctttgtatctgctagatgctagagttgggatacctttttagtctttctacccttctgtttgattgctgcagtgcacatatcttttctgtttgattgcttcagtgcatatctggagagaccaaaacatgttctgtgaaagcttgtaaattgacagaacaacctatcaatctggttctgttctctgcccattttgatggtagagcgtgccagatctgtatctatatggcttgctacttgctaatacaatccttccattatgt

SEQ ID NO: 19985 - DNA, 3326 bp, Oryza sativa
  ref <308>: DATABASE ACCESSION NUMBER: AK099134
  ref <309>: DATABASE ENTRY DATE: 2002-08-28
gaggagtcggaggcagcggcgcgggcgaggcgaggtgagagcgagcgatagaaatacgagagcgggaggagaggcgaggagagagagacacagataagctcagccctaaccctagctccccgcctcgccgccgccgccgccgccgccgccgcaccgctccccggggagcgggacgtcgccgccgcggcgcctaggtgtggttgactcagcatatttgttccgtctgccagccgccgcccctagggatcgatggctgttgtcgatcctgttatgtttgacaacgacgacgaggaaggtccgatctccttcaagaggtcgagcacctctgtgaagaacaggcccacccccacaaagcaggagggctcatcagggaatgccggacctattaggagccctaaggctgttgcttccaatcaacagaagaatgggctgactggtgtttcgaggcctttgcaacagaggccgcagtcaagcagtccaaaccctcgacctttgggatcaggtcagccgaacagttccaaagaacatagtagccataatagtaactcagtggataagagtaaattgaaaagacctttcgtggaagataagtcggatgactcagaagatgaccataagccaatcggattaaggagaaaggtcgaggatagaaatttgaagaaacctgctgtaggaagtgggacagcaaatgattcagatgatgataaaccattgagtctcaagataaactcaacaaaaacgccttcgagtagtgcaaataaggctattgtactgaaaactacacctaaaattgagcaacctggtgatgattcagaggacgataaaccactggccagcaggttgccaactaatgctgctctgaaaaggggaggtaatgtttctgatgattcagaggatgagaagccattggctgcccgattttcgaaagttactggcaatgcatctgcaagtatctcaagttcaaaggacaaggtcctgtctgcaagcataaaagcaagttcttccagcaagatgtctaacaatgacgcgagcacatcacgaaattcaattaaaaggccaattgacaataataatcaaacaagttcagctctcaagaaggcgaggccttcagatgtttctgcgtctgcaagtgtcaaaagagaacccaaggcggatgacaatgacaatgtacctctttcacaaagactgaaaatgggtgagtcttcaaaaagcaagccacctgcaaagaatatcgtaaagaagagtccttcatctttaaagaaggacaacaagaaaatgaaaatgaaaatgaaaacaaagaaaacaatgaaaaattctcagttctcaaagacaatgaaggtccctcctggatctggtggtggacagaaatggactaccttggtgcacagtggtgttattttcccccctccatacaagcctcatggtgtcaagatgctttacaacgggcaacctgttgatctgacgccagaacaagaagaggttgccaccatgtttgctgtgatgaaagacactgattatgcatccaagcaaacattcattgacaacttcttcactgattggagaaaaattcttggtaaaaaccatgtcatcaagaaatttgagctttgtgatttcaccccgatctatgaatggcacctaagagagaaggagaagaagaagcagatgacatctgaggagaagaaagcattgaaggaagagaaattgaaacaagaggagaagtacatgtgggctattgtagatggtgttaaagagaaggttggcaatttcagagtagaaccacctggcttgttcagggggcgcggagagcatccgaagatgggaaaactgaagcgccgcattaaaccaagcgatattacaataaatatcggaaaaggggctccgatccccgaatgtcccatacctggagaaagttggaaagaagtcaaacacgacaacacagttacatggttggccttttggaatgatccaataagccaaaaagatttcaagtatgttttcttggcagcagcagtgcattaaagggccaaagtgacaaagagaagtatgagaagtctcgaaaattgaagcatcacgtacacaaaattcgtgacacttacacaaaggatttcagaagcaaagataagacaaagaaacaaattgcagtggcaacataccttatagataagttagcccttagggcaggcaatgagaaggatgaagatgaggctgaaactgttggttgctgtacactgaaggttgataatgttacttgtgttcctccaaataaactgcagttcgacttccttggtaaagattctataagatacttcaatactgtagaggttgaactgcttgtatacaaggcaattgaggaattccgtgctggcaagaaaccaggacaagatctctttgacaaactcgatacaaccaggctaaatgctcatctaaaggacttgatgcctgggcttaccgcaaaagtgttccgtacatataatgcttcaatcaccttggatgatattttgcacaaagaaacagaagatggaactcttcttgaaaaaattgcggtttatcaacgagccaacaaagaggttgctataatctgtaaccatcagcgtagtgtctcaaaatcacatgattcccagatgactagattgaatgagaagattgatgaattgaaggcccaaagggatgaattgaaggcagacttgagcaaagtaaggaaaggaaagaatctaggcaatgacaaagatgggaaaccaaaaagaaatttggcccctgaagcgtttgaaaagaagatatctcagattgaaaccaagatagagaagatggagatggataagaagattaaagaggatttaaagacagtggcactaggaacttcaaagatcaattaccttgatcccagaattactgttgcatggtgcaaacgccatgaagtacccatcgagaagattttcaacaaatcactcattgcgaaattttcgtgggcaatggacgtcgacccggatttcagattttaagagggtacaagagcattggctactggtcatccggcctgtagtaaagttgatccagcttccagtccttgtcccggacactaatttgcagctaggaaaggaagagctcggtgtttgtttttgaagtcccctgctcctggaaagaaggaagcacccggcattctcattgtaggctttttttttcttttactacttgttggtgcctttgccatcggtcctcaagttctgtatgcatttgggctgaggaattttagctcgctgagaacgaatggacattcattttataccgaattaatctcaaatataccatgaggtttcgtttggttgcgg

SEQ ID NO: 19986 - DNA, 705 bp, Oryza sativa
  ref <308>: DATABASE ACCESSION NUMBER: AK070321
  ref <309>: DATABASE ENTRY DATE: 2001-12-06
ggttccgcggccggcggcggcccaccttcagcagatgcagcagctcgcacgcccttgtggtccggtcgcggccgcgcgcggcgcaagggcggcgtccggagaccacccgatccgcagcttcaccgcccaaaaccgatgctccgcccgcctccacgtccgccactcgacaggtaagtcccgtagtagaggatggggaaaagtggctacttcgcgctaccgcttctgttcttccaactgaacaatctatattgccaagtgttttgggtgataatcgtccgatctgggaaatgctactagtagtacatgatctattattgttcattttattgcacacagccaccgtgtggacgtactgtatattagttgctgcgtcagtcaaggttgctgtagacgtagacaagtagtattgggcattttctttccaagatatcgagggattgtagtacttattatcttgttaaaatgttggtttggttcatccatgtgtttgggatggacaatttctcctctctgtcctattacacgattgagcccagaactgctttggacattcaatttgtggtggtgttgcgtctattagttatgtagcacagaagctggtcttaaatctgcccgtagaaataagtgaaataggtgaaaatttaatacatgtaaaacaagtaattataaaattatctctcaatatcagcattacacttttcacgg

SEQ ID NO: 19987 - DNA, 1525 bp, Oryza sativa
  ref <308>: DATABASE ACCESSION NUMBER: AK070322
  ref <309>: DATABASE ENTRY DATE: 2001-12-06
gaccgatccgcacagccggagcccgggagaagtcgagaagatcatatacccacaccttactcgcgccgcgcgcgccgccgtcgacggcagcctcctcctcctcttcttcccccgtgccggcgttcgcgttgcctcctcgatcgcgccgcgccgcgccgcgcgcactccaggcgggcgagctggtttggagagggggcgagacgacctgactccgccctcgattggaatcgaatccaagattgatggcgatggagggaccaatcctgtgtcgtgcagtgatgcaagctaagctacctgtcacgatgatcagcaactcactgaccaagtctgggcagcttgggaccgcattcctgggttgtgtgtgtaaatacaggaatatcactagactcatttccccaatctatcagccggcacaaaagaactttgctactgtttgcggtagcttcagctcgtcgtccgatggtaatggatatatggctggaaactttagtgagagtgatgaagattatgttaattctactgtgctagaagcagttgaggtgagaagtggggcagagggatatgtaatcaagatgcgagatgggaaaaacttgagatgtgtgcacaataattctcaagggagaaatattccagaaagcgcaccacaacctgctattgttttgaggattgaagatggaagtgaaactttacttccaatcattgttttggaaatgccaagcgtacttctgatggctgctattcggaatgtccacattgcaagaccaaccatatatcaagttgtgaaggagatgattgataagatgggttatgaggtaaaactggttcggataaataaaagaattcaagaagcatactgtgctgaactgtttctgacgaaggtaggtgaccatacagaaagtatcacctttgatctaagaccttcagatgccataaacattgctgttcgctgcaaggttcctatacaagtccatagaagccttgcatacagtgatggcataagatcagtcgagccagcaagaatggcgatagcagccggcatgtctgacgggttgttgtttacaaaacttgacagacctgatgggcagccatgtgtcgaggctcaagagtttggattgatccggaacatgctcattgcagctgttgaagagagatacaaagatgctgcaacgtggagggacaaactgatgctgctgaggtctaagcggaaaaactgggcctgaaagcgtggctcgtctcaatggtgtaaataaagacgaagcactgttgaatcccagaatgcattccagatgactgatactgtctatgtaattagatgtatatattatatggaactaagaactggattatgtgaattccgactgtttcagtctttcggagtaaagaataatctgtggaaaatctctgcatgttcttagttggcaagctcacctccattttcacaagtctactattccatgaaaataatatttgccagctcaatgtcctctttcggacttatgttaaacatgcacaatgttagtgttcc

SEQ ID NO: 19988 - DNA, 1922 bp, Oryza sativa
  ref <308>: DATABASE ACCESSION NUMBER: AK070323
  ref <309>: DATABASE ENTRY DATE: 2001-12-06
ttgggagaaaaagggaaaaaaaaatctgcagcctcgcagcgcctaagtcctaacgaacgcgacgcgacgcgcaccggggcactctccgccactactcgccttcgtcgtcgtcgtcgtcttcgcgggctcggcggcgaaccggaggcggcgggttggggttgggaggaggaggagggggttcggcgatggggaggatctcgaggctgctcctgctgctggcggcggcggtggtgctggtgatcgcgacgggagtggcggcgcaggaggaggcggcggaggcggtggtggaggtggaggaggggatcgtggagagggccaaggaggaggcggaggcggtggcgctcagggcggagctgcagcagctgagggataagatctccggcctagaatcaggaatctcagaacgatccaaggaactgaaggctaaggatgatagcatagcaaagttggagaagctcatcgaggagaagtcacagaagattgcttctctgcagagcgagattacttccctccaggcaaaggggtctgtggctgctgaggagcaggctggcaaggccaacgctcgggctgttgagcttgagaagcagattgacgagctcaagaaggatgttgaagcacaaagtgtcaagaaagctactttggagaacagagctaatgatgcagagaagagggtgcaagagttgaatgcaaagattgacgcactccaaaagacaaatgatgagcaaaagcgcaagcttcaaagcacagaacgtgctctgaaagttgccgaggaggaactgatgaggctgcatttggaagcaacaactaagtcaaaacagctgacagaggttcatggagcatggttgccaccttggttagctgcgcactctgctcattatatggaggtgatctctggtcactggaatgaacatggaaaacctgctatcaacagttttctgcagaaggcatcagaaaaatcagcacaggcaaaaaaatgggctgagccacatgtggagactgctaaaatgaaatgggttccagtgaaggaaaaattggttgtcctcaagaaaaacacagaaccttatgtacaaaaggtctcatcaaaatccgtggaggtctatgaggcatcaagggatgctgttaaacctcatgttgcaaaggttaaagagtttgctgatccctacttccaggaagccaagaagttctccaaaccctacattgatcaagttgctgaggttacaaagccacatgttgagaaagttagaactactcttaagccgtatactaaaagagcagttcgtgtgtatgggtcatttcttgaatcagcaaccacataccatcggcaggcgcaatcaaccatcttagattacctacaccaacatgaggtatccaaatcacttgcgacgaaggagttggtttggttcctggcttctgctttgctggctatccctgtctatattatatacaggcttctaatggaagcattctgtaagaagccgaagagaccacctcatggcggtaaccacggccataggagacacaagcgccggcatgctgataagtaggcacttgtgggatacattgggactcacccgctatttagggttgcagatcttggagcagaatcagcaatggtggaaggatatatttgggtcatgggcaaccctgaaaagtgctgtataccaccatagttttcttctcttttttagttttcttatttctcccccggtgtatctttgctatgaacttgtgtcgcagcggccttttatatctgcattttgctgaggtttacggggaaacctctgcatttcagcgtttgttttgttggtattttatttgttattgtttcctgtaactttgttaatgcgtgcatgatatctggttttttgttcgtgaacatagatacacttggggctatactaatatatagtttccgtccagcc

SEQ ID NO: 19989 - DNA, 1057 bp, Oryza sativa
  ref <308>: DATABASE ACCESSION NUMBER: AK070324
  ref <309>: DATABASE ENTRY DATE: 2001-12-06
tgggagctcgagcaacaaccacccacgcacatcaaggagtcatctcaccactcaacgacagcctcgcacaagagcagggaggaattttcggttgttcctcgtcccaaggatcaatagatggagaaggcagcgtgcaacgagcatgtgatcgggatcccagtgagcaacagggctttcggcatcgaggagccggatttcccaagcgaaggagcagccgcctaccacgccgaggcgaaaagctctgcaaccgcgcgtacgagctccagatttggcaggacaggggacaggctcgctcaaggcatcaaagaacatgtgactctaggaccaaaactgtacgagaccatgaaaggcaagctgacgctgggcgcgagaatcctccaggcaggcggcgtggagaaggtcttccgccggtggttcgccgtcggcaagggcgagaagctcctgagggcctcccagtgctacctgtccaccacggccggcccgatcgccggcatgctcttcatatcgacggagaggatcgcgttccggagcgaccggtcgctggcgctgaccaccccgagcggcgacacggtgcgtgtgccgtacaaggtggccatccctctgaggagggtgaagacggccaagccgagcgagaacaagcaccggccggagcagaagtacgtccaggtggtgaccgacgacggcttcgagttctggttcatgggattcgtcagcttccaggtgaccctgaagaacctggagctggccgtcgcgcaggcgcagtgatcgatcgatctctgatgaaacaaacgtcgaagttgggtcgtcggtttcttggtcgtgtgccttgtgtgtggtctggttaatctgttgtgcatatgtggtagcgtcgtaggtgtttgtggtggattgcttggcgtttttggctttggagcaagtccggtacacatggtaggagaaattttagtgcatcaaatttcttgattggtgttggagaaaatagtgccacggcaaaagtgccatcatatacatgtggtatgtacaagatcaatgagaaatccaaaaatgtttgttcaac

SEQ ID NO: 19990 - DNA, 3327 bp, Oryza sativa
  ref <308>: DATABASE ACCESSION NUMBER: AK070325
  ref <309>: DATABASE ENTRY DATE: 2001-12-06
gaggagtcggaggcagcggcgcgggcgaggcgaggtgagagcgagcgatagaaatacgagagcgggaggagaggcgaggagagagagacacagataagctcagccctaaccctagctccccgcctcgccgccgccgccgccgccgccgccgcaccgctccccggggagcgggacgtcgccgccgcggcgcctaggtgtggttgactcagcatatttgttccgtctgccagccgccgcccctagggatcgatggctgttgtcgatcctgttatgtttgacaacgacgacgaggaaggtccgatctccttcaagaggtcgagcacctctgtgaagaacaggcccacccccacaaagcaggagggctcatcagggaatgccggacctattaggagccctaaggctgttgcttccaatcaacagaagaatgggctgactggtgtttcgaggcctttgcaacagaggccgcagtcaagcagtccaaaccctcgacctttgggatcaggtcagccgaacagttccaaagaacatagtagccataatagtaactcagtggataagagtaaattgaaaagacctttcgtggaagataagtcggatgactcagaagatgaccataagccaatcggattaaggagaaaggtcgaggatagaaatttgaagaaacctgctgtaggaagtgggacagcaaatgattcagatgatgataaaccattgagtctcaagataaactcaacaaaaacgccttcgagtagtgcaaataaggctattgtactgaaaactacacctaaaattgagcaacctggtgatgattcagaggacgataaaccactggccagcaggttgccaactaatgctgctctgaaaaggggaggtaatgtttctgatgattcagaggatgagaagccattggctgcccgattttcgaaagttactggcaatgcatctgcaagtatctcaagttcaaaggacaaggtcctgtctgcaagtataaaagcaagttcttccagcaagatgtctaacaatgacgcgagcacatcacgaaattcaattaaaaggccaattgacaataataatcaaacaagttcagctctcaagaaggcgaggccttcagatgtttctgcgtctgcaagtgtcaaaagagaacccaaggcggatgacaatgacaatgtacctctttcacaaagactgaaaatgggtgagtcttcaaaaagcaagccacctgcaaagaatatcgtaaagaagagtccttcatctttaaagaaggacaacaagaaaatgaaaatgaaaatgaaaacaaagaaaacaatgaaaaattctcagttctcaaagacaatgaaggtccctcctggatctggtggtggacagaaatggactaccttggtgcacagtggtgttattttcccccctccatacaagcctcatggtgtcaagatgctttacaacgggcaacctgttgatctgacgccagaacaagaagaggttgccaccatgtttgctgtgatgaaagacactgattatgcatccaagcaaacattcattgacaacttcttcactgattggagaaaaattcttggtaaaaaccatgtcatcaagaaatttgagctttgtgatttcaccccgatctatgaatggcacctaagagagaaggagaagaagaagcagatgacatctgaggagaagaaagcattgaaggaagagaaattgaaacaagaggagaagtacatgtgggctattgtagatggtgttaaagagaaggttggcaatttcagagtagaaccacctggcttgttcagggggcgcggagagcatccgaagatgggaaaactgaagcgccgcattaaaccaagcgatattacaataaatatcggaaaaggggctccgatccccgaatgtcccatacctggagaaagttggaaagaagtcaaacacgacaacacagttacatggttggccttttggaatgatccaataagccaaaaagatttcaagtatgttttcttggcagcaagcagtgcattaaagggccaaagtgacaaagagaagtatgagaagtctcgaaaattgaagcatcacgtacacaaaattcgtgacacttacacaaaggatttcagaagcaaagataagacaaagaaacaaattgcagtggcaacataccttatagataagttagcccttagggcaggcaatgagaaggatgaagatgaggctgaaactgttggttgctgtacactgaaggttgataatgttacttgtgttcctccaaataaactgcagttcgacttccttggtaaagattctataagatacttcaatactgtagaggttgaactgcttgtatacaaggcaattgaggaattccgtgctggcaagaaaccaggacaagatctctttgacaaactcgatacaaccaggctaaatgctcatctaaaggacttgatgcctgggcttaccgcaaaagtgttccgtacatataatgcttcaatcaccttggatgatattttgcacaaagaaacagaagatggaactcttcttgaaaaaattgcggtttatcaacgagccaacaaagaggttgctataatctgtaaccatcagcgtagtgtctcaaaatcacatgattcccagatgactagattgaatgagaagattgatgaattgaaggcccaaagggatgaattgaaggcagacttgagcaaagtaaggaaaggaaagaatctaggcaatgacaaagatgggaaaccaaaaagaaatttggcccctgaagcgtttgaaaagaagatatctcagattgaaaccaagatagagaagatggagatggataagaagattaaagaggatttaaagacagtggcactaggaacttcaaagatcaattaccttgatcccagaattactgttgcatggtgcaaacgccatgaagtacccatcgagaagattttcaacaaatcactcattgcgaaattttcgtgggcaatggacgtcgacccggatttcagattttaagagggtacaagagcattggctactggtcatccggcctgtagtaaagttgatccagcttccagtccttgtcccggacactaatttgcagctaggaaaggaagagctcggtgtttgtttttgaagtcccctgctcctggaaggaaggaagcacccggcattctcattgtaggctttttttttcttttactacttgttggtgcctttgccatcggtcctcaagttctgtatgcatttgggctgaggaattttagctcgctgagaacgaatggacattcattttataccgaattaatctcaaatataccatgaggtttcgtttggttgcgg

SEQ ID NO: 19991 - DNA, 1026 bp, Oryza sativa
  ref <308>: DATABASE ACCESSION NUMBER: AK070326
  ref <309>: DATABASE ENTRY DATE: 2001-12-06
gattcacattcacattcccaaacggccacctcactctccctctctctatctctctcttcacatttccattccaactcaatttcctcctctcttctcctctcctcttctcacacgaagccaagaaagccaagaaatccatccatccatagcaagggagctagctcgccggcggcgatgggcaaggactgcggcaaccacggcgacgacgacatccggcaggcgtgccggcggctgctgacgatcctcttcggcctcgccctgatcgtggccatcatcgcgctcatcgtctacctcgtgctccgccccacccaccctcgcttcttcctccaggacgccacgctccgccagctcgacctctccaattcctccacctccggcgtcctctccaccgccctccaggtcaccgtcgcctcccgcaaccccaatgaccgcgtcggcgtctactacgaccgcctcgacgtctacgcctcctacaagtaccagcagatcacgctcgccgcctcgctcccgccggtgtaccagggccacggcgacgtcgacgtctggtcgccggtgctctccggcccggacgtccccttcgcgccctacctcggcgacgccctcgccaaggacgtcgcggcggagtacctcatcctccaggtcaagatcgacggccgcgtccggtggaaggtcggcagctggatctccggccactaccacctcttcgtcacctgcccggccttcttcatcgcctccggcggcaacggctaccccggcgccaatggcctcaagttccagaccgccacctactgccgcgtcgaggtctagctgtctcgtcttctccggctccggcgacggcgaggtgtgcataaatgtcggtaattactgtagcgttgaggtggggggtatagaggtaaatttagcgtgggttaatcaaagtatattttgtgtttaagcgttgttaagctttcagttccacgtttaattgttaataaaaggatattataactatggttaaaaaaaaaggaactcttctttttggagatc

SEQ ID NO: 19992 - DNA, 559 bp, Oryza sativa
  ref <308>: DATABASE ACCESSION NUMBER: AK070327
  ref <309>: DATABASE ENTRY DATE: 2001-12-06
gtttgcttccgcttctgcatctgcttcttgatgcgaggagtcatcttgctgcgttacgaggaggacgccatggccgggcacaggtccacggcggcggcgacgggagggagattgtacggacaggtgggagtgaagcggagagtggtggaggagacggcggcggcggtggaagtaggcggaggaggaggagggtacttgggggtggaggcggcggtgctgctcggggtggtgacggcgacgctgctggtgctgccgctgctgctgccgccgctgccgccgccgccgccgatgctgctgctcgtgcccgtcgccatcttcgccgtgctcctcctcctcgtcctgctgccctccgacgccaagtccatcgccgccgctggccgaccctcttcttcctcctcctcctcctacctgtagtctgtagatccatggaaggtgatgcggcatctggattggattggatcgccatgtaaatgtaattagcgcgctagctactccggatgcggcaatgttttttttttgtttttgttgatgagattcctcgaaagaggagattgagatt

SEQ ID NO: 19993 - DNA, 3461 bp, Oryza sativa
  ref <308>: DATABASE ACCESSION NUMBER: AK070328
  ref <309>: DATABASE ENTRY DATE: 2001-12-06
ggcccttcgctcgctcgcctcctctttccttcctctcgctcacaaacctcccaactagggttttccccgccgccgccgccgccgccatggccgccactccggaccgcgccaatgccgacctccgccgccgcctcgccgtcgacgcccctccaccaccgccgcagatcgccaaagacaagcaaggactggatactgagatgcctctttctcctcaatggcttatgaaggtgggagaaaacaaggaacccagtttactgggtgttcgttcagatggttcaaagataccaggaaatgatgaggacacaagcttcagtgtgaaaagaaaggatgttttcagggcctctgtgcttgatggtgaaactgggtgtcgtgaacgctggcgtgatgatgaaagagaaccaaattcagcccctcggtggaatcgctggagggagacagacaaggaacatggtgatacacgcaaactggaaaggtggtcagatgactcctccaagtactctgtggatggtcgtcgtcctccacaggaacgttggagtgactccggtaacaaggagggaaactatgatcaacgccgtgataacaaatggagtgctcgtaggggcactaatgataaggagtctgagaattggcgtgacagatggggtgattcaggcaaagatggtgatgctgcccgtgaaaaaggtttctctcactacatagctcatggaaaagacggcaacagtcatgagaaggatgctgaaagagatgataatatttctagatcatggaaatctagttatcctgtgggccgtggacggggagattcatctcatcatccctcacagaatacacaaaaatcatctgcaacatatggatatggtagagggaagccagacaatgaaattgcaagttttccaggttctcgtggaaaatttacatctggaagtacaaacacagccagttcaggatcatcacgtccattccatcttggcctactttctgacaggcctggtggtacatcaggagatcgcacagcatttagatatagtagaatgaaactgcttgacatatacagaacttctcatgttactgacttcaagatgccccttggtggctgtgaggaactctctgcatttatgcaagaagaaactttggaacctttagcattgtctgctcctactactgatgaagcggccatcttaaaagcaattgataaaggggatatcataaacagtggcgtccatcaggcttccaaagatggcccggttggaaaaaatggtagagaagatcaacaaggaggcatggaagatgtcaagggagaaacagctgcaagtctcaggggttttcctggtaatactgatttgccggccagagcggattccttgcggccagaaacatctgcttatgttgttccacaaagatctaggctcattggagaacataggcctggaccaactgctgactatatacagcaaatgccctttgcattagatcaggaaagtaaagtcgctgttattacaggtgttgatggatttgccactccaacttatcctaatccagaaagcttatctttatattacaaagatccacaaggtcaggttcaaggccctttttctggagctgacatcattggctggttcgaggctggttactttggtatcgatttgttagttcgtgttgcaaatgcaccccctgatgcgcctttcttattgcttggggatgttatgcctcatctacgagcaaaggcaagaccacctccagggttcgctgcaacaaaacccagtgacatgctaatgccagaaactctatcaactgggaattttgtcagctcgagtaacacacatgcaggatcagccagtgttggagcatttgacagtgggctaagcaggaaagatggtgcagttgaagctcaaaatcgctttttggagtcgcttatgtctaatagtgttcgtgatccttcagctgaaatgcttgctatgactgcaggtatgactgaatatggcagcagtggcattggtaacattactgtgtctggaggagagactgggaacagcatgacttaccttttggtacagaaaagattgttggagaggcaaaaatctttgcaaaatcctggttcattttggtcaggagacagtattccagctgcacaagtgcaaaacaaagatatagaagcatctgctctacacactaaattgcaccctcccatggctgatccacctcgccaagctttgcaatctcagaatgttgatttgcttgcgatgctgcattctgcagagaaacctcaagcacctgcttctaattctggattgccagcatggtcaaactaccctgaagctaagaatcttgatcctcgtgggcatggtgtggatctcactcaagggtcacttaacatgcatggtgcaagtgtgcagagttcccaacaagccactactgctattcaacagcaaaacttcatgccactgaacatgtcacaaatagctcatttgggacctgagaagttacgtgctgaaatatcccaagacccacagcttttaactaggttgcagcaccagtatctactgtcacagctacaattgcaaccacagctacctgtgacgcctcagcctcaacctcaacctcaactctctatgttggacaagatgatgttgctcaaacagcagcagcagcagcaaatgcaacaacagatgcaacagcaacaacaaatgcaacaacaaatgcaacaacaacagaagcaacgattgcaactgctgcaacttgagcagcagcagcagcagcagctgttgttgcagcaacagcacctgctttctcaagttatacctcatgggcattccagtcagcaacctgatgatctttatgggtcacaacgtacttcattgccaactggtgattcttcgaatcttggccttcagaaaatgaaagaggttcttgaggcagaccgcgttttgactgcccatggtacacaggaggggcagcaacctagtgatccaagtattatgaataagaagggtatggagggtgtaggtccatctcaaagctctgtaccttctttattgccccatgaaatttttggtggtgtaccttcaaaagatcgctactctcacccccagaagttggaagataaggtcaatgtcaatacacaattaaaagccagtatagtgaacccgatgctaacagaagttgcaaataggcgtgaagatgattctgatcaacaggaggttagatctcatgaaaggggcattggaataggaaaaacaggaatcatgtctgaaaatattttgggctctggatcttctgaggtcataggggcagctccaagtgcacctaaggagtttcctgaggcaccgtttgatccaaaacctgaaacattgtcatctcatatttccaatcaggtgcaagatttgaaaatatcttcagaaaatatcctcggtggtagtgaaccaactgtggcaactgaagttaaagcctctgatacacaggac

SEQ ID NO: 19994 - DNA, 2163 bp, Oryza sativa
  ref <308>: DATABASE ACCESSION NUMBER: AK070329
  ref <309>: DATABASE ENTRY DATE: 2001-12-06
aaaagcgcttcttcactcgatctcgccgcgagagacccaccgatctgccctccgccccccaacatggcgacgccaccgccgctccgccgcgtcgccgccctcctcctcctcctcgtcgccgccgcctccacccccaccgcacgggccgatctcgtcgtcaccagggcggatcggaaggttgacctgacttcgcacatcgttcgtgtcctcacttcgctcaaggttgagaatagtggaccggaggctgtttctcaatttctactggcgtttcccaatgtccaagcaaagaacttagcagctataagagcatttggtactgaggaaaaggtgaaaggtccaagtatggtccttccgattgaagttgttcagccttctggagtgcccccagaacttacattcttttcggcatctttatccaaacctttggagaaggggaagactcttcacttagatgtcctgaccgtatttacgcactctgtccagccattccccgaagaaatcacacaagctgaatcgcagcttgttgtctatcaggacagtgctcagtatctgtcaccttaccctgttaaggtacagacacttagtatcagattgcctggtggaagagttgagtcctacacaaagtacccaaacacaaaacttgcagagtcagaactaaaatatggaccatatgaagatcttccaccgttttcctactcccctatggttgtgcactatgagaacaataacccttttgcagttgcaaaggaagttataagggagatagagatatctcactgggggaatgtacagattacagaacattacaacattgctcatggtggtgccaaactcaagggtgaattttccaggattgattaccaatctagaccgtacataagaggggtctcatcttttaggcatcttattgctagactgcctccaagggcacattctatatactacagagatgagattggtaacatttcaacatcacatttatggagtgattccaagaagactcaacttgaagttgagccaaggtttcctttgtttggtggttggcaaacgacctttaccattggttatggtttacctcttcaagactttgttttcaattctgatggaaagagattcctcaatatcacatttggttctccagtggaggagattctcatagaaaagcttattgtgaaggttgttctgcctgaaggttcaaaggatattgatatttcagttccatttccaacaaagcaagagcaagaggtgaagtattcacaccttgatatttctggaaggccagtggttgtcttggagaagcttgatgttattccagagcataatctatatttccaggtttactacaggttcaacaacatctctctactcagagaaccgatgatgttgataactggcttctttctcctcttcatggcctgtattgtttacatgcgcactgacatgtcaatctctaagaattctccttcttatctggcaaaggtgcagtgggatgaggtacagagcatcatccagcaaatccaggctatcttcaaccaatgtctagcagctcatgataaactggagacctcattacacgagttatctaggtcaggggatgttaaatcatgcaaagtggctcgtaagacagctgatgcacagtttaaggaattagcaaaagagttgaagccattgttgacatccctgcagtcatcctctcagtcttaccagatatggccaaaggtagaggaattggttgccaaggagagagagttgcaggataagctcatgacaaggcattccactgtggttgacagctttgaaaagaagttgcgagggcaagatgtggagaacaggattgctgcccagcagcagaaagttgctgccctgaggcaagaggtcgaatctcttttagagtacatcagtgagatctgagcgaatccggcgctgcatggtatgtcaatttagcaattagactggagaatggatcacctggtttctcattgtgcgaatttgatatgctcgaattcgaatcaaatactcgtagatttcctgttgataacctgtctcagtcattcaggctgggagtttcaaaggaccttgtaacatgataagcacttgtgaccgcctgaaactgattgaaattttgcacttaatagcaaatcacgcgacctttcaccttgtttc

SEQ ID NO: 19995 - DNA, 1264 bp, Oryza sativa
  ref <308>: DATABASE ACCESSION NUMBER: AK070330
  ref <309>: DATABASE ENTRY DATE: 2001-12-06
ttcactccaccacaggttcagctcgcctcctcccgtagccaacttccacgcagagatcgccaaccaccatgccgccgccgtcgccgcacccacctcaccgcaacggcaaccacgtcccggcgccctccggcgagtcgttcgccaagttcttcgagtgctggatctccgagcagtcccgcgacctcgccgcgctccgctccgccgcgtcggcggcgacgaaccccgcggcgccgcccgacgacgccgagctccaccgcctcgtcaaccgggtcctcggccactacgagcactactaccggaccaagtccgccgccgcctccaccgacgtgctccgcatgttctccccgtcgtggacctccaccaccgagaacctctacctctggtgcggcggatggcgccccactgccgcgctccacctgctctactccaagtccggcgcgcagctcgagacccagctcccggtgttcctcgccggcggcggcctcggggcgggcgacctcggcgacctctccgccgagcagctccaggccgccgaccagcttcagcggataaccgtcagcaaggaacgggagatcgagaacgccgccgcgagtgcacaggtgagtgatggttaatttgttctttcatcagtgaggtgagctcgatcagcatccggatgcaaacgtgaacaatgcaggagtcgttggcgacggtgaagatggtggagctagccggaggcggcgggatggacgcggaggggatggagatggagatgaggagcaaggcggacgggatgaggcgcgtgctggagatggcagacgggctgaggctggagacgatgagggaggtggtggcgctgctccgcccgtcgcaggccgtgcacttcctcatcgccgccgccgagctccacctcgccgtgcacgagttcggcaggcgcaaggacggcgacggcgccgcgtcgccgccgccggcgtgacgcgtgcgcgctcgtgtcgtgtcgttgccgttccaagtgcgcggcgtggtctccgatgcgtaggctcgtcgtctagctctggtcaactcaagtcgtcgcgataagctttgaccgatatttatttatgcagtactcgtacactagtatttctctctctctctcttttttttctgcgatgaagccgatgatacctgtagggttttttttttctttcttttttgcgtttgcatgtgatggaattttactacggtactttggagcagctgtttctatatagacagtgagctaacctgcgtgatatttctaatc

SEQ ID NO: 19996 - DNA, 1428 bp, Oryza sativa
  ref <308>: DATABASE ACCESSION NUMBER: AK070331
  ref <309>: DATABASE ENTRY DATE: 2001-12-06
ggcccgatcccgaggagagaggaaggggaggggcgctgtattaattcgaacgtaaccaccctccccgtcatcggcggcgagaaacagaagtacagaacagagaagaagagcgagagaccgagggaggaggaggagagagaaggcgaggcgcaaagcgcaaatggagctctgcgtccgcgcctcctcgcttctgctcggcctcctgctccagctcctttcctcagtggacgtggtgtcggcggcgcagaaatttggtatcaactatggccagatcgccaacaacctgccggacccgacgcaggtggccggcctcctccagtcgctgaacgtgaacaaggtgaagctctacgacgcggaccccaaggtgctgatggcattcgccaacaccggcgtcgagttcatcatcgccatcgggaacgagaacctgcagtccatggccggcaaccccggcgccgccaggcagtgggtgacgcagcacgtgcagcccttcctaccggccacgcgaatcacctgcatcaccgtcggcaacgaggtgttctccggcaacgacaccggcatgatggccagcctcctgcccgccatgaaggcgatctacgccgcggtcggcgaactcggcctcggcggccaggtgaccgtgtcgtcggcgcactcggtgaacgtgctcgccaccagcttcccgccgtcgtccggcgcgttccgggaggacctcgcgcagtacatccagccgctgctcgacttccacgggcagacgaactcgccgttcctgatcaacgcgtacccgttcttcgcgtacaaggcgagccccgggagcgtgtcgctgccgtacgtgctgttcgagcccaaccccggcgtgcgcgacccaaacaccaacctctcctacgacaacatgctgtacgcgcagatcgacgccgtgtacgcggccatgaaggccatggggcacacggacatcggcgtgaggatctccgagaccgggtggccgtccaagggggacgaggacgaggccggcgccaccgtggagaacgccgcggcgtacaacggcaacctgatgcagcggatcgccatgaaccaggggacaccgctcaagcccaacgtgcccatcgacgtgttcgtgttcgcgctgttcaacgaggacatgaaacccgggccgacctcggagcgtaactacggtctcttctaccccaacggctcgccggtctacgccatcaacaccggcgccggtggcgtgtcagggcggacggggccgttcgacccgtactcggcgcagatgttctcgtcggcgtccagattggcggtaaggacagcatctttgacactgctactgctagtattgccccttctgtcctcattctcttgctaattaatgatacctttgtatacaaaaacgtgcaaatcaaccatggggtaggcctggattccaaaatttggccg

SEQ ID NO: 19997 - DNA, 1167 bp, Oryza sativa
  ref <308>: DATABASE ACCESSION NUMBER: AK070332
  ref <309>: DATABASE ENTRY DATE: 2001-12-06
gtacccaaccactcatcatccatctgctactgctactgctagctccatccattttattctagctccatccatcctttaagagaagctgagatcaagaaacgtactcactcttgcctgcatcgatccttgagtttaattaactcaaggaagaagcaatcttcgcttcggtggatgaagagcaggaagaacagcacgacgagcacaaaagcagcaggcagctgccacaccagcagcagcggaggaggaggaggcggcggcaactgctatagcagcagcagtagcaagatggagcgcaaggatgtggagaagaatcggcgcctccacatgaagggtctctgcctcaagctctcctccctcatccccgccgccgctccccgccgccatcaccaccactactccacctcctcctcctcatcgccgccctcctccaccaaggaggctgtgacgcagctggatcacctggagcaggcggcggcgtacatcaagcagctcaaggggaggatcgacgagctgaagaagaggaagcagcaggcggcggcggtgccaggatgggacgctggacgtggtggtggtgagcgaggcgatcagggaggagagggagagggcggtgcggctgcacgaggtgatcggcgtgctggaggaagaaggcgcggaggtggtgaacgccagcttctccgtcgtcggcgacaagatcttctacactctccactcccaggcgctctgctccagaatcggcctcgacgcctccagggtctcccacaggctgcgcaacctcctcctccaatattaattcacaccactctttcactctgctcagaatgagataatactctctactctactctactctgtactgtgatgataagaagtataaagagtagcagaccagagagcctctaggtagctaggttaattagtgagaaacaagagtttacactaagctaatggatggcatgagcgggagcaagctgttattactactaactcttggctaacgtttttgtatcccctagctagatgcctgccctacgtatatgtctccagtctatcatgtaggagtactccagtagtatactgtgtgtgagtgttctcttttgtgcctgaaattaatccagtccgatgtaagtacgtactagtatttggtttactgcatgctctctagcctcg

SEQ ID NO: 19998 - DNA, 1523 bp, Oryza sativa
  ref <308>: DATABASE ACCESSION NUMBER: AK099135
  ref <309>: DATABASE ENTRY DATE: 2002-08-28
gcgaggattagataagcaaaacagccacctaagcccacgccgcgaagtcgccgccaccgccatgatctccgcgacggccaccgccgccttcctcgccgcggcgccggcctcctcctcctcctgcaccacccaccgccggcgcagcggccttcccgccatctccgcgtccctcgcaaccgcctcctccactgaggagccgctgctggtgcgggcggcgaggggcgaggacgggctgccgcggccgccggcgtggatgatgcggcaggtcgggcggtacatggcggagtaccaggcgctcgccatgcgccacccctcgttccgggagcggtccgagacgaccgaactcatcgtcgagatcacgctgcaaccgtggcgcgccttcgcgcccgacggcgtcatcctgttctcggacatactcacgccgctgccggccattggggtgccattcgatatctccgactccaaggggcctgtgatccagtctcccgtgaggtccgaggagcaggtgagggagctcacccccattgacttcgagaagctccggttcgtcggtgagtcgctcaagattctacgcactgagattgatggacaagctgctttgctaggatttgtgggggccccatggacaattgcaacttatgttgttgaaggggggatgaccaacacttacacaaatataaagagcatgtgccacacagcaccaaatgtgttaaggggacttttgtctcaccttgcagacgccatatctgaatacattatttaccaagtaaactctggggctcaatgtatacaaatatttgattcatggggtggacaacttccacctcatgtgtgggagcagtggtcaaaaccatatatcaagcagattgtgaataagattaagattgaatgccccaatgtaccacttgttctctatataaatggaaatggaggcttgcttgagcgaatgacggacacaggagtcgatgttattggtcttgactggacagtggatatggcagatggaaggagacgccttggtaacaaaattagtgtacaggggaatgttgacccagcatttctattttctccattaccagtactgaccgatgaaattcatagggttgtcaaatcagctggtccaaaaggtcatatactaaacttgggccatggtgttcttgtaaaaacaccagaagaagctgtagctcatttctttgatgtcacgaggagcttgagatatgacacacttttccaaggttgtgttactgaagttttggagcctgttgcttaacaatggccaattgtcagatattttttttaatcagctgatccatggtgtaccatcgtagttttgtctgcaagctatgttgctccttttgttggccatgtctttgtaggaatatcacgattcgtgaccaggtcaattcaattttattcattactcttaatagctgtattccttcatccatccacaaaacaaaaacaaaaaggcatgccacctggttttacaagaaaagccagagtaggttcaaggtgttttgtcc

SEQ ID NO: 19999 - DNA, 1642 bp, Oryza sativa
  ref <308>: DATABASE ACCESSION NUMBER: AK070333
  ref <309>: DATABASE ENTRY DATE: 2001-12-06
ggctttgtttgtttctttctttctttctcctcttcggatcacgcaagaagaagaacaagtctccgtgttcgtgttcgttgtatgttttccccggaaagaagctttgattgcagccgagtcaaaatctttcgagagagagtgctttgcgtgtgatcgagagaggtgttgttggaagcttggttggttgggggagttcttggtttggtttgtggggggtggtttccggttggatttcgcggttggggaggacgagcgggttgttgagcggttcgggggaggaggcggtgatggtggccggggcggaggtgatgcatcaggtcgtgccgctgctggaggcgtcgttccaccgccggtgctccgtgaagggggtcgacgaggtgtcgccgccggtggaggagatgtcgccggaggctgcctcggaagccgccatcgaggtgcctgaactgatggttaaggcacccgtggaatcactacagttttcccccaacattcgatctggtagctttgccgatattggacctaggcggtacatggaagatgaacatatcagaattgatgatctttctggtcatcttggctcactgttgatgtgccctgcacctaatgccttctatggggtctttgatggccatgggggtccagatgcagcagcctacatgaaaaggcatgctataaggctgttctttgaggattctgagttcccacaggcattagaagaagatgaatcattttatgaatcagttgagaaatctatccacaatgcattcttgagcgcagaccttgctctcgctgacgatttggctatcagccgatcatcaggaacaacagctcttgctgctttgatatttggaaggcagctgttggtcgcgaatgctggggactgccgcgcggtcctgtgtcggaaaggtgtagctgtggagatgtctcgtgatcacaggccaacatatgatgcagagcatgaaaggattaccgagtgtgggggatacattgaggatggctacctcaatggagtactatctgtgaccagggcattgggggattgggacatgaaaatgcctcaaggctcgcggtcgcctctcatcgccgagccagagttccagcaaaccacactcaccgaagacgacgagttcctcatcataggctgcgatgggatatgggacgtcatgagcagccagcacgcggtgaccatagtccgcaaggggctccgacgacacgatgaccccgagaggtgcgcgagggagcttgccatggaggcgaagaggctccagacctttgacaacctcacggtgatagtcatctgctttggatctgagctcggtggtggttcaccgtcttcggagcaggcgccgatcaggagggttagatgttgcaagagcctgtcttcagaggccctttgcaacctgaagaaatggctggaacctaatgagtagatgatgatgataatgggcaggctttttgtttcctgctgtgtaaataccttatgacggctgttctcacacagccagcaattttgtagggagtcgtttttttttttttttttgttgtttgccccttcatcgatgtacatatatactttatcgggttcacccgttcatgtattgttaccgtgccccctcagtgaaaatttgcagtacatttgtcg

SEQ ID NO: 20000 - DNA, 2781 bp, Oryza sativa
  ref <308>: DATABASE ACCESSION NUMBER: AK070334
  ref <309>: DATABASE ENTRY DATE: 2001-12-06
gattcttcctcctcttcttgtcatagactccgtccgcgtttccttcttctcgcctccctttctggtgctcttacattcacgataatcttccgcccaagcattgagctgtactcctaactcttatcccctccttcccgggttgttagatggccgtacagaccaccctcgaccagctgccctcacctcatagtagcagcgatttcagaactctgtcaccactctctccacaccataccgatcagtcgcataccccgcggtcttcagtttctagcagccggcctgttggcgattacaacctcccttcgccgcgtttacagtcatccagtactacactcccacggcatcatccttcagctctttccggctcgacacataaaccccagcgctcctcaagtgctctgttcaattttgcagccgcagctctagacaagacccaatctgcccttgccaatacgcttgagccggtggttcgacctcgccagtctaactcagctttagcgaggttgtctcttggcactggatctctgtccagctccgagtctttcagttcaccgaaggtttcttctataccgaacggcagcgctgcctacaagaacaaggcacacacgacgccctcgggctcaaccttggctgttgccgacccatatcctctcgatccgccttcgcagcggtattctgagacggacccgaacactctccctcctctcagacttcctgcttccgatagcaagatgcaccagacttcatcacgcttattgcgcatgactgacgatgatcggccgttcacaaaggatttcaaagacctttttgcgaccctcatcgtcagtcttctgccgctcggatcacatcgcgtacgattaacaaaggtcgactacaccttcttgtcagaagatgccatcaacaatctcggatccctcaagttctcccaatcaaatcgaatgcccgatcccaaagatcccacccgcatcgtcacgacgacgacgacgaccactttctctatggccaaggacatggctcgttctatttgccagcgttttgtggaggcccgcttcattgagtctgcagatggaaagcttcagcaggtctacaacatgaagggctccgtctggcaacttactcctaagggagtgtccgtccttgatcgattctgctcaagaaacggcatccaacagaggcaggtttcagaccttgccaacatgcactcgacccagctggtgattatggagcgcgattcgcaatctgacaagcttctgcatgaccggggcacggtggaggtcatcttcaggagatttgtcggtgccgacggccgtaatgttaagcagagcgtcagcgccgcagactccgagtcattacacgattacaaggacggcttaactggcgtcaagatggctgctgagcgcaagattaatggcaagacgtactacaacaccttcacaggtcgcgcgaccacggactggctcatggattgttctacgatagttgatcgtcgtgagacaaatgaggtggcatcgctcttcgttgagtacgatcttatggagcccgtgagtgctgaccgcacatatgtgtcacaaaatcctggagcttctctattccagcctacaaagcatgcaatctaccagatcagccagcgtggaaaggatgtaatcaatggcaacagctctcgtggaagggcatcggaaagcgaaggtggccagtctcagaggaatggcatcactcgtgattctaatacacaacgtctggacaagattctcaacgacccggcgttgcgactgctcttccgcgaaaacctgcgggacacgcattgcgaggagaacctgtctttctatcaggacgttgacgaatttgtccggagctgcaaagctgctattcgcattgctcagaaaaaccctagcgcgacttcgatggatggcatcaaggagatcatggcgcaagcctacagcatctacaacgccttcctggctccgggctcgccgtgcgagctgaacatcgaccaccaactgcgtaacaacctcgccactcgcatgaccaaagctgtgggtcaggatgttgcgatgatcgatacgctacaggaggtgactgctcttttcgaggatgcgcagaacgccgttttcaagcttatggctagtgattccgtgccgaagtttctgcggagcccaaagtacgagcatgcgctgcgcaattacgagttcgagatgagtagtggcagccaaaggatgctcgaacggagccaaagccgatcgaatcggaaatgagcgtatgcggtcaggcggttccgataggggggagatgaccacatcggctcgccccccttcttacaaccaactaaccggcggagatattggttggccccgataaaacagcacatcgtgtctgcaccaggttattgaatcggcaaggcagacggaacaagagcgtggacccgaaataaggcgcgtcggtctttcccgcttccgagccattctgctgcgcgacccaaaaggcggatgcaatcgcgacggtatgactcaacgacaggaatacatatacaacaaagcgacgacccttcctctttcattgcaacgaagaggaagaagatagagttgggcaatttggcttcgctgttttcggctgggcaagggtgcagtggcggtacgcaatgataccaaaaacttcatcttttcgtgtttcttttctttttgtttagatttcacctcacatgagttgcatcttcatcagcataatcggtgttcagtggccaatttctctcaccagaggaaaaataccaaatccattttcttttgc

SEQ ID NO: 20001 - DNA, 2035 bp, Oryza sativa
  ref <308>: DATABASE ACCESSION NUMBER: AK070335
  ref <309>: DATABASE ENTRY DATE: 2001-12-06
gaggcggcaagtgaacaaaccagagttcaaaaatttcccaaaaaaaaataaaaaataaaaatccgtctcttccgcctccgacgattcgctgctcgccggcctccgccgcgggcgccgcgaagccttccggtgaactccggcgacgggcgggtgtggggattcgcggccttgagggttcgtgctcgcctccgactcctcgctcgctctctctctctctccgcggttgcggaggtcgggggtcttgccggcggtgggtgggctagggtttcgccgcctcgggttctccggggtccaggagatctagggttgtgagatcaggagtaggattacaaaattgcacaccagatagttttgctgctgaatatcagaaaaccatgaaacctcttcagcagcgctgtaaaccaactgatacaggaacggcggcaaaacttggtggcagtacgatgcaaagcctgaaacctggaaaatatatcaacaaatcatcaggcaatgctagcacaaaatacagaagagctggtgcctcatcacctcaattgtatactgaaaaacaaagtgcaccaaaggatggtagctttatggaagcactgttccatgattctaagaatgtgtctgctcgaccaccctgccattctggaaagatcgcacttcaactgttcccaatagatgaggagtttcagaagtccctgcagcagaaaaaccacaatccttacctggaattgactgtggctcctcgaaagaaaatatcctcagttctgcagcatctcaacacaaaatggggcaattctcagtgtgcaagaggtgaactcatgctcttccctgacggtactaggcttgataacataaatggcagtgagagatggactcgtagtgattcttgcacagcagctgatgtgcatgttgctgttggcagcccttcgacatttcgcttaagatatggttggtttccacccaattttggggaacaaaacagtggagtatctttaggattagtgcactctgcaggcaatataatcgacaacgagcctttagatcctgttgtcagggaacagaaacagatgactgctttgagtgaattcccgagtaactttgctgcaccgtccactgaggccaacacagtaaagactatgaaacaggataatcaaagcaaagagacaccactttcatggattgactgcatatctaatataagttttggagcactattagctgaagctgcgccttctcaagacagcaagcagttacttccacaaaacaactcaagtctccaacagatacctcttaccgctgattcatttgatgctgctattgcttccctgattgctcggcaacaagcaagtagccagccgaaggtgtcaactccatccctttgggatgcagaagaaacgtgccatgcatttccttcccagaatcgaatttcacgcaggacacctggtacaactcctagcagttgtggtgctagtaccttgtctgtcctaggcacaattctggaatctggtacagacggtgagaagcaatgttctactgaagatagaagagaggaaccgaaccctcaggcatcactcttggccaatgatgacaataatgtgaagccagacatcccagtgtctgaatctactggggagccaagactgggagcatcttgttttcagtctgaatcgactggggagccagaagtcggagcatcttgttcaagacttttgagtggcaccgacagtttaagtgtgagcgatttacttgcaaacagcttggatgcattccagaaattctctgttttctgaagcgtagcttttatatggaagaactgaaattgcacatcttgtaaagatcaggaactagggtgaaacgtcgtatgtgtttcccagttcattaggagatctttttttttttgagggggcttgctgatctgaagcctcttgtgtagtatttttccttaaatatttagcgaaaagcaccacctttgtcatgtaaacctctgctaattgctactaacaatagccatattcatctaaaataatcaatgataatattgattgtc

SEQ ID NO: 20002 - DNA, 1581 bp, Oryza sativa
  ref <308>: DATABASE ACCESSION NUMBER: AK070336
  ref <309>: DATABASE ENTRY DATE: 2001-12-06
gctatgatccattagcagaatatctctcattcattgacaatggtgctttctctgttgatggagtattgactgattttcctgttacaccttcagaagccataggctgctttactaatctgaagaaaagcaaaacagatcatggaaagcctctaattatttcccacaatggtgctagtggggattacccagcctgcactgatctagcttatcaaaaagcagttgatgatggtgccgatgtcattgattgccctgtccaattgaccaaagatggcataccaatatgcatgagttccattaacttgatggatgatactacagttgcaaaatcacagttcgcctctcagacagcagtaatcaaagatattgagagtgtgctaggagtctttaccttcaaccttacttgggatgacatcgtaaagaatctgagacccaaaatctctaccccgtttagctccttcaaactggacagaaatccaagatataggaatgcggggaatttcatgagattatcagactttctggacttcacaaaggataaggatttatcaggaattatgatcagcgtggagcatgctgcttttgtggcggaggaacttgggtttgacatggtagactcagttatcaagaccctcgatgctgctggttacagcaaccaaactgcccagaaagttatgattcagtcaagcaacagctcggttttggtgaagttcaagcagcaaacgaagtacgaccttgtgtacatgatcaacgaggaggtcaaggacgccgcgccttcttccctcgctgccatcaagaagtttgccgatgccgtttccgtcgaaggcaactctatattccccgagaaccgccatttcactacctaccggaccaacctcgtcgagtccctgcagaatgccggtctcccggtctatgtttacactctcatgaacgagttcgcttctcagccatacgacttcttctcggacgcgaccgcgcagatcaatgcgtatgttcagggtgctggagtgaatggcgtgatcacagatttcccggcaacagcacggagatacaaattgaacacctgtatgcacatggggaacaacacgccgagcttcatggccccggctcgcccgggtgacctgctgcagatcatcagtaagccggcgcagccgccggcgatgtcgccgatgcccctcctgacgggctcggacgtggcggagccgccgctgccgcctgcaagaacagctcaggcgccgtcgctcgcgagcaggatgcaggctcatgccgcgatcgtcgtcacattggcgatgcttctcgcttgccatcccctggtatgaccggacaacgcagcaggttcacaagccaaaatactaatccagtctgtttgttctgttctttcttttttttttctttttttttctcatgtagcgattcgtttcatcctcatgtatttttttttgcattgatgatcgtccccgatttgcctattactgtcctcagtggtctcagtatatatgtgtggtatgaatctaaatacatacatatgtctagattcattaatatctaaatgaatgtgggcaatgctagaaagtcttatattgt

SEQ ID NO: 20003 - DNA, 2541 bp, Oryza sativa
  ref <308>: DATABASE ACCESSION NUMBER: AK070337
  ref <309>: DATABASE ENTRY DATE: 2001-12-06
ggcaggtcttccaagttccaagcctctctcttctcttctcttctcttctcgtgcgaccgcttccttcaccggacgccgccgccgccaccaaccgccgccgccgcgggagccggcgcagaggatcacagcacagggtttcctcggcggaagctgcgccactgttcgttctcctccgccgattttgctctggcggatttggggagaagttgattttgctctgagcgccgccggtggctcggaggtctctgtgtattccagctcctgccatccgccgccgccgcatgaggaggtccccgtcaagtgcacagctcccgtcgccgagctgccaggtctccgcggagcaccaccgccagcgagccaactaggtcagagtggctccatttggtgcactagctctgcaaaaagcttcatcgtttggatgagagatccccgttatatggaaatggacttagggtttactcttcagtaataccaattgccacattggagtcgggagaaaagttgtttcagaagcacccgagagctactgctggttggttttgactaagctgggtgatagcatgatcaagcaaatccttggacggttccccaagaagccatccaaatccggagacaaggaccctattggcaggtcaagcccctcagtgccgaatccaccattgggtccaagaggtgcagaaaggtcctccaatttgagtagccagacaccggttatctcaagctctgggcttagttatgggagtggcatgcatgttgggaatgcaaactcaagggtgaacgggaattcggtacaaccgactgttgagctgttgccaagctttaaggatgtgcccaacacagagaagaataacctgttcgtaaaaaaactgaacttgtgctgtgccacatttgacttcacagatccaacaaagagtgtaaaggagaaagaagtaaagaggcaaactttgttggaacttgttgactatattgcctcagccaatgggaagtttccggagataattatgcaagagatcacaaggatggtttctgtaaacttattcaggacactgactaccccgcccagagagaataagattgaagccttcgatgtggatgatgaggagcctgtgatggatcctgcatggtcacacttgcagattgtttatgagctgttcttgaagttcattcagtctccagagaccgatgccaagttggcaaaaagatacatcgatcattcatttgtcctgagattacttgacctctttgactcggaggaccctagggagagggagtacctcaagacgatacttcaccgtgtctacggaaagttcatggtacatcgaccatttataaggaaggcaatcaacaacatcttttaccagttcatctatgaaactgaaaaacacaatggaattgcagaactattggagattttaggaagtatcataaatgggtttgcactgccacttaaggaggagcataagttgttccttgtccgggccctgattccacttcataagccaaagtgcattgggatgtaccatcaacagttgtcttactgcattacacaatttgttgaaaaagactgcaaactcgcagacactgttatcaggggcctattgaaatattggccaatcacaaacagctccaaggaggtcttgtttttgggagagttggaagagatattagaggctacacaacctgcagagtttcagaaatgcatggttcctcttttccgtcagattgcacattgtctaaacagttctcacttccaggttgctgagagagcattgtttttgtggaacaatgatcatatcgagaatctgatcaaacaaaatagtagggtgatcttacctatcatcttccctgcactcgagagaaatgctaatgggcactggaaccaagctgtgcaaagcctcacacttaatgttcggaaattgttctccgatcatgatgttggtgtatatgatgagtgtcagcggaaatacgaggatgaaaaagccaaagagaaggagacaaaattgaagcaagaagtcgcatggaagcgcctggaagagatggcatcagcaaaagcaacgagtggagcagctgtgcttgtctctcgaaccttacctcgccaatcttcagctgtctagcgcattgttcaagtggtccttggagattcaaaaagcactgtacaggattgaactgtacagacaaggtatatcaaggcgggcatattgatggaagatctgagaagccagttgggttacgcagagtaccagcaatcacctctcaatcctgagtcttggcttttgatatgctgagatctgcagttaattgctttactatcctttaaccttgtccgaagttggttgcgaacttgcaatttgttttcagctggtgctgtaatcttcccatgggtgtttgttttggaagcaaatggttgttggtggtcagtagatagaagttagttagtccttcaaaatgagtcatcgttgttctccagttggcatgggccttcatggttgtaaatggaaacagaaatttttttcttgagtacaatatgaacaaatatcgctc

SEQ ID NO: 20004 - DNA, 1763 bp, Oryza sativa
  ref <308>: DATABASE ACCESSION NUMBER: AK070338
  ref <309>: DATABASE ENTRY DATE: 2001-12-06
gaggcagaagcaggaggaagacgaagaggaatatatctgagtagtggagtccaaggaaaggaaccaactgaccttagcttagcttaccttagctcaaccccaagcttgaagcttccactataagaactcacccagccacacggctacttggacgacgaagcagcagcagcagcagtaaacagcatcgctcgctcgtcttcgtcgtcgtcgatcggctccggtgagggtgatcggtcgccggcagaggcttctgatgctggagaggccgccgatcctgaagagataccgcgcaccggggtgggcagtggtggctcgctggaaatgtcgtcgcagcagcagcacgccggtgaggcccccgcctccgccgccgccgctgcccgggcgcggctcaggtggaccgggcagctgcacgagcggttcgtcctcgccgtggcggagctcggcggcgcggacagggcgacgcccaagtccgtgctgagggccatggccgtgccggggctcaccttgtaccacctcaagagccacctccagaagtaccggcaggcggtgagccgcggcggcaatggaggcggcggaggcagcggcagcctgaacgaccggtcatcctcgtcggagcgccaaccagccgaccacgacggcgatagcgccgccgatgagccgcgcaccattgcttacgacggcgacagcgatggcgatgctaaagaaggtctccgtgattcatccaggagcatggtgcagatgcagagggaagtccagaggaagctccaggagcagattgaggtcaagaggcatctgcaactgaggatggaggcacaggggaggtacctgcagtcagtgctacgcagggcgcagcaagtcctggccgaccatagcctggcaagctcgccggaggccgccacggcggagctctcggagctcgcctccgccgtggacatcgagtgcatgtcctcctcctccccgccgcggcaccaccgccaatccgccgcaaccgacagctgcgtgactacgacgtcgtcgtcggaggccgagagcaaggccgccgggtccaagcggctccacaccagcgattgcaccgtcgagcagccggtgcagggcaagagggccttcaacttcctgcaaaggcacaaccaggcagatcaagaagaagaacaagaagaagaatatgcaggagcagaggatggaagctcatcagagattgatctgaacaggtagaggcagaggaggaagagaagcagcagaagcatctgtgatgatgtgctgctgtgcattgctgcagtggatgattggtggggtggccttcaaggctggggccaagcaaccaggcttttgagcaatgtctgcctgctactgcaacagctactgctgctgctactcctcattctatgatgatatatgttttactttaacttatatatatatatatatatatatatatatatagctatgcaagcatctggttcttgtgtttcacgtacctgtaaaaaaaaatggaattcgaattggtggctggcccagctgcagatgcatgtggcatgcttgaggtgcaagaatatatagaactgtagtagtgtggattatgcagctagtgaatgatgctttagggaccaatgggatttccatgaaagatggaattggtttgcagtgtaatttaaagagcaaggttgatttttcacagctgagctcagtgtggatcaaagtttagttacagtgattggaagttaatatgttagtaacaagagcagtaaataaatcagtttgcagtg

SEQ ID NO: 20005 - DNA, 2493 bp, Oryza sativa
  ref <308>: DATABASE ACCESSION NUMBER: AK070339
  ref <309>: DATABASE ENTRY DATE: 2001-12-06
ggctgctccccgaggatttttgtttgattatttgctgcctccagtgggttgggtgttcttggggggctctgtttcccggggtggtgcttgttggtgagcgtggtgttctccggcggcaatgaggggcagccatgtctgctccctggtttcctccctcgttttcctgtggctgggggttgctgctgcgcagaaggcctcttcttggaagacgctgagcggcaatgctccggcaatcatagccaagggaggattttcaggcatattccccgattcaagcgaatttgcgtaccagtttgcgctcattgctagttcgccagatacaatcctatactgtgatgttcggttgaccaaggatggtcttggtatctgcctgccggacataaagatggacaactgtaccaatattccagatttctatcaacagggtaggaagagctaccttgtcaatggcgtgtcgacggcgggatggttctccgttgattacaatggcaccgagcttggccaagtgtctttgaagcaatcaatcttttctcgctcgccgaggtttgatccaagcttctttccaattcttgctgtcgaagacatagcatccaaatttaagcctcctggaatgtggctcaatgtccagcatgacagtttctacagtcagttcaatctaagcatgtcaaactacatattttctgtgtcaaaacgtgttattgttgactatatctcatcacctgaagtgagcttccttactaaagtatctggaaagcttagcaacaacacgaggcttgtgttccgttttctcgatgagagcacaatcgaaccatctaccaaacagacatatggatccatgttgaaaaatcttacatttgtcaagacattcgcatctggtataattgtcccaaaaaaatatatctggcctgtttcaccagataattatctggaaccacacacttcagtcgtcgatgatgctcataaagcagggttggaaatttatgctgccgactttgccaatgactttatgttcagttacaaccatagctatgatccattagcagaatatctctcattcattgacaatggtgctttctctgttgatggagtattgactgattttcctgttacaccttcagaagccataggctgctttactaatctgaagaaaagcaaaacagatcatggaaagcctctaattatttcccacaatggtgctagtggggattacccagcctgcactgatctagcttatcaaaaagcagttgatgatggtgccgatgtcattgattgccctgtccaattgaccaaagatggcataccaatatgcatgagttccattaacttgatggatgatactacagttgcaaaatcacagttcgcctctcagacagcagtaatcaaagatattgagagtgtgctaggagtctttaccttcaaccttacttgggatgacatcgtaaagaatctgagacccaaaatctctaccccgtttagctccttcaaactggacagaaatccaagatataggaatgcggggaatttcatgagattatcagactttctggacttcacaaaggataaggatttatcaggaattatgatcagcgtggagcatgctgcttttgtggcggaggaacttgggtttgacatggtagactcagttatcaagaccctcgatgctgctggttacagcaaccaaactgcccagaaagttatgattcagtcaagcaacagctcggttttggtgaagttcaagcagcaaacgaagtacgaccttgtgtacatgatcaacgaggaggtcaaggacgccgcgccttcttccctcgctgccatcaagaagtttgccgatgccgtttccgtcgaaggcaactctatattccccgagaaccgccatttcactacctaccagaccaacctcgtcgagtccctgcagaatgccggtctcccggtctatgtttacactctcatgaacgagttcgcttctcagccatacgacttcttctcggacgcgaccgcgcagatcaatgcgtatgttcagggtgctggagtgaatggcgtgatcacagatttcccggcaacagcacggagatacaaattgaacacctgtatgcacatggggaacaacacgccgagcttcatggccccggctcgcccgggtgacctgctgcagatcatcagtaagccggcgcagccgccggcgatgtcgccgatgcccctcctgacgggctcggacgtggcggagccgccgctgccgcctgcaagaacagctcaggcgccgtcgctcgcgagcaggatgcaggctcatgccgcgatcgtcgtcacattggcgatgcttctcgcttgccatcccctggtatgaccggacaacgcagcaggttcacaagccaaaatactaatccagtctgtttgttctgttctttcttttttttttctttttttttctcatgtagcgattcgtttcatcctcatgtatttttttttgcattgatgatcgtccccgatttgcctatt

SEQ ID NO: 20006 - DNA, 1760 bp, Oryza sativa
  ref <308>: DATABASE ACCESSION NUMBER: AK099136
  ref <309>: DATABASE ENTRY DATE: 2002-08-28
ggagacctcctcgcgagtcgtcaatccatggccgcctccgcgtcggcgtcgctgcgccaccacctcctcctccgccgccgcccgcgcttccccctcggccctagccccactttccgcacctcctccctaccccgccgccaccagcggctcttcgcctctgccccatcctcgtcgacggtggagaatggcgagccctcctcgccggtggagccgtccgacggtgcgtccgtcgtcgacgtgaatccgccgcgcgggaccagggatttccccccggaggacatgcgcctccgcacctggctcttcgaccagttcagggaggtgtcccgcgtcatggcgtttgaggaggtggacttcccagtgctcgagtctgaggcgctcttcattcgcaaggccggagaggagatcacgcagcagctttataacttcgaggataaaggagggcgccgtgttgttctgaggcctgaaatcaccccttccttggcacgcctagttataaagcaaggaaaatcagtctcccttccactgaaatggtttactataggacaatgctggcgatatgagcgtatgacaagaggaagacggcgtgaacattatcaatggaacatggatatttttggcatgcctaaagttcgagcagagtctgagcttcttcaagctattattctcttatttgaacgtcttgggattacatcttcagatgtggggatcagagtgtccagccgaaaggtccttcaggctgtgttgaatatgtactccattccagaacatttgtttactgaagtttgtgtgattgttgataaactgggaaagctgactagagaagaaattgagaagaagttggttacaattgggctgtcatctgaagctgtgctgggtatcattgaggttctttctctcaagtcgctacccaagcttgaagaggtgctaggctctgatgttgaagctgttgctgacttgaagaagttgttctcgtttgctgagcagtacggttatgctgattggatttgttttgatgcatctgttgttcgtggccttgcatactacacaggaattgtttttgaggcttttgatagagatggaaaactgagagcaatttgtggtggaggaaggtatgatagactactttcaacatttggtagtgaagacataccagcttgcggttttggatttggagacgctgttatagtggaactgctgaaagaaaagggtctgttacctgatctgtcacgccaaatagatgacattgtcttcccattggatgaggagcttgaagggccagcatgtagtgttgcttcctctctgcggaggcaaggcagaagtgtagaccttgttgaagacaagcgtcttaaatgggtatttaagcatgctgagaggataaatgctggtaggctgatattggtcggaaaatccgagtgggagcgaggtatggttcgtgtgaagatattatcaaccagagaagaatttgaggtcaaggctggcgaactacaataagagaatttgtgaaggttttgcttctaatcctaggcctttttaccttctttatgacttcatccactaaagctctgttgaaacacagcgattcatgtcattcacacataggaggggtacaactcgtaggcactccattattttactgatagaatgcctttatttgctactagatgatttacacgtttgccgaaggtgattgtatcttcgtttgcagatacccttacactatagagttcaggagtaaataaactgcagaatacataactgcc

SEQ ID NO: 20007 - DNA, 1731 bp, Oryza sativa
  ref <308>: DATABASE ACCESSION NUMBER: AK070340
  ref <309>: DATABASE ENTRY DATE: 2001-12-06
ggcggtgagccattgatttgctcttgcccgtgtgtgagaagcagaagaagaagatgatgaaaatttggaatttatttgggttcttgcaggttgctgcttcgtggtgtgctcgtcgagggaggaggcagacaaggccatcgccgcgtaccacaacaagtgcaccctcccaggagcgtccagggcaatgcaggtaaaatacgcggacggcgagctggaacgattagccgcagagcagaagcttttcattggcatgcttccaagggatgtgaaggagaatgaagtttctgcattgttttcgcagtacggaaatattagacaactgaaggtactgagaagtccacagaaaacaagaaaagctgcagcctgtgctatcctggaatttggaagcaaagaacatgctagagcggccattgaagctttgaatggcacacgtgttgtgttcaatggttcaagtgcgactttggttgttaagttggctgacactgaaagggaaaagcaagctagaaaggcacagaaagctcaggctcaaccttctaagcccttaagattttatctcttcccccagctgctatcaatatctggagcaccacagatgagctttcttcctccatataatgtattggattacaagactgaaggaacaacggatccagaattgaaagatctaatgaagatgacaaacgacaaacttgagatgctagtgactgagctcaagagcgtggtgaacttattagagaatcgagttacatataatgatccaatacagccaattcagcattctctcttacctgtagagcatgacgagaagcaatataagcctaatgagtgtgattccaaaacgttagaggtaccagggcattatggacacacgaagaacccattggcattgtacagcactatgtacccacatgtcaatcaaggaaatttactccagggactcaacacaaatatatttccaggaacagatcctaaaatttcgaacctgattcaatctgctggatacatacaacctccttaccctgatttgtcaggtcttcattacccagtatcatatgcaggtgccttagtgggagatacaccacagtatttctctgatggtaaggtaaacataccaaacagtcatagcaatcatgcctcatctgcagcaaacacaaagatagggagtaagattgaaggacctcctagggctaatttatttgtctatgacatccctcaagaatacggtgatgaagatctggcaaatctatttcaagaatttggtaggatcttgagtaccaaggttttcattgacagagctactggtgtcagtaaatgtttcggctttgttagttatgacacaccagcatcagctcaggctgctatcaggaggatgaatggctcacagataggtggcaaaatgctcaaggtacagctcaagagggaaacatgatgtgacaactgacaacccagttgacatgtagtgaaattatgatgtctggacattgtagtgctgagagtaccatcctgcatagtgaacaaggcagtgcagctggatatggaaaaccatagatgtagctatgacaaggttgttcattgttactcttgaagatcgccagaatttctaggcacagttctcttgttgcattacacacaactaatgcatatgaacaagccatgtaattggatctggcatttggtcaagcataaggtagttccgacattcgattatggaacaaatatgttatagactcc

SEQ ID NO: 20008 - DNA, 3713 bp, Oryza sativa
  ref <308>: DATABASE ACCESSION NUMBER: AK070341
  ref <309>: DATABASE ENTRY DATE: 2001-12-06
gagcggcaaagcaaaagaaaaagttagatcagaggagagctcagagctcaaagagttgggaagccatggcgggagggcagctcaacgtgctgagcacgctcgaccaggcgaagacgcaatggtaccacttcatggcgatcgtcatcgccggcatgggcttcttcaccgacgcctacgacctcttctgcatttccctcgtcaccaagctgctcggccgcatctactacaccgacgattccaaggacacccccggcgcgctcccgcccaacgtgtcggccgccgtcaccggcgtcgcgctctgcggcacgctcgccggccagcttttcttcggatggctcggcgacaagctcggacgcaagagcgtgtatggtttcacgctgattctgatggtcgtgtgctcggtcgcgtccgggctctcgttcgggagctcggccaagggcgtcgtgtctacgctctgcttcttccggttctggctcggcttcggcatcggcggcgactacccgctcagcgccaccatcatgtcggagtacgcgaacaagaggacgcgcggggccttcatcgccgccgtgttcgccatgcaggggttcgggatcctcttcggcgccatcgtcgcgctcgcggtgtcggcggggttccggcacgcgtacccggcgccgtcctactccgacaaccacgccgcgtcgctcgtcccgcaggccgactacgtgtggcgcatcatcctcatgttcggcaccgtcccggcggcgctcacctactactggcggatgaagatgcccgagacggcgcggtacacggcgctcatcgcccgcaacgcgaagcaggcggcggccgacatgtccaaggtgctgcacacccagattgaggagagcgcggaccgcgccgagacggtggccgtcggcggcgagagctggggcctcttctcgcgccagttcctgcgccgccacggcctccagctcctcgccaccaccagcacgtggttcctcctcgacatcgccttctacagccagaacctgttccagaaggacatcttcagcaaggtcgggtggatcccgccggcgaagaccatgaacgcgctcgaggagctctaccgcatcgcccgcgcccaggcgctcatcgcgctctgcggcaccatcccgggctactggttcaccgtcgcattcatcgagatcatgggcaggttctggatccagatcatgggcttcgccatgatgacggcgttcatgctcggcctcgccatcccgtaccaccactggacgacgccggggcaccacaccggcttcatcgtcatgtacggattcaccttcttcttcgcgaacttcgggccaaacagcaccaccttcatcgtgccggcggagatatacccggcgcggctccggtcgacgtgccacggcatctccgccgccgccgggaaggccggcgccatcatcggagcgttcgggttcctgtacgcggcgcaggaccagcacaagcccgagcctgggtaccccagggggatcggcatcaagaacgcgctcttcgtgctcgccggcacaaacttcctcgggacgatcatgacgctgctcgtgccggagtccaagggcatgtcgctcgagctttatttaggttacagtatagaaccgaaaaaagaacgagaggtgaggcgcatggaggaggagggagagaaagtagtggcctgggcgtgcgacgcggagggggcgggcgatggagagcggcgcgaacgcacggcggcggcggcggctggtggataggggatccgatcgcctcgccttcatcaccggccaagctcagagcctcccctccgatccgtccccagattcaccactttatactgttgatgctgcttcccttcagcgatctgaacgtcagctaaatgaagttggcattggtgatgacatattcaactacataactcagttgcaaaaatcagaatctggtgttcaaccgactagtgaggcccacctggaaactcataaagagaaacaccaaggtaatgaaagtgacctccaaaagctcaagacaagcaatgtggttcctgaaattcagccagtaaatgaaaaggcatttcaaaggcacagtgaggaaaccctcaggaagaagaacagtcatgacagatcggcaagtacacagcctatgagggagatggaaacaagatccagatatgtgcctccaaatcagtctaatcaatctgatagtgcaggttggtctgtggaaactctgaaggaaatcctgaatttcgcaccacatgggattacccaggccatatcagctacagagtataaccgatggctgtgagccgccggccgcctgcgcacttgagctccacttcctctcgcgggaggcgtcagccgagagccacagccaacagcaatgggggccggatgggaggagtacaagccgtgcgcggcgatggtggcggcgcagtgcatctacgcggcgctggcgctctgggccaaggccgtgttcaccgggggcatgagcgccatggtcttcgtcgtctaccgccaggccatcgccaccgtcttcctcgtccccatagccatcattgccaacagaaggaagaagaaggagacgaggctaggaatgacgggcttctccttgatcttcgtggcttctctttttggggcaacggtaaaccaatacgtgtactaccagggcctgcatctgggatcgtcgtcgatggcgacggccatgagcaacctgatacccgcgatcaccttcgtgatggcagcgtcagtaggactagaaaaggtggacctcaggagagtgaggagcttggcgaagatattcggcaccaccgtctgcgtcggaggagccatggccatggcgttcttcaagggccccaggctgctcaactcctcctctctgatcgtcgacctgaactttcttctccactcgtcagcgagcagcaagtgggttatgggcgccctgttcctcatctgcagcagctgctgctggtcactctggctcatcttgcaggtgccaatctgcaagtcgtacatggatcccctgacgctgtcggcgtggatgtgcttcctgtcgacgctgcagtcggcggtgctcgtctccttcctcgtgccggacatcaacgcctggaagatccactccctattcgagctcggatgctgccttttcgccggcgtgtttgggtcaggcgtgacgttctacctgcagtcgtggtgcatctcggtcaggggccctctctactccgccatgttcaacccgctctgcaccgtcatcgccaccgtcgtcgccgccgccttcctccacgaggagctgcacatcggcagcttgttcggggcgacggccattgttgccgggctgtacatcgtgctgtggggcaaagcagcggatggcggcggcaagagcggcgggagtgtgccggagcacagccacgacgtggagaaggcggcgatgcggtcggaatcgcagctcgacgtgggtgaaggcatcacggagccgctcctagaggccggcaacacggccgagaagtagggtagaggagattttgaagttgatagccagttgtatcttctacaaacgttttttttttatttatgtctcctggtagggagagcatggtattttggatgtaactatataacattcgaaagtatttagtatggataattttcaaatgtaactattgtataattattctgtaactatcttatagttttttttttaaccaaaggcaggagctctgccattgtatt

SEQ ID NO: 20009 - DNA, 2600 bp, Oryza sativa
  ref <308>: DATABASE ACCESSION NUMBER: AK070342
  ref <309>: DATABASE ENTRY DATE: 2001-12-06
gggggggcggcgcggccaaggggcggatcggagcggagccagcggcgacgacgacagcatccactgtcccgaccctccaattccggcattcaacatcagataggccaagatgaacatcgccactggggcaatgaacaccctcctccccaagcttggggagctgctggttggcgaatacaagctgcaaaagggtgtcaagggagagatcgaagaacttgagaaagagttgaaaggtatgaccgcagcactccacaaggtggctgagacacctgtggatcaacttgaccagcaggtcaagatctgggccagcgaggtgagagagctatcttacgacatcgaggatgccatcgacaccttcatgttaaagtgcaaggggcatgaacctgccacgagcttcaagaaggtcaccaatttgttcaacaagttcaaaactaaccatcagatccacggtgtcatcaaagacatcatggaccaggtcaagaaggtcagcgagcgtcgtgacaggtgcagagtcgatgacatcgctgccaggccaactgttgtggatgttgattctcgcctagaagctatgtaccgaaaggcaacaaaactcattggcattagcaagccaaaaaatgagctaactaagcaactcttggaatatgacggctcatccagccaacaatcaaatataatttctattgttggattcggaggcttaggaaagacaactcttgccaattcattatttcaggagcttaaggcaaaatttgacagctattgttttgtttcggtgtccttgaatcctgatataaacaagattctcaagaacattcttctccaacttgatgagaaaatgtattcccacatagatgaaacatgggaaacgaagcagctcatcgacaaaattagagacttcctcaacaatagaaggttcttgtgcgtgattgatgatgtatggaaaaaatcagcgtgggatactatcaaacttgctgtgcaagatgctaaacttggtagcaaaataattgtaaccacgcgaaacaaggtcattgcagaacatgcaggcggtggtgtttatgaaatgaaacccttatctgatgatgattccagacaattgttctgcaaacgaatatttgactctaacgatgactgtcctgctgatttgtgtggtgtcactgagaaaattttgaagaaatgtggtggtgtaccgctagcaatcatcactacagcatgcctacttgctagcaaaccaaggaattcagaggaatgggacaaggtcaataagtctatcagtttggggcttgagaacaaccttgatgtggacaacatgcggaagatattaagcctcagttacagcgatctaccttttcatttgaagacttgcttgttgtctctaagcaaatatactgaggatgagctaattagaaaatatgttttgatatggagttggttagcagagggttttattacagatgaaacacgacctgcagggacaagcttgcaggagattggcgagagctacttcaacgagctcatcaatcgaagcttgatccagctaatgagtgagaacactctttgggatgaagatggtaaggtgcatgcatgcaaagtacatgacatggtgcttgagctaataaatcagctgtcagtagaagaagattttgttacaacgtatttatctgatggtcaacaaacaggtaaacatacatgtacagcacagaagaagaagattcgccgattatctctccataacagcaataagtcctatgcctcgccagaagcaagagaacaattgtccaaagtaaggtcgattactatcttcggcaaggtcgactcgataccacccttgtcgagctttcatgtcctgcgtgtgttgcagcttgaggactgcagtggaatggacaagaaccatcttaatcatctcgataagctactcctcctaagatttctgcgtctagggcactatggtgccactgagctccctgaaagcattgggaaactggaatctctcgaaaccttggacataagaggtgcacgtaaaccaagttcttttaaatctcataaggtactgtttccaatgtcttttgccaaactaaggaaactgttgcggctatatgctggcagagtgaagctggcacaaggtctgatgctgggggatatgaaatctttacaggagcttgtaatagaagctacccgaaaggtaataaaagagattggcaatttgacggagctaaggactcttaggatcgttttcagtagtgaaaaaacatttgagttaaaggaatccattcaaacgtctatacaaaggttcaccaatttgcaagacctagatttgagaaataataatagttttgaagaaatcatagacatgcaacaggttccttctggtctccaaaggttgttcatgcaccattcgtatatgaaagcattcccatgttggatcaattcgtcgatgctctcccgcctcaccaccttatccatttggctgtgttttgaatatctccagtctgaccaccttgatcgcctcgctgagcttccatctcttcgctttctcaggctacagttagcatttgtttcggaacaactataggaaaagctcactatccacagaggtgcatgtg

SEQ ID NO: 20010 - DNA, 1097 bp, Oryza sativa
  ref <308>: DATABASE ACCESSION NUMBER: AK070343
  ref <309>: DATABASE ENTRY DATE: 2001-12-06
gacattgcaaatgatttcattgagggtctccaattgaggcgggcggtggcaggtcaaggtggcgattgacaaggcgggaggggatccatcggttggccggccggtcgtcgacgccatggcggtgagccagagcgcgcagctcggcatggccaccgcgttcttcggcgcgctgtccttcctcctcgcgatcctcggcgagctcaacaagccgccgcacgggacgccgatcaggggcaggggcgtggtggtgtgcaagttcccggcggacccgacggtggcgctgggcgcgctctcggcggtggccgccgcgtgcggcgccggcgtcggcgcgctcgccgtgttcttcccctacaacggcaagcccgtcccgaggaaggccctcttcgactacaccctcctctacgtcttcttccatctcgccataggcatcacggtggcagggatagccacgacggcgtgggtgacggcgagcgaggccatgcaccgcgtccggaacgtgcacggcgtcgacccggagtatgcctgcccgacggccaagaccggggtgctcggcggagtggcgttcctcaacctcgacgcgtcactcttctggctcctctgcctcatgctcgccggcaacgtcaaggaggagtacttcgacgacggcggcggcggcggcgaggtcggcgacggcgtcgcggggctcgaggagaaatagccagttagccaccctggcttgtacatgactcgcgcggggaaatcgccaccgcagatttgcatcaagattcggacatatacaactcaggtggggaaaaacaacgtcacgagggagaaatacagcacgcatcacggaaacgatcgaacggcagatgggctaggtgcagaaaaaccgcgtcccatatgcgtgtgaatatgcatggcaacatgacatgtgtgtacatattatgcctggtcgttctaccgagactctcctttcgttgtacataaatttgtctgatccgtattggctgccgctgaagtgcattgttcagtactccctcagactcataatatggcaatctagaattagatgagatatttcaatgaatctgaatagaagggtgttcagacgttatact

SEQ ID NO: 20011 - DNA, 1128 bp, Oryza sativa
  ref <308>: DATABASE ACCESSION NUMBER: AK070344
  ref <309>: DATABASE ENTRY DATE: 2001-12-06
gggcataagcaaaggtttgtgtgtgtcagagtcactaggcctagctagctccatcagttttggctctgggatggtgctggggcagcttgcactgtggtccaagattgccaatgaagcatcctgtgggtcaccaagatggatagggaagagcctctcttgcgtatgcatcaagagaaaaggagcctatgagagaatatgcatgaaccttacaccagtgcaggaagagaggcttcagaggctgaggcaccgtatgaaggtttattttgatccttctagacgagatcatcaggaagcattgaaagctctttggcatgcaacatatcctgaccaagaactacaaggtttgatttctgaacagtggaaggacatgggatggcaaggaagagacccatcaactgacttcagaggcgcaggattcatatctctggagaatcttctattcttcgcgaagacattctctgcctcatttcagaggctgctaaagaaacaatgtggcaatcgagctacttgggagtacccatttgcagttgctggtgtaaatatcacattcatgatcatgcagatgctggatctccaatctactaagccaagaacgtttgttcgagctgtttttatccaaatgctgtcagaggatgagtgggcatttgatctcctctactgcgtcgcgttcgttgttatggacaagcagtggctcgacaagaacgcctcctacatggacttcaatgagatactgaagtcgacacggacacagctggagagggagcttctgctggatgatgtgatgcggatcgaagacatgccgtcatacagcctgctctgctagtagtggccatactggttgaacaatcatgattgagtcaatggttctgacctctgagtgtatagccccctcccttttgttgattccagggaagggaatttttgatggcatgtagagcaatggcctcctattgtcatgctgaacttgtcccactgtaaacaactcatctgggcatcaccacaatgaattagaattgctagcatccaatgtcaaagctggtgttaatctgtcatattttaccccatggatgtaacaacagaatcaacgagtgggtaaaatcaacttgcaacctctggtgaatggtgttc

SEQ ID NO: 20012 - DNA, 828 bp, Oryza sativa
  ref <308>: DATABASE ACCESSION NUMBER: AK070345
  ref <309>: DATABASE ENTRY DATE: 2001-12-06
ggatttccatcgctagcttgcggcgaatcgcccttgtggatccttgaggcgatgccctaatcgcgctttgcaatgcgggcggatgtacatgcggcggcttcaaggggcgacggttggaggagcagcggtgcccgcaggtggtacctcatttggtagtgcgccgaggggtgagacgaaagtgatgcaactgcaagcggatcgctcgcctcctccaatcctcgcataaatcaacagaccatttaccttcagaagctggggtcatctctacactgacttcactagttttgttaagcaattccccatcccatggagaaccaggaaacagagtaatagctcaaggtccaggcatgtcatcaagggtttgacatcatgactcaaattgttggtggcatgtcatttcagagcgctacagcaatcccaggatgacaaaatgatccatttattgatgcttagcaactctgctgggggcataccgtatgattcctcgtgaagtggagtggatcatgacggtattgaattttgatttctccttgctgcttgacttgtgtaagaaggcccagcctatgcagccgtgcgaggttttgtaggccttggttagaacatagaaatgggcagcgtcgtgcccttagttcatatatactagtttctaagaaattcatatataaggagttttcgcgaaatcgcaccgtttgatagaccaaaaggcatggcgttggatggaatagttgcattccttagaaaaggatgcaccctgtctttcatcctttttccgaaaaatattcttcctgtttcttaatgtataaggatcaaaggcgtccttcttatggc

SEQ ID NO: 20013 - DNA, 1937 bp, Oryza sativa
  ref <308>: DATABASE ACCESSION NUMBER: AK070346
  ref <309>: DATABASE ENTRY DATE: 2001-12-06
ggatgggcgcccgcgcctctcgccaccgccaatcccccgaccaatcccaatcccaatccccatccccacaccacaagcaccaccaccaccaccaaaccacccgggcccccaagcccaagcccaagccccagccaccgccgccgcagcagccgcgatctcagcctccgccgccgccgcggcaccagccccagcaggcgccccagcaggcggcggcggaggatggggtggggcgggtgctggggcggcccatggaggacgtccgtgcgacctacaccttcgggcgggagctggggcgggggcagttcggggtgacctacctcgccacccacaagcccaccggccgacgctacgcctgcaagtccatcgccgcccgcaagctcgcccgccccgacgacctcgacgacgtccgccgcgaggtccacatcatgcaccacctcaccggccaccgcaacatcgtcgagctgcgcggcgcctacgaggaccgccactccgtcaacctcgtcatggagctctgcgagggcggcgagctcttcgaccgcatcatcgccaggggccactactccgagcgcgccgccgccgccctctgcagggagatcgtctccgtcgtccacagctgccactccatgggggtcatgcacagggacctcaagcccgagaacttcctcttcctcaacaagcgcgaggactccccgctcaaagccaccgattttggcctctccgtcttcttcaagcccggtgagcagttcagagatcttgttggaagtgcatattatgtggctcctgaggtcctaaaacgactatatggagctgaggcagacatatggagtgctggagttatcctttacatccttctatcaggggttcctccattctgggcagaaaacgaggacggtatatttgatgctgttctgcaaggtcatatcgacttctcatctgaaccatggccttctatatctagtggtgcaaaagacttggtcaagcggatgcttcggcaggacccaaaggagcggttaactgctgctgaaattttgaaccacccatggattagagaggatggagaggccccagataaaccacttgatattacagtgatcagtagaatgaagcagttcagagcaatgaacaaacttaagaaggttgccttgaaggtcgttgcagagaacttgtcagaggaagagattgtgggtttaaaggaaatgttcaaatctttagatactgataacagtgggacgataactcttgaagaactaagagctggtctaccaaagcttggcactaaaatttcggaatcagaattaaggcagttgatggaagcggctgatgttgatggaaatgggtccattgattatgttgaatttatatcagcaacgatgcacatgaatagattagagaaggaagatcacatatataaagcatttgaatattttgacaaggaccacagcgggttcataacagtcgatgaattggaagaagctctgacaaagtacgacatgggtgatgaagcgacaattaaagaaataattgctgaagtggatacagaccatgatggaagaattaactaccaggagtttgttgccatgatgaagaacaacagccctgagattgttccaaatcgacggcggatgttttaagcctttcctacagttattgtgaagtttttttcctttcacaaattctatatggttccatcttagggaagtgagcattatctttgtaaatgttacaagagcagttcgtatcggcggaattcaatgaagtatatgcaaggcatattggactcgttatgtatcatggtggatagctctctgaagtgggtgtggtgcgtttgtgtatgtatgcttgtgctttctggccatatgttttctgtctcttgataaaaagagctctgtaaaacagtttctactgatcatatcaggcaaggcaagataacgcttttc

SEQ ID NO: 20014 - DNA, 1568 bp, Oryza sativa
  ref <308>: DATABASE ACCESSION NUMBER: AK070347
  ref <309>: DATABASE ENTRY DATE: 2001-12-06
gacacgtctccaaaagactcgggagaagagatctaacagtcaactcgtaaaatactccctacgtttcatattttaaattatttgactttttttagttaaacttgttaaagcctatgtttataaaaaatatattagtattttaacataaaataaacatattataaaaatatgtttgagagtagaaacagccggcgaagcgtgacgatggacgctcgacggcggcggctgtccccggtggtggtcgtagcggcttttcttttcttccccctgttcttcgggagccagccggcggcggcgtacggcgaggcttcaggcgccggcggcatgacggcactgcagaagcacgcggcgttcttcgacaaggacaatgacggcttcgtctccccgaccgagacatacgacgggttacgcgccctcggacttggagctggcttctccatcttaagcgctgcgttgatcaatggcgtactttcactcaagaccagacctcgcggatatctggacacagaggccacacgccgtcgagactcgagagattcaggaacagaaaccgccgagagagttcgtagcagtcaacgcgcgaggcagagccgagaagaaaccgccggcgacgcacgcgcgatggacgctcggcggaggcggttgtccccggcggtggccgtggcggcggctcttcttttcttccccatgttcttcgggagccatacgccggcggcggcggcggcgtacggagaggcttcaggcgacgccggcgtgacggcgctgcagaagcacgcggcgttcttcgacaaggacggcgacggcatcgtctccctctccgagacatacgacgggttacgagcactcggactcgggtctggcctctccagcttgagcgccgccttcatcaatggcgtcctttccccaaagaccagacctgacaatggaacagcaccacgcttatctatctacatagagaacatctacaaggggattcatggaagcgattcaagcgcctatgattctgaaggaaggttcgttgctgaaaagtttgaggagatattcgccaagcacgccaagaccgtgcctgatgctctgacatcggacgagatagacgagctgcttcaagcgaaccgcaagcccggtgactacactggatgggtcgcagcatcgtcagagtggaagattctgtacaagatcggcaaggacaaggacggccttcttcgcaaggaggccgtgcgagaagtctacgatggaagcctgtttaccaagctggcggcggcaaggataaacgacgaaaaccaagcatgattggtgacagctgatgggatcatctccattgattctcctgattaagcatctcaaatcatgtgccactgtgatatgagaacgattgagatgatgtctgaacacaaaaagatagtcatgcaagatagaagtatgaacaagtgtggacagaatctgcagatggggatggatcgtttagttctgtccttttttgttggtttcttggggatattgaatgtttatattattatacctgcaaatggttggcagtgcaaggctgcaagcaatggcacactatttat

SEQ ID NO: 20015 - DNA, 599 bp, Oryza sativa
  ref <308>: DATABASE ACCESSION NUMBER: AK070348
  ref <309>: DATABASE ENTRY DATE: 2001-12-06
gtgcgccaatgcttttcaagggagcttattatgcaatgaacatagtggatcttcttgcaaaatcaatgtcttacttcatggattcgagagaataggagaacagtcgcctgacaaatagttggttcagtccgattcaggtaccaatccaggtgcctaaacaaatagaacctttattgatttgctagttgataaggtaaatatccagcccactaaatgctaggcttaatgaggataagggcctccaaaaaaattcttttcgttctatgaactttaaggtgtatgaagtctcatagtcaactcttgtagcggaacgatagagactctatttcacttaggttgatttaatttaggccggaggcagacctaagtcaaggtaatcctcctttgaaacactttggtattgctcttagatagatcataatacaaataatcaatcagagcgcagggagccatctcattatctttccgtaaagaaaaactatggtggactaactgatctttctatcagttgataaaagagcccaatgcaaaaaaatgcatgttgggtctttgaaacagttcgaatcatttcgataataatccgtttgatctgttttacg

SEQ ID NO: 20016 - DNA, 1122 bp, Oryza sativa
  ref <308>: DATABASE ACCESSION NUMBER: AK070349
  ref <309>: DATABASE ENTRY DATE: 2001-12-06
gagaaaccccctctccgcatcccacagccacaagcggcgccgcaccacttcgtcctcaaccaaaacctccgccgccgccgccgccggagaaggaggaggaggaggagtagggagagtaagcggggagaggaagatgtcgttccgtgcgcgggagatgtacaagaaggtggtgcggcgcgtgggcggcgaggggaagctgccggcggagctgatggcgtcggtgaagaacttgctgcctgacagcaaggtcgtcatggggagggccaagcgcggcatctacgccggacgccacatccagttcggcaacaaggtctccgaggacggtggcaacaagtcaaggcgaacatggaagccaaatgttcaggagaagcgtctttttagctatattcacgaccggcacattagggtcaaggtaaccacccatgctcttcggtgcattgacaaagctggtgggatagacgaatacctcctgaagacaccttacaacaaaatggatactgagatgggggtagcctggaaggcaaagattgagaagatgtattcacagctagctcaaatggaggtaggcttcttctctcctgaggaagagactaagatcgaacagggttttgaggaggctcgagctgccaagagagagcaccgcagggaagcaagaagagctttggctaagcagactcagctagaagctggtaacgctggtggtgacaaacagctgaagctgcttctaatgttgcagtgaagtcctagcttggacctatctgctcgtcatgattggtcaaaaggagaatcattgagtgccactgaccaaataatggaggattttcgtttcatataaagcagggatcatatgctgagtcagtaacccctgtttactggcagcagcagcagtgtatggtaagctggagtctaatactatcagcatgtgggtgttgtaagcagttgctgaacaaaatcagttaggtggaaattttgtacacttactgaatactcgtgtcagagttcagataactttcttgtagaattttgtatcttctactactgcccattcaacttaaacgtcgaaataatctatgcttgccaggatacgtggtaatgtgctacggagctatgccgtttttatgc

SEQ ID NO: 20017 - DNA, 1654 bp, Oryza sativa
  ref <308>: DATABASE ACCESSION NUMBER: AK070350
  ref <309>: DATABASE ENTRY DATE: 2001-12-06
gcgtccttatagcaaatggagctgcagcaggtgcattgacagatcctacttctgaatttccttctggaagaactccagccgatttagcctctacgaatggacacaagggaattgccggttttctcgcggaatctgctttgacaagccatctgtcagcacttactttaaaggaatcaaaagatagcaatgcggaagaagcatgcagattaacaattcctgaagatctccctgaaatgaattatggtcagcttgctgtacaggattctcatgctgaatcattaaaggattcattaagtgctgttcgtaaatccgctcaagctgcagctaggatattccaagccttcagggtggaatcattccacagaaagaaggtcgtggaatatggagatgatgattgtggattatctgatgaacacacattttcacttatttctcttcaaaaggtcaaacaagggcaacatgatacacgtttgcattctgctgctgtacgtatccaaaataagttccgaggatggaagggaagaaaggagtttatgatcattcgccagagaattgtgaagttacaggctcatgtgcgaggacatcaagtgaggaaaaactataaaaaagtagtctggtcagtaggtattgtcgagaaagttatattgagatggaggagaaagggacgtggtttgcgtggctttcgacctgagaaacaattagaaggccagacacaaatccagcctgcaaaaacagaggatgaatacgattacttgcaggatggcagaagacaggctgaaggcagactacagagggcactggaccgggtgcgctctatgacacaatacccagaagcaagagaacagtaccgtaggcttacaacttgtgttgctgaaatgcaacagtccagggtatgactaatactactcatctcttaccagatagtcacactattctgggtcatgcattagtgaaggaaaaatgtctaatttaccactgctctatcttgcttttatcattcgttccttttttttttccaataatgacaaactgatatcttcctcagctagacaaccgaaatctgaaaatgcttcatttgctaaagaccattagtaaatcatttgatttccgagcctagttgtttataatcaatcatcttatattcttctctgttaaggcccaatcttctagtgtactctgataaccaggtactacactaacaagcactaattcacagcacggtttttgaaaaataaaatcaaaccgaagaaagacttccattactttcgttagcctttccttttttttttcttttctctttttcaaaacagcctatatatctgtttgaatcttgcttagcctttggtgattttgggcagatgatgcaggacgagatgctaagtgaggcagctggtgctgacggaagtgatttcatgaatggactggaggacttgatatgcagagacgacccccaaatgtctgccatttggtgaagtcgaagttgttacatcagttaggctgatcattgccttgttcattgccatattagccttgtaaattcttccgcttgtatttcactcactgcttaatatctagctcatgctgttagtattatgtaactctgtgcactgatcataatagaatatttctctcctgtatgttacaggtaggttat

SEQ ID NO: 20018 - DNA, 834 bp, Oryza sativa
  ref <308>: DATABASE ACCESSION NUMBER: AK070351
  ref <309>: DATABASE ENTRY DATE: 2001-12-06
gacatcgcaatcccagctcccttcttcccaccgattccaatctccagaattctgcttcgatatggccgccaagatctacatagtgtactactccatgtatggccatgttgcaaagctagcagaggagatcgagaaaggtgcttcttcagttgaaggagttgaggtcaagctatggcaggtcccagagactctttctgatgatgtgctcaccaagatgggtgctccttcaaagaaagatgttcccataatcacacccgcagagcttgccgaggctgatggtgtcatctttgggttcccaactagatttggaatgatggctgctcaattcaaagcattcatggatgctaccggtgggctgtggaggacacagcagctcgcaggcaagcccgcgggaattttctactctactggttcccagggtggtggccaagaaactactccgttgacagcaattactcagctagtgcatcatggcatgatctttgttccagtagggtacacctttggtgctgggatgtttgagatggagcaagtgaagggcggaagcccgtacgggtctggcacattcgctggtgatggatcaagggttgccactgagcttgagctgcaacaagccttccaccaagggaagtactttgctggaattgcgaagaaactcaagggttccgcatgatcacctagacaatgtttgagtctgatcatccatatggaataaagtttcagctctaaagttgatagtttgttattttacctcagagtgccattggaatgtaatttgggttgttgcccaatactttgccatgatatatgtgatcccataccttttcctgcttt

SEQ ID NO: 20019 - DNA, 1023 bp, Oryza sativa
  ref <308>: DATABASE ACCESSION NUMBER: AK070352
  ref <309>: DATABASE ENTRY DATE: 2001-12-06
ggcaaggatgccagcactccgcacactcatcctaagaacccggcagagaatttcgtggacagttggtggtaccggactgtttccgaacctgagattctgtgagatgaacatagcactcacatttcttcaaggagccatgccgatgctcacggagcttcaattcgagctgtgggccgctgaagatggtgccgccgctggtgatgttggcttggggcaactccctctgctcaattacattgggcttctcctcatgtgcaccggtgcgacgggcaggcaggtggaggaagcagaggtggcgtggaggcgcatggtgaatgctcacccgaaccgtcctgccactgttgtgcatcgaattggaaggtatttctggtttggttaatcatgttaaaaaaagtattccctctatttcacaatgtaagtcattctagcatttttcacattcatattggtattaataaatctagacatatatatctatctagattcattaatatcaatatgaatgtgggaaatgctagaatgatgacttacattgtgaaacggaggaagtaccgctttcttaatcaattgattagttcacattccgctacctacacgcacgccttcatagctctgcttcggactgctctctaaattctgtaactaatcagctttgcttgttctcagttggcgtatttcgttcctcagttcatatcgctctcgcactttcttttttcagcacctgatgaaagaaggtgatgatgatgaggagatttcagctagctaaggatcacattgacgagaatggtgacgacgagaattcagcatatttggaccaagaggtgctgcacttgcatgtgtcgtgcatacctattcgatcctggtcacgcgatattacatgatttactgaccattggttaatttgttgcctgtttctatcaaatggtagagggggagatatactgtgaatgttgacacattgtatagagcctttaggggaccggtatatataaggaagcctacgatacaaatcaatcatatcct

SEQ ID NO: 20020 - DNA, 1551 bp, Oryza sativa
  ref <308>: DATABASE ACCESSION NUMBER: AK070353
  ref <309>: DATABASE ENTRY DATE: 2001-12-06
gtttatctggatttcatgctgaatttacttttgaagtatgcatacacacaaaaccacttcacggcttgacttcatctttcccttgtcagcaaaaattgtttgagacatgtcatgttctttttactcttttgtactttagggaaggagcaaaagttacatggggttacattaatagaatcttgggtcaaccttcactgatccgtgaatcatctatgccaaagtttccactttcaaggtttaaggctctcaaatctacttcagcatctctgtcaggaggtgcaggctttgagaatgttattcttcatccttcactgaaacggaggattgaacatcttgcacgagctacagcaaatacaaagtcgcacgatgcaccatttcgcaacatgctgttctatggtccccctggaactgggaaaacattagttgctagggagatggcacgcaaatctgtaagttttcaatagatctaattggctaatctattctgctccattcttcgagaaatatcaggcttatggatcttctataaagaaccttgttttctggattttttttaatacaaaaatatgtatccgtcaacttcagttatacaacaattgtataatcttaccattgcatcctttatgtgacagggcttggattatgccatgatgacgggaggagatgttgcacccttaggatcagaagctgttaccaaaatacatcaaatttttgactgggctaagaagtcaaggaagggcatgctgcttttcattgatgaggctgatgcgttcttgtgcgagtatgttcacaacttaatatttaagcatttgtctgaccactgattttttttttcacagatagtgatatgcatgttaatgagctaatcctgaggatattcccaattcttaagcttgacttgaactaattttgagcctgacagtacatccaatctctttgcagccactgaattcaaacaaagcgcaacagcacccacatgagcgaagctcagcggagtgctctcaatgcactactatttcgaactggagaccagtcgagggatattgtccttgtccttgcaacaaaccgacctagtgatcttggtgctgctattacggaccgcattgatgaagttattgagttccctttacctggggaggaggagaggttccagctgctcaggttatacttaaaccactatatgctcaaggaagatggaaaaaactcgttttgggactcactgctgaaaaagcaacggcagaagatacaagttaaggacataagtgatgatttgctcagggaggctgccaggaagatcaatggattctctggcagagagattgcgaagcttatggccagtgtgcaagctgctgtttatggccgccctgactgtgtgttggatccccagttgcttatggaggtagttgaatacaaagtggctgagcatcatcagcgcatcaagcttgcttctgagacttcaacttgagcaatgttatagattttatcagaaagcagcagtccttttcagatctactgtccccatatatatgttctgatatgaggaatggagtg

SEQ ID NO: 20021 - DNA, 620 bp, Oryza sativa
  ref <308>: DATABASE ACCESSION NUMBER: AK070354
  ref <309>: DATABASE ENTRY DATE: 2001-12-06
gacgtcactccgcatcattctccatctcgatcccgtctcctagcatggcggcagccgccttttcatggcgactacctcttcttctccctaccacggagttagcggaacggcagtggccgcctattcctctcctcggcaccacgctgtagcagtgcctcttcctctccctggcgccacggtggtgacctcttcctttcctctgtgcggcggccaccggatccggctaccacgagctcgggggtgaccagatccagccaccatgagcctcttcctctttcccgcgcggcggcgacagcctctttctttcccctaccagacgcggcagccacaagatccagccaacacgacagtgagcgtaggttactccaacgcggagagtggggcacttctaattggagtgccaaaatttgtgagtggatttttatgacttgtgttgtgtgatttgtgcgggggatgttgttgtttgatggatcgatagtgatttgtgttgtgttatttgggggatattgttggattgattgattgtggtatgtggatgtaggatggtctaggtgtgatagggagtggctcgatgcatcagctcagaatcgagccaactttttttatactagaaaaaatgc

SEQ ID NO: 20022 - DNA, 992 bp, Oryza sativa
  ref <308>: DATABASE ACCESSION NUMBER: AK070355
  ref <309>: DATABASE ENTRY DATE: 2001-12-06
tggaagaaggcggtggcatcccccacgctcctcgaccgcctcgccccccctctcgccgccgtcgtccctccccttcgccggctgcgatggggtgcgccgcgtcggcgacggacagcgctgagcggcggaggccggggcggtcgccgggccacgacggcgagcagcagcagcagcaggatgggaggaggcgcgggtgcaaggtggcgccggagcccaaggaggaggacggcgcggcggcggcggcgttcttggcgtcgatgcccggatcccccagcttccgatactactgccagaagtccgccaccgtcgacgccatcgtcgccgatgccgacggcgacggcgacagcgacggcgacgaatgcgtcagaatcaccgagacgcctcagccgatcaagaacaatggccatggctccagcgaggtagagatcaatccatggcttcgatcttcctcccgaatccctaaccgaattcatcctgaatttaacatgcagctctccaaatcggcaccggaggcgagcaggtgggtcaggttcagaggcctcgcgctcgccgcatggtgcagcttgttcagccgccatagccgccgcagcgcagcctcagctccgtctcatcctcctcctcctcctcctcctgccaaatctcaccaacgcttcgacgccgctgctccggctgagagatcagttcttctctgaatggatagacatttgagtttctcagcttgtgaaccgtggctgatcgatccccacatgatgatggtgctctgcatcatctgctgtgtttcttttttctttttaatctttggttgttgtttgtaagctaaccttgcatttgagaaaactgatctcgtggatgatgtaaggagcatcagtaattaatttactgctccttttgtgtaccatagacaagcatgcttgattaggttgaaagaaaaggagaatcatagtgaatttggaaggtgttcatccaggtttgatgagctgagaatttttttc

SEQ ID NO: 20023 - DNA, 1221 bp, Oryza sativa
  misc_feature (642)..(642): "n"=any one base of a, t, c, or g
  ref <308>: DATABASE ACCESSION NUMBER: AK070356
  ref <309>: DATABASE ENTRY DATE: 2001-12-06
ggataaccaccttgccttgcttgcctctcatcagacgattgatcgacaagagagagaaagagcttgcgtcgcaatgaccgccgtcgacttgatgcctgcagctgacgacgacaacaacaagcagtcatccaccggcctcctccaccaccaccagctccccgccgccgccgacaacgccatactacacaataccaggcggctggaggggaaggtggccatcgtcaccggcggctcgcgtggcatcggcgaagccatcgtaagggccttcgttcaccacggcgctctcgtcgtcgtcgccgacatcgacgacgccgggggccacgcgctggccgccgcgctcggcccgcacgcctgcacctacgtccactgcgacgtggccgaggaggccgacgtggaacgcgccgtcgccaccacgctggagcagcacggccgcctggacgtgctgtgcaacaacgccggggtgctgggccgccagacgcgcggcgccaagagcatcgcgtccctcgacgccgccgagttcgcccgcgtgctgcgcgtcaacgcgctgggcgccgccctcggaatgaagcacgcggcgcgtgccatggtgccccgccgctccgggagcatcgtgtcggtggcgagcgtggcgggcgtgctggncggcctcggcccgcacgcgtacacggcctccaagcacgccctagtggggctcaccaagaacgccgcctgcgagctcggggagcacggcatccgcgtcaactgcatctcccccttcggcgtggcgacgccgatgctggtgaacgcgtggcggcaggggcagggaggagatcacgcggatgaggatcaggcggcggcgagcgaggaggaggaggtggagaagatggaggagatggtgcggaggctggcgacgctcaaggggccgacgctgcgggcaggcgacatcgcggaggcggcggtgttcctggccagcgacgagtccaggtacgtgtccggccacaacctcgtcgtcgacggcggcgtcaccacctccagaaacgtcatcggcctctgaattgaatctctctctctctctcttagctaattactatttcagttatatatatatatatatatatataagtccgtgaccgtcctcatcgatcatatgatgatcgatggatgtactcccgcatgctcgactgtgctgtctgaaatctgatgactgaattccagcacttgcgcattgttgattattatgcc

SEQ ID NO: 20024 - DNA, 613 bp, Oryza sativa
  ref <308>: DATABASE ACCESSION NUMBER: AK070357
  ref <309>: DATABASE ENTRY DATE: 2001-12-06
gaaggtgactcaccactccactccactccactagtatcgatcgatatgccgatgcgcgccgccacctcctcgccgcggtgcgcgtccttctcctgcaaccgcggaggcgcccacgcccacctgggccaaagctgcggccgcccgctgggccgagctgccgggtgcctcgccgccgccttcttcgcgtcgctggagcgctgctcctgcgtcgagttccccacggacgacgacgacgaccaccctcccaggagccgggacgtcgtcgtcgtcagcgaggcggcgccgctgctgccccgcgccaccacggcggcgccgaagaagagcacgtcgactacgacggccgggaagggcaagatcagcaggggtggctttcgctgttgtgacaacaccaccactgctaattaatcaatagtcttcaattcttcttcttgcagtatgcatgttgcaaatgaataaaccaattgttagttagtttctcgctgatgaattgtactatgtcataagttcattttggatgaatcatcctacatatatactcctatatgtgtatcacactccaatggtcttcggttcaattgctctccagcttaatttaatctggttgaaatgtagg

SEQ ID NO: 20025 - DNA, 1031 bp, Oryza sativa
  ref <308>: DATABASE ACCESSION NUMBER: AK099137
  ref <309>: DATABASE ENTRY DATE: 2002-08-28
ggcgaatccagtggcacacagagctagctagcgatggcggccggagccggaggagacggcggcggcgagctgaagcttctggggacgtgggcgagcccgttcgtgcagcgggtgcgcctcgcgctgaacctcaagggcctcgcgtacgagttcatcgaggaggagatcggcggcggcaagagcgagctcctcctcgcctccaaccccgtccacaagaaggtccccgtcctcctccaccgcagcaaccccatctgcgagtcccaggtcatcgtccagtacctcgacgacgccttccccggcggcgccgccggcggcgacctcctcccctccgacccccacgcccgcgccgtcgcccgattctgggcggcgtacatcgacgccgagttcttcgcgccgtggaacaggtcgttctacacggcgtcggaggaggagaagacggcggagatggggagggcggcggcggcgctggcgacgatcgagcgcgcgttcgcggagctgtcgagggggaaggggttcttctccggcgaggacaggccggggttcgtcgacgtggtgctcggcgggttcgtgggctcgatgcgcgcgtacggcacggcggtcggcgtggaggtgctcgacgccgggcgcaccccgctgctggtggcgtgggcggagcgcgtcgcggcgctcgacgccgccaggggcgtcatccccgacgtcgaacgcgtcgtcgagctctcgcgctacgcgaggaagaagtagacacggtaacgatttgtgttgtcctgtggtgtttgtatcgtcaaaataaatgtggcacaaaggttgtcatcattagtgagcattcttgccggtttcttctccagtttaagtgtctgtgttgcttttgtttggactgcggggatgttagaatatatggtagttagagttatattagaatggactgatttgtgtggacttctttcatatctgtaattctttcttatcttctccccatgtactcctatatatcggcccctgaggctcaatataatgggtccaatattcatagt

SEQ ID NO: 20026 - DNA, 2756 bp, Oryza sativa
  ref <308>: DATABASE ACCESSION NUMBER: AK099138
  ref <309>: DATABASE ENTRY DATE: 2002-08-28
agcggggctctaaaacctctcccgctccacgcgcggggcgcatgaaaccctagcgagaggcgccagatctcccgcatccggatcgccgccatggccgccgccaccgcgctggactcgctgccggcgccgctccggtcgctgcggctgaagacgaagcagcaggagctcctgctccgggtctcggcgctggcgctcatctacgtgctcgcgttcgtcgtccgcctcttctccgtgctccgctacgagtccatgatccacgagttcgatccctacttcaactaccgcaccacgctcttcctctccgaccatggattcagcgagttctggaactggttcgatttcgagagctggtacccgctcggccgcgtcgtcggcggcaccctcttcccgggcctcatggtcaccgccgcgctgctccaccgcctcctccgcgcgctctccctcgccgtccacatccgcgaggtctgcgtcctcaccgcccccttcttcgccgccaacaccacgctcgtcgcctacgccttcggccgcgagatctgggactccggcgcgggcctcgtcgccgccgcgctcatcgccgtctgccccggctacatctcccgctccgtcgcgggctcctacgacaacgagggcgtcgccatcttcgcgctgctgctcaccttctacctcttcgtgcgcgccgtcaacacgggatctctcgcatggtcgctcgcctcggcgttcggctacttctacatggtctccgcgtggggaggctatgtcttcatcatcaatctgttgccgctgtacgtgctcgtgctgctcgtcacggggaggtactcgcagaggctctacgtggcctacaattccacgtatgtgcttggaatgctacttgcgatgcagatccggttcgttgggttccaacacgtccagtctggggagcacatggccgctatgggagtattcttccttttgcaggttttctttttcttggactgggtgaagtacctgctgaatgatgccaaactattcaagtcattcctgagaatcaccctgacatgtgtgataactgttggcaccctagctcttggaattggtaccgcgtcaggttacatctccccttggacagggcggttttactccctgcttgatccaacctatgcaaaggaccatataccaatcattgcatcagtatctgagcatcaaccaacagcgtggtcttcgttcatgtttgatttccacatccttcttttcctgttcccagcaggcctctacttctgtttcaagcgcttgtcagatgccacaatatttatagttatgtatggcctcacgagtatgtactttgctggtgtgatggttcggttaattcttgttgcagcgccagctgtttgccttattagtgccattgcagcatcagctacaataaaaaatctgactaccttgattcggacaaaaagcaaaagtccacaaactgtctctggaaaatcatctggctcaaaggcagctgcaaagggtgcagttgatcaatccttgcctttccagcagaatgtggccattgctttacttctgggtgctttctacttgcttagtagatatgctgtacactgcacttgggtgacatctgaagcttactcttctccttccattgttctggccgcaaggggtcataatggaggcagggtcatatttgatgattatcgtgaagcgtattattggcttcgtcagaacactccttctgatgcaaagattatgtcatggtgggattatggataccaaatcacagctatggggaacagaactgttattgttgataacaacacatggaataatacacatatagctacagttgggcgtgcaatgtcatcctatgaagatgaagcgtatgagataatgcagtcactggatgtgaattatgtgcttgtcgtatttggtggtgttactggttattcttcagatgacattaacaagttcttatggatggtgcgcattggtggtggagtttttcctgtaatcaaagagcctgattaccttgttaatggggagtatcgtgtcgacaagggggcagcaccaaaaatgttgaattgcttaatgtacaagctttgttattaccgttttggagaactgaccacagaatatggaaaacctccaggatacgatcgagtacgaggagtggagattggcaacaaagacattaagcttgagtacttggaggaggcattcacaacttcgaactggatagtgcgcatatacaaggtcaaacccccgaagaataggtcttgaggagaggaatcatctcttggttagtatctggtgctattaccttgaggtacattgtgtcaagtcaaaacgtattggagttcctacaggagacgggcaattgatttgaaaatctgcatcagctgcccccaagtgcgatcttttgttttggtgagactgacggaagtagaccataggtcagtttgaagtaacgatcatccgtcttcccctatatcattttgttagatgtaatcaggtgccattcagaactagcaattgcgacgaccgagtactttttgattgctgagcatggtatgacagtactccagatgtttttgtaagcacaacagcttatttgcgtagtaactttagatcgggttacacgggacacttgcaattttctggtgttgaagacaacaatgaataacttaactgtggttgctctgttttcctctgtgagctctcatcatcttgtggcaatcgcagtagtcgtttttatgttaataaatgatgcctataaactt

SEQ ID NO: 20027 - DNA, 563 bp, Oryza sativa
  ref <308>: DATABASE ACCESSION NUMBER: AK070358
  ref <309>: DATABASE ENTRY DATE: 2001-12-06
gaccgatcactccatccatccaccaaccccaagaaacccccctgcgcgagccaaacccaacaaccatggcgaccccgttctgcgccgccgcgtgccgcctctccatctccccgcccaacgcggcgccgtcggcgcccggccgcgcccgcgccctcgcccggcgtggcctggtggtggcggtgcacgcggaggcgggggtcggcgggataaacccgtccatccggaaggaggaggagaaggtggtcgacactgtcctcgccggcgagctctccaagccgctcaccccgtactgccggtgctggagatcaggcacatttcccctttgtgatggaagccatgtgaagcacaacaaagcaacgggtgataatgtggggcccttacttgttaagaagtagaatgagtttcttccttgttaaaaaataagaagatgaaatgaatttcttcatcctggcctcatgttgagtcaaacaatatttgcatgtcatagtttgtatgatcatttttgtcacatgtaaagataatgctgtgtcaaagtaacttttattgatccctcaaccgagatg

SEQ ID NO: 20028 - DNA, 1746 bp, Oryza sativa
  ref <308>: DATABASE ACCESSION NUMBER: AK070359
  ref <309>: DATABASE ENTRY DATE: 2001-12-06
gaccctccatcgctattccccaaaatgcccctcgcgccatgcccctcgccgcccctcccctcctccccgtggccggcgcgcgccccgcgccggggcggcctcctccgcgcccgcgcggtgcgggcggcgccccggccgccgagcaagtggtcgctgggtagctggcgcagcctgacggcgctgcagcagccggagtaccccgacaaggcggagctggatgaggtgctccggacggtggaggcgttcccgccgattgtcttcgccggcgaggcgcgcaagctggaggagcggctcgcggaggccgccgtcgggcgcgcgttcctcctccagggcggcgactgcgccgagagcttcaaggagtttaacgcgaacaacatccgggacaccttccgtgtgctcctccagatgtccgtggtgctcatgtttggaggccagatgcctatcatcaaggtaggaagaatggcaggtcagtttgcaaagccaaggtcagatggctttgaggagagggatggagtgaagttgccaagctacagaggggataacattaatggggattcattcgatgagaaatcaagattgccagatccacaccgcatgatcagggcatactcacagtctgcagcaacactgaatttgctgcgggcttttgctactggaggttatgctgccatgcagagggtaacacaatggaaccttgacttcacagagcatagtgaacagggtgacaggtacatggagctggctcaccgagttgatgaggctttggggttcatggcagctgctggtctcactatggaccatcctattatgacaacaacagaattctggacatcacatgagtgccttcttcttccctatgagcaagcacttactcgcgaggattccacatctggcctctattacgactgttctgctcacttcctttgggttggagagcgtacacgtcagcttgattgtgcccatgtggagtttctccgaggaattgcgaaccctctgggtatcaaggtcagtgacaagatggacccaaaagaacttgtgaagttgattgatatcttgaatccccagaacaaaccagggagaattactatcattacaagaatgggacctgaaaacatgagagtgaaactccctcacctaatacgtgctgtccgtggtgctggccagatagtaacatgggttactgatccgatgcatggtaacacaatgaaggctccttgtggcctcaagactcgctcctttgatagaatcttggctgaggtgcgcgcattctttgatgtgcacgaacaagaaggcagccacccaggaggggtgcatctggagatgactggacaaaatgtgacagaatgcatcggcgggtcacgcacggtgacattcgacgatctgggctcacgataccacacacactgcgacccgaggctcaacgcatcgcagtctctggagttggcgttcatcatcgccgagcggctcagaaagaggaggatcgcctcatggcagttgaacaagaacagtcatctgggcaacatcccatctttggggctctgaaagtcatatatatacagaaacagtgataagaaaagatcaaataccataggcaagctgtgagctatccaattgtcttgtactagctgttatgtcaagttgtcaagtttcgtttcatgttactcatgtactgctaaacaagtcaccctcttgatttaccctgtcatatataaataagaaatgcaagttcaccttaatctcggtttg

SEQ ID NO: 20029 - DNA, 2241 bp, Oryza sativa
  ref <308>: DATABASE ACCESSION NUMBER: AK070360
  ref <309>: DATABASE ENTRY DATE: 2001-12-06
gatcccatccacgcaaatatttcttcctataacaggacaagagcagatcgatcgtttcctttttatttctgaggagaagaggatcgatcgtttcgttcgatcgtttggtttttgaattttgaggagaagagaagagaagaggatcggaagagatggccggcggcggcgtggaggacacgtacggcgaggacagggccaccgaggatcagctcatcaccccatggtccttctccgtcgccagcgggtacacgctgctgagagacccgcggcacaacaagggtttggccttctcggaggcggagcgcgacgcgcactacctccgcggcctcctcccgccatccatcgtctcgcaggagctccaggagaagaagctcatgcacaacctccgcaactacaccgtccccctccagcgctacatcgccatgatggacctccaggagaggaatgagaggctgttctacaagctcctgatcgacaacgtggaggagctgctgccggtggtgtacacgccgacggtcggggaggcctgccagaagtacggcagcatctacaggcggccacagggcctgtacatcagcctcaaggacaaggggaagatccttgaggtgctcaagaactggccggagaggagcatccaggtgatcgtcgtcaccgacggcgagcgcattcttggccttggagatcttggttgtcagggaatgggtattcctgtcggcaaactgtctctgtacactgcccttggaggagttcgcccatcagcttgccttccaatcacaattgatgttggtaccaacaatgagtcactgctcaacgacgaattctacattggactcaagcaacgccgtgctaccggagaggaataccacgagcttcttgaggagtttatgaccgcagttaagcaaaactacggcgagaaagtgctcgttcagtttgaagactttgccaaccacaatgcttttgacttgcttgcaaagtacagcaagagccaccttgtcttcaacgacgacattcagggaacagcatcagtggtcctcgcaggtctgattgcggcgctcaaggtggtcggtggaactcttgcagatcacacttacctgttccttggcgccggtgaggctggaactggcatcgcagagctcattgccctcgagatgtcaaagcagacggagattccgatcaatgattgccggaagaaggtgtggctggtggactcgagggggctgatcgtggagtcgaggaaggagtcgctgcagcacttcaagcagccattcgcgcacgagcacgagccggtgaagacgctgctggaggccgtgcagtccatcaagccgaccgtgctcatcggcacttccggcgtcggcaagacattcacccaggaggtcgtcgaggccatggccgccttcaacgagaaacctgtcatcttcgcgctctccaacccgacgtcgcactcggaatgcaccgcggaggaggcatacacctggaccaagggaagtgcggtgttcgcgagcgggagcccgttcgacgcggtggagtacgaggggaagacgtacgtgccggggcaatcgaacaacgcctacatcttcccggggttcgggctgggcgtggtgatctcgggcgccatccgcgtccacgacgacatgctgctggcggcgtcggaggcgctggcggagcaggtgagcgaggacaacttcgccagggggctcatcttcccgcccttcaccaacatccgcaagatctccgcacacatcgccgccaaggtcgccgccaaggcgtacgagctcggcctcgccagccgcctcccgcgccccgacgacctcgtcaagtacgccgagagctgcatgtacaccccggcctaccgctgctaccgctgatcgagcacgagcccaccgaggaggaagacgatcgatcgaattaagcaataaaatttttattcaaatcttggcgcgagcgttagctgccattagaggggttttcatttttaattttttttgtgtacccatacatatacgtatacgtgtactgcatacatactagagcacctgatggtgcttgtcgtcgtcgattcttttgaccgatttgaagtttggtagggtgtaatagcacttacttttgagttttccacattgagttgattcggtgtaataggagtcaaatttgagtttcttatgatggttgttcatgatcagtttctgatgcaatgcgtcgtgtcatttttacccaataaaagcagagatgcttacttagtgg

SEQ ID NO: 20030 - DNA, 1888 bp, Oryza sativa
  ref <308>: DATABASE ACCESSION NUMBER: AK070361
  ref <309>: DATABASE ENTRY DATE: 2001-12-06
gatacttcttcttcctcgccgatgagatccctcccccaagctagcacgcacgcaaactaggcctttctaccacatctctccaacagttacagccccatggatccatagccagttagccacgacccatatattgtgtcttcctaaaggagttctcatccgacctgtggtatcgcagaaacctcatctccaccttccatcgccatagccagagtcgccggaggagttggagaagaagaagaagaagaagaagaagaagaagaagaagaagaagaagtttgtcacctgaggggtgatctgatcagaggagatcgacgacgacgacgacgacgacgacggcgaggcaggaggacacggtgcgcgtgaacatcgagacgatgctggagcatctgaccacgccggcggcgaggctgggcgacggctactccatctaccgtgtcccggcgaacgtcgacaggaagcactacgagccgaggctggtctccgtcggcccgtaccaccggagcaagcaccacctcagcgccatggaggaccggaagcgcctctacctcctccggttcctcgacgacggtggcgagagcggccaccgccgcggacttctgctccaggactgcatcgacagggtgcgcgagctcgagccgcgggcgcgcgcgtgctacttcgagagcccggccaccggtgacgacggggaagacgacgacggcgacatgttcgtcgaaatgctcctcctcgacggctgcttcgtggtccagttcttcatccagtggttctccggcgtcgccgaccccatcttcaacgtcggctggaacctcccgctgctgcacaccgacctgctcatgctcgagaaccagatcccctacttcatcctcctcgcgctctacgacgcctacacgcatgacggcgacggcgacctcgaccggccggcgcggcggcccaagccgtcgctgacgagcatcatcaccgcctacttcagccagaaggaaggtcggcagccggcggcgacggagacggcgcagctgcaggaggaggacgacatcgaccacctcctccacctctaccactccaccttcgtcaagccacccgatcacctgccggcgcggcggcaccgccacggcggcggcggcagcagaccgccgaggacgatccgctgcgccaaggagctggccatgcacggggtgaggttcgtgcccaaggtcgggacgagcaacatcctcgacgtcgcgttccacgacggcgtgttcgagatcccgcgcgtcgccgtcgacgactccacctgcacccgcttcatgaacctcgccgcctttgagcagtgccgcggcggcgacgccgagacaccggcggcggggaagcacctgaccagctacgtggtgctgatggactacctgatcaacacggcggaggacgtggtgatcctggagcgcgccgacgtgatggagaacaatctggcgaacgaggaggcggcggcggcgttcttcaaccagctccgcgtctgctcctacatcgactacgacgaccactacctggcgccggtgtaccgcgacgtcgacgccttctgccgccgcaagtggcccaagtacaaggccaaattccgccgggactacctcaacagcccgtgggcgatcgtcggcttctgcttcgccaccaccttcgccgtcgtcaccttcttcaacaccatcgtcaacatactcaagacgttcttccatgtcttgcattgatcatccaatgatcgatatgtgcagtgccttgctcactgcagagaattattatctttgttttaaatctatctatcgatctgttcttctaccgccataagtaaaaaaacataagacatgtattgaagacgttaatcatagacatgtctacatattgcttattggagacatctttgctg

SEQ ID NO: 20031 - DNA, 1070 bp, Oryza sativa
  ref <308>: DATABASE ACCESSION NUMBER: AK070362
  ref <309>: DATABASE ENTRY DATE: 2001-12-06
gagtgccgtgtgaactttcagtgtgtaataaagccaagatacaggagcgataggctccgcggcgttcgtcgccgaaactccactgttcatcttcaacctccagccattcttgtgtgtgagagaaagagagctctgttcttgtgttcctaggctgattccaacagcgaccatctcgactgccacggcggcgacgccttcggcgtggcgctagtgggcaccgacgtcgcgggaaccacgcacgccgccctctactcgtcggcgaccgacgcgtggagcggcccggcctccattgatcaccaccccgacgccttcgtccaggcgagaaggccaagcgtcctcgtggggaacgcgctctacttcctctgtgacaacaacaccagcatcgtcgagttcgacatggccacgatgacgctgtcggtgatcccctcgccgccgctaccggaggatgtgcacggcgctctcctcatgacggcggagggtggcgggctcgggttcgccgccgtgctggagcggtccaacctccacctgtggtcgaagtcgatggatcaatgggagcacctcgaagatgtcagggacctcaagacgctgctcccccggggttcaatctccatgatgaacaatgtgttgatcggcttcgccgacggtggcgttcgtgtggttgtcgtcaggtcgtaccatggccccttcatcgttgagctgggatcaactggaccagcgagggtggccttgaggagaagtggaatctacgctgtatttccctacacgagcttctgcactccagccgccgccacgacgacagaatgatccatccgcttacatgaaactgctgatgctggcttcctgcagagctgatgcttgaagtgctttcttctgataggcaattttagcaagaaaagagttcactaatggtgatcgatttactcagttttgtctcccattttgcagtctgattgagaaaagagttttgtcaattttagcaaccagaagaattcacaaatggtaatcttggtcatgttagtaagttttgtctcctggtgaatacttttaagaaaagagtgagacttctcatc

SEQ ID NO: 20032 - DNA, 2381 bp, Oryza sativa
  ref <308>: DATABASE ACCESSION NUMBER: AK070363
  ref <309>: DATABASE ENTRY DATE: 2001-12-06
ggggccccagttggcagccacttatctcatcgtagcccttatcttcctcacgggctcacgcgcggcggggagagagaggacgtcaccgatcggccatgtccgcagccaccgcgtgcgcctcgccggcggcggcgcgcccgcccctccacatccccctccgctcgcctccttccgccgcgcaccttccctccgccgccgcctcccgccgggcctcctccgccgcttgccgctgcaccgcctccgcctccgcctccgcctcgccctccacctgggattggacccgctggacccgccacttcgccgacgtcgaccaggccgagagctacgcctccctcctcaagttccagctcgaggaggccgtcgacaacgaggacttcgcggaagcctccaagctcaagaaggccatactcgaggccacgggcaacgacgccgtcgcccaagtcatgtctgaactcaagactgctatagaggaacagaggtatcaggacgcctcaaggttgacaaagcttgccagaaccaacttggtaggttggtgggtggggtacgctaaggataccgatgattcgatcgggagaatcgtacggataagcccgggtgttgggagatatgtggctaagagcttcagcccaaggcaattggttactgcatcgtcaggaactccattatttgaaattttccttgtcagagatgacgatgagacatatacaatgaaggttgtacacatgcgaccaacaaaaggcacttcaagtgcatcatccgtatcatcagcaactgcagaaagtccagctaaggaagagaatgaaagctcattggaaagtagtgctatatctgagggcattaccgatgaagcgaatacagatactacattaaagggagatgaagatgttgaggataaagaacaagatgttggtaacgccaaggatagtagtgttgaagggttgaaaagcgttctgaatttcttcaagtctcggattcctgaattcaaagttcaagtaataaatgtagatgtgtctgaggaagctgaattagcttcagattcgtcagaagaattagtgcaagatgatgtgaagagcacgtcagagaactcattggaagattctaccactgaggagcttcagcaggatgatgttccagatggagattcagactcagctgaagatagtaaaagtccagaaatgaagctcttcattagtggagtggttcataacaaggaggatgctggagcaaaatcatatgttcgagttccagctgaaatcaataatttggaaaaggattccttcgaactttacattcctggaaaaggttctgatcgagatctggctgatacaaaggctgcaaaacagaaagttgctgatatggctgccaaattggcatcagaacttatgccttctgatgttgcgaaggcattatggggaacgaccaagagttcttcgaagataaataaagaagtacaagagctcttaaagcttaccctcagcaaggctcgagtcaagctgactgagaatacaattttcaataggatcattactgacagtaacggctcagatccatttagtggtctctatgtgggagcatttagtccatatggaccagaagttgtgcagctccgtcgaaagttcggccattggaacagcacagatgaagtggagtttttcgagtatgttgaagcagtaaagttgactggtgatctgagtgtccctgctggacagataacattccgtgctaagattgggaagggcaaacgtcttgagaaccgtggtgcataccctgaagaatttggtgtgattgctagctataaaggtcaagggagaattgcacagcctggcttcaaaaatccccggtgggtggatggtgagctattggtgctcaatggcaagagcacgatcccacaccttggaggtgcggagcttggtttcctgtacagcgtgcctgagcagagtttcttggtactctttgaccggcttaaacttccagagtgatgagattatgctgaatcgagctgttctcacatgcaaattgcatgagtacagagagaagctgacacagtttcaagagaaacgtatagatgtcccgtcatcttcctgaaatcctgagatgcctcagctcctttattagtcagctcctacttgacaggagctgacctgtttgagctttttcagggtataagagagctgactattctggtctaactgaatactgctattcttgtccaatggaaaactggagcttcatatgagatcatgctaggctcttagatgacgcggtatagatataatttgtgtgacagttttgcattcggttttgccttaataatgaaggatgggaaagttttgtattgtctggatgctacagataaataaagccttatctttcaatacagc

SEQ ID NO: 20033 - DNA, 2935 bp, Oryza sativa
  ref <308>: DATABASE ACCESSION NUMBER: AK070364
  ref <309>: DATABASE ENTRY DATE: 2001-12-06
ggtcctcgcattcaacggacaacggcccatcaagtccattgcctcaaccctagtccccaactccgcccccaccgccgcaggcgcgccgccgcctcgccgacccgtcgccgtcgtcgtcgccgcctcgccacgcctcatcatacccctgtaacatcgcgtccgccacctcgctcgcggccatggtggacgcggcggcggcggcggcggagtgcggcgagctggacgggacggacgccatggcctacggcgacgaccggacgccgcgggacgggatggtgttcaagtcgtacgaggaggtgctcaacttctacaagcgctacgccctccgcaccgggttcggggtctgcgtcaagaagtcgtccttcaccaaggccggcctctgccgccgcctggtgctcgtctgcaacaagtggggggacgggaaggaggacgcgtgctaccaggcgaggccgacggccaagaccaactgccaggccaccgtcgtcgcgaggctctggagcgatggcctgctgcacctcatggatgtcaatctggagcacaaccacgcgctgaatccctccgcggcgcggttcctgaggtgctacaagacgttgcctagtgggatgagtaaagatctggtggtgagggctgccagaggggaatgctcgacctccggcgacatcgaggtcccgatattcgatgattgggggaggctcaagattggggaagatgatgtagcggccatcaatggctttttcgcggatatgcaggcgaagcaggcgaacttcttctatctcatggatttctacggggaaggccatctgaggagtgttttttgggccgattcgaggtccagggcagcgtaccaatatttcaacgacgctgtttggattgatacaacctgcttaagaaataggtttgatacaccccttgttttgttcctaggggtgaaccatcatggtgagcttgttctgttaggctgtggcttgttttcggatgagagtacggaaagcttcttatggctgctgaagtcgtggttgacttgtatgaaaggatggcctccgaatgccatagttacggatgattgtgccgcgataaaagccgcagttcgtgaagtatttccaaatgcacgccatcgaataagtgattggcatgtgttaagaagtatctctgaaaagttaggagaatcagcacaatttgaaggaatgaagaccgaattgggaactgtaatatatgattccttgaaggatgacgagtttgaggcaaggtggaataacttgatcagtagatttggccttcaggataatgaatggatcacttttctgtatgaaaatcgccatttctgggtccccgcctttctgaaagataccttctgggctgggttatctactgttaaccaccatgagagtccaaatgccttctttgaagattcaatcaacccagagaccaaattggtgacattccttagcagctatgtgaatcttttacagaacaaatacaaaatggaggaagatgatgatcttgagtcattgagtagaagcagggtgctagtatcgaagtttcctatggaagaacagctatctagactatacacctttaaaatgttcactaaactccagaatgagctgaacgcaaccatgaattgtgaagttcagttggatgattcaacatcctccattgtagttattgatctagctgagtcaagcggagaaatggtgaataaaaaatatgaagtcgttcactgtatggagaccgacaggatggaatgcaactgtggcctgttccagttcagtggcattgtttgtcggcatacattatcggtgcttaaatgtcagcatgtttttgatatacccccctgttatgtgcttaacaggtggcggaatgactttaagcagcttcacgccttagataatccatggaaggatttggtaacaagtaatcatattgagcgctatgattatgtttctttgcagtgcctccgtcttgttgagattggagcatcatcagatgagaagcatcagcatgcattaaaattaataagagacatacgacggacccttcttgatgataatttgtgccgggaattggagcagaaacttacaccatctgaacgtgctattaatggtgacagccacatgcaagctggctcatctgagggagggccagcaaaaaagcgccgtggccgtcctcccaaaaagagtaaagatacaaatgtggagtccgtgtcaaatcaatatgcccataaggattctttactggtatcatcggacgttagtcagaaggatgcttttcattcttcttctactgcctcaaatcttggtactcatgtcaggacaaatggtgttgttgaccttatggaagaagttaatccaaatgagctatcttttgatagccgttatggggtgcagtctagccacccacaccattatggcaatcagctgcatccaagcaacactatgcagtttggccaaactacatcaacagcagagcactctagagtccagtggatgtaccagaatatatttcaggacgatcaagtgccttatggcagacggacatgacagcaatcaaatactgggttcagatggtgccatttcaggttttcatcagacatacagaaggaaagaactctttctcaagaaaacaaactcaagggaggcattcccctctggatgtagagcagatctaacatcagaataatcggaacacagtaatgtggcacaaactggtcattttgtctcgtctatagaaaactaggaatgtagtcatgttacatctcagatcttgaagcagctaaaattcggtcgctttctcgtaagcagtgacctagcttgaaatttagtctaatcaagagtactcctccattgacatgtgaattctttcgtttgttcttgtgtaaatacccgagcggtgaacattgaaggtaaagaaaagaccaagcctggggatcattctg

SEQ ID NO: 20034 - DNA, 2263 bp, Oryza sativa
  ref <308>: DATABASE ACCESSION NUMBER: AK070365
  ref <309>: DATABASE ENTRY DATE: 2001-12-06
gggaagcaaagcaagaagctttttttacttctcgggtttgcaagccaccgggaaaggccggggcttggtggtggtggtggtggtaagttttctttaaagcggcggagcgggaggccttcctgggcgctccggagatgcagcagcggcggaagtcggtgttcgcctcggcgccgttcgcgatgaagcaggcggcgctgggggccggcgtggcggcgcgcaggaacggcgcgccgctgtcgctggcggcggtggtgttcgcgctcttcgtgttcgcgacgttcctctacaacgaggacatcaagtccatcgccgacttccccttcggcgccggcgcgctccgcgccaagtcccccgacctccacgtcctccaggaggccgtgggcgccgcgcacctcgccgccggcagcatcgccaagcgcggcgaggaggtcatcgtccgtgtcctcgacgcgcccgcctccacggcgatggcggccgccgccggcagcagcagcaacaacagcacgattgaggtggccaaggccaatgccaacgccaacgccaacgccgccgacgccggtgtcaaggtggacgaggggcaggagagggagcgggacgtgacgctcccgagtgtcaaggaaggcggcgccgacgaggcgaggcggcgggaggacgaggaggccgccgagaaggagtcctcggcgaaggccgccgcggcgacggcggcgctgcggaccgtggtgagcgtgccggacacctgcgacctgtaccgcggcaactgggtgtacgacgaggtgaacgcgccggtgtacaaggagtcgcagtgcgagttcctgacggagcaggtcacctgcatgcgcaacggccgccgcgacgactcctaccagaagtggcgctggcagccgaccgactgcgacctgccccggttcgacgcgaggctgctgctggagcggctgcgcaacaagcggctgatgttcgtgggggattcgctgaaccgcaaccagtgggagtcgatggtgtgcctggtccagtccgtgatccccaagggcaagaagacgctcaccaagttcgtcaacggcggcaacagcaacatcttctacgcacacgagtacaacgcgacggtggagttctactgggcgccgttcctggtggagtcgaactcggacaacccgcaggtgcacagcgtccccgaccgcgtcatccagtggcactccatcgccaagcacgcgcacaactggctcggcgtcgactacctcatcttcaacacctacatctggtggctcaacaccctcgacatgaaagtcctgaaggggtcgttcgaccagggtgcgacggagtacgtggaggtggaccggcccgtggcgtacaaggaggtgctcaagacgtgggcgaagtgggtcgaccgcaacattgaccccaaccggacgaccgtcttcttcatgagcatgtctcccaaccacatcacgccggaggcgtggggaaactacggagggatcaagtgcgcgatggagacgctgccgatcacgaaccggacgacgtcgctggacgtgggcacggactggaggctgtacgccggggcgcaggaggtgctccagacgttccgccgggtgccggtgcacctcgtcgacatcacggcgctgtcggagctccgcaaggatgcgcacacgtcggtgcacacgctccggcaggggaagctgctcacccccgagcagcagtccgaccccaagacgtacgccgactgcatccactggtgcctcccgggcctccccgacacctggaaccagttcctctacgcccgcatcgcctccgccccatggtcatccgaccagtagaaaaagagcaaaataaggctagcttccaagtgttctgcgagacaagaaaaggagccaagaacaccgttgacacaccatcgatgcccgccgcccggccgcggccacctcactttttcttactttgggttacttttttttcttctctttttttcaccatttttctttctttctctggggttgcgtaaagctgtcttgtgctgtgtttaacatgtgattcttttgttaaaaaagaaatggagggtttaggatggtgaaggaggatctgtgggcgggctgtgttgactatagctcatttcttgtcctgctgataaaggatgcatggataggagaaagcaaaaaaagggtgtgatgtgagatgtaaggggggaaagaaaaagggagggttacatgtaaagaatttttgtgtattacaccattctagtacattgatgctcaagagaggtataaaggcc

SEQ ID NO: 20035 - DNA, 1757 bp, Oryza sativa
  ref <308>: DATABASE ACCESSION NUMBER: AK070366
  ref <309>: DATABASE ENTRY DATE: 2001-12-06
gaagtgccaagacagactgccatgtctctatcgattccaatggtctgttgctgaaaaggacaatctggtagagcggctcgcacgatacagacacatgcacttcttggggatgctcgcccctccttcctagtaacattcttcaccccccattttctttgtttctacttctctttccctttcttgtgctccctcccctcctcaatccgtatatataagctagctgctcgttcttgttggctccttcttcctattatttctttgtttgctccctccccttgctggttggctggctgggtcggtcgggttctttcttgatctgcatttcgccctccgccaccgggatggagaacggacacgccaagaatcttgtggccgtcatcggcagcggcaactggggcagcgtcgcctcccgcctcatcgcttctaacaccgctaagttgccctcctttcatgatgaagtaaggatgtgggtgtttgaagaaatattaccaacaggcaagaagctctctgagtccattaaccaagcaaatgagaattgcaaatacttacctggtataaagctcggagctaatgtaattgctgatcctgatttggagaatgcagtgaaagatgcaaatatgcttgtttttgtgactccccatcaatttgtggagggtatatgtaagaagcttgtgggtaaactaaggccaggaactgagggtatctccctcatcaagggcatggaggtcaagatggaaggaccatgcatgatatctaaattaattacaaacatacttggaatcaattgctgtgtccttatgggtgctaacattgcaaatgagattgctgttgagaaattcagtgaagcgacaattggatataagaaagacaaggaagtggcaacccgatgggctaaactttttacaacaccttacttcctggtttctgttgtagaggatattgaaggagttgaattatgtggaacactgaaaaatgtcgtggccattgcagcaggtcttgttgatggtttggatatggggaacaataccaaggctgcaataatgaggattggtttgcgggaaatgcgtgctttctctaagcttctatcccctacagtcagggacaacactttctttgagagctgtggtgtggctgacctaataactacatgccttggtgggagaaacagaagagtcgctgaggcctttgcacgaaatggtggcaaaaggtcttttgatgagttggaggccgagatgctacatggccaaaaacttcagggagtgtccacagcaaaagaagtttatgaagtcttgacttatcgagggtggcaagaattgtttcctcttctgtccacagtgcatgagatttgtattggtcagctacctcctacatcaatagttgaatacagaatccactgaatgctgttctctgaagatgtcatcaataacagtttcagcttgctaaaggtcttgaaggacctctgctttctagtggagcaaggctcaggaaattcttcatgtcagtgttcttcgttgcggggtcatcaactcatctgtcagatcttggacatttccaggccttcagcaacagtccatgcaagaagtcgtcagaatgcacttacatttcacatctgtttatgactgattacacattatgctcatatgtgctttattcttttaatgatacaacgcatcagtatgtgagcaatatagtttgctcatatttgttatcgtctaacagtggcttgttaactatgttgaggttttatattcacaact

SEQ ID NO: 20036 - DNA, 2935 bp, Oryza sativa
  ref <308>: DATABASE ACCESSION NUMBER: AK070367
  ref <309>: DATABASE ENTRY DATE: 2001-12-06
gatttggaaaattttctccacttcccctccaagttgaaagtccaccatagaccatggtctgttcttgtgctgtagcttggtgacctgccattttagccgcaatgcatgaccaaagtattccaaattcttgatccccagccccccattttccactggcatacagacgtttttccacgcgaccaagcagtgtccaccgctcacttcctcttgccctttccaaaggaatcccctgcatttgcgttcaatttcttttatcgcccatttaggcagctgaatcactgacattgtgtgtacagggagggccatcattgttgatttgatcaagcataatctgccatcgtgtgatagcatccttggcttccaaccagctaccttttttgcaagcttatcaaggattggttgcaactccatctttgttggtcttctcatggatagcggtatccccaagtatataattgggaattgctctatcttgcagcgaaggatgtcggtgatcaattggagctgctgctcgctacaccggattggtgtaattgcgcattttgccagatttgtcttcagccctgttgtgtcaccaaatcttttaggataaactcataaacatggtagtaattatatgccttggtttctccatcttaattcatttgcatgctaaacagaagtttgttactagttttatgtttcacccatttgttcttgtgatttatctcaaggccgtttacatgtggttatcctttctttgatgggaagtgtaactgacagccttaaccctattggaaaattagaaggaataattaagatgttgcttccactctttacttacacgtcgattgagtatacctgataaatgtgtagatggaatgattcttgtttggtactaatccgaataacctatatctgtgtaagtttaatcatattgatattgtggcacacaaacaatttgacaatgaaaagctgcatcaatgcaactaagctttgcacagttctactgaacttttctgcttgtgcatttttatttgtagccttggggtaccattagcaattttgtgatgtatcttggttgatctcattttcatgattcgtactattcatcagtactttgtttcttggccacaaaaacgctagctggacaactgtagaaaaacgacgtgcttggagctgtatgtatgataaggaaaggagagaaatgcatataggcaccttagttctgactgcacatatcgtctgtggatatgggctaatattatttaagaaaaaacaactccaagttgttggccgaatatttgttgtttcctgatcttatcacaagattgaatcatcatcttccctgatcactagatatgatttaaaactatataataagaaatgatgtgcttttctctttggttttgttcagtcgcttgaatacgtcaagtgctacatatggagtcaggaatctagttattccatatattattacaccacttcatcgtttgcttttcggtttattaacatagataaagaaccgattgacggctcagtttctttgaaggaaaaaaaaacacagagataatcatacttatggagcaagatcaggttgggctttggggtcggcaagctgtcttcttctccgtacaattcgctgtgtggtcactgatcatctcttattttttcttgacaaaaaatagtggtgctaatccggtcagtgtttcagcgacctggtggcgttgtccaaattaaatcgagcgtaagcagattataaatgccggattgcttaattgctttcttctttgctttcctctcaaggcaatagcaagtctattttctataaaaaacaaaggcaaactctcttcttcttgttattgtttttgcaaagataaacaaatgcaaaattcgggttgataattacgggttttgacctgtaagattcttgtatccacttcaggttgggcaatcagactagttttaccgactggtgtggtgaccggtgaccgtgtaaatccgcaatgcaatcaatcatcaatgacatttctacaatcgaaccaccgtagtggataactggatgtgatagcaacatatagatcgaagctaaactagtagtatgaccgaacaattttttttagaaaaagtaaaatttaatcaatagtagttttcttatacaatttgccctgtggttgtttatatttggtatggaggcatggagccttatttaaatcctctgctttatctgaaaatatcttgtctgatcgacgtgggaccttctggatttggacagactagttaggactaaacaacgtcctcagacagaaaaccctacggttttggtcttcttgtggttagttccactgtccatttttgctgccagcggcctatcaccagcacacgaaccggtcgcacggacaaaacggtacaacttgctttgcctgaattctgaccggtcatcgtacacgtttcggtgaccaatcatgcccggcgaaccatcgatataaggaaagattttgtttgatcgaggtggggatggatcagctttgcacgagtggaggcagcgacagcgacaagtctttggcggccggcgatgagccggcggtgagagtccgaggtgaagtggaggcggaggcggcggcggcggcggcggcggcagaggcgcaaggcggtggctgcttcgactgcaacatctgcctggatttcgccacggagccggtggtcaccctctgcggccacctctactgctggccctgcatctacgagtggctgcaccccggcggcgacgacgacggaagcaacggcgacgcgagctcgacgaggcggcgtccctgccccgtgtgcaaggccgcggtctcgccggacacgctcgtgccgctctacggccgcggccgcggcggaagttccaagagggcccgatccggctcggccatcccgcgccggccgatcgtacatcgggagcccgtcgagcggc

SEQ ID NO: 20037 - DNA, 2515 bp, Oryza sativa
  ref <308>: DATABASE ACCESSION NUMBER: AK070368
  ref <309>: DATABASE ENTRY DATE: 2001-12-06
gaattcgattggtcgcctcagcagagcgagccattgccgtgcctctctcgtgcggtgctcctcctcctactcttcctgctcccgttttggccgaaactttttggcaacatatctcgtcgagggccttggagccacctgcttgtccgttgcggcgtcgtcactggctgtagcaaaagtttcaatcttggaggtatccgtttgctcctccttgtccacattcatctcaccttgcactcttgcggcgtgggcgtaaaaaggagataaactttcgcggttcttggagcaagctagctcgctagctaagcacacttcttatgttggaggcacgctcctgttgatttctctcaagagctcaagtcttggagaggtgacagctgacaagcagcagcagggaagactcacagttttttttttttcttgggcgcttcagtctccgcttcttcttcttcttcttcttcttctctctgctgctcacgctgaactggcggtagttttggcggtttaattggagagcttggctgagatggagagccgagggaggcggccgcggagcccggagaggcagaggccggcggcgaggaaggtgccggtggtgtactacctcacgcggagtcgccaccttgagcatcctcacttcgtcgaggtgcctgtctcctcgccggaggggctctatctcagagatgtgattagccaccttaacatggtgcgcggcaagggtatggccgctatgtactcgtggtcctgcaagaggagctacaagaatggattcgtgtggcatgatcttggagaggatgatctcgtccacccggcaaccgacggcgaatatgtgctcaagggctccgagctcttggaccagtcttcttcaggccaattttatcagggtaccaatggaaaccaaaagcaacagagcaggctgaaagagggtgcacggctgcctttgcctagagaggcttcctattcctcctcccctcctagtgtgatagttagagaagccaagccgaggcgttcgccttcggttccttctctagaagaggatgactcaccagtgcaatgcagagttacctccttggagaacatgtcgccagagtcggagcctcaaagaactctcttgtcaagggctggttccgcgagtcctgcagaattcagagtttacaagcccactggctgtgtggatgctgcaactcaaactgatgacctcggcagaaggtcagtccggaaagtgcccgagatgcataagaagagtttgagcactgatcatgactccgtagtccgggaaattactgagtaccggcaaagccaaccacgccggtcagcagagctccaggggatcgccagggaggccatgtcccagtgtcatactccactgagcataccttcatcccgtggcaagtcggagagtttagagtccttgatacgagcagataacaatgcattgaatagttttcggattcttgaagaggatgatatcattatgccaacctgccccaggctgaggccagcgaatgtactaatgcaacttatcacctgtggttcgctttcggtgaaagatcatgagaatatcagacttgttgaaggatacaagccaaggttcccaaacatgaagttcccgtcaccgttaatttctcgtaccatgatgatgggtgagcttgattacctgtcagagaatcccagattgatgggtatgcgtctggaagacaaggaatactttagtgggagccttatcgaaactaagatgcaaagagatgtacccgctgacagatattcagcgcttaaacgttcttcttcctacaatgcggaaaggagcaacgagacgctagattgcgcgagacctgacgaagacaccgtcaacacatctcgcgcaaggtgcctccctcggacgccgatactgtcatccttcctgcaccccaagagcgaggcaatgaagtcaccgatctccgactgccggaggagctcgtcggccggaccagactgcagccttgcttcatcaggagacggcagcaagaggttcattgacgccacaggagcaccgggcagcaggatagactctttcaggaaggaggagaagctcgtcaagatcgaagaaagttaagtgctagtggcctctcttaaccctccccaactctttgtcattgctgggctgtcgtcaggagctcgagtcgtgattcagtacacggtgccctgcaatggcgacagcgatgaaggctgagcttgcacccatgatcagcgttgagttattcatataggctctgttgatagagagagatcaagttactgacgaaatgaaatgcctctcgtttctttcttcagattgagatgttaagtttggaattatttttcaagcattcagttagcctagagtattcttctctcttcttcctatctttacgttattatcaaaatctcttctccttatcatctgtaagtgcctttaaattaattatagagtataatgtattgttcgttttgtattttgcttctgtccttaaatcaagagagagtagtgatcttcatcacc

SEQ ID NO: 20038 - DNA, 1891 bp, Oryza sativa
  ref <308>: DATABASE ACCESSION NUMBER: AK070369
  ref <309>: DATABASE ENTRY DATE: 2001-12-06
ttggcgaaacaacagcgaaaagaaaagcaaagcttggagagagcttcacttcacgtcttcaccttcctctgctcccggagagcctctccctctcctctcctctcgcctcggcctcctctctctctctctctctctctctctctctctctctctctctctctctctcatcaccgcctccccacgccaacccgcgcgacgcacgcggcataccaagaaaccgcgcggcgcgcgcttcccgggggggcgcctgccttcgatggaggtcgcggccgcggaggacgcgctggaggagagcggcgtggcggtgtacctccccaggcttctcgccggcgtcatctccggcgctctcaccggcctcttcgctctcgctggggccttgaccggagcggtgaccggcgcgctggccggaagggcttcagacagcggcgtgctccggggagctggattgggggcgttcgccggagctgtgctctccattgaggtcctcgaggcttctcgtgcttattggtgctcggaccggctgggctctcatggcacatcctccatggcagatttcatagagcagctcctccaagcgcggtttgtgcaagagcaaattgtaccttcaggatatgcaacgcatcgttggcaggtcagcatttcagattttggtcatgatgatctgtatgatatttttggagattgttcatccaaagggctttcacgggagtcactgaataaattaccacactatgtggtcactgaccaaacacggaactcgtttggtgaagacctctcttgcactatctgcctgcaggtacatttatcaaaattagctttatgttgtcgacaaacctgcctggctgccttgcacaattttgcacatggtttaggttcaacaacgataataaaagcaaaacaacatccatttcatgattgcagacaatatagtgaatgtttagttagcatatttgagctttctcctttttggcaaagtttgttaagaaaatcaagatcaccagtgatttgaaaattggtgatagcataccactacaagtctccatctggttgttagtgatggctgatcacatatagtagtaactgttctaaacataattgccaagggggtaaatgggaagacatcttcaaattattcatgaaattcttttgaccttcttcatagaacgttttaaacctaactcgtcctgaccattgaatacggtctattacttgatcaatgatttccaaccagaaaccaaagcttttcccgaccttgttgaaccaggaaatgcggcccattttttagattgataaatgaaacattcaagtacatatatatagctggatagtagatatgacatgattgttatggtgtgatatgtagagcagggagatgcaacgacctccgtttttatgttccccttttgtggcaacttgcataccaaattatgcctgctactaaatgcaatgtggttaggatttgctttgcaacttgctcactccctacacacactcaatgtcactgcttaattaccgctttgcaggatattgtaaccggtgaaacggcgaggagattgccgaattgctcccacactttccaccagccttgcgtggacaaatggctcgttggccatgggtcttgccctgtatgtaggcaatgtgtgtaacaacagaaggtaaaaaaaaccctgcattctgcaggctctccatcttattagaagagactagttgtgcaaatgtttgctcttgatagcacccaccacagagttaattatacacagtagctttgtaatttactgtactactagataggcgtatcttttaccagcgtaaacagaggctgtaaatcagaggatttgacactgtttcttacgctgagtttcaatgtaaaatggaataaaggtttctctgt

SEQ ID NO: 20039 - DNA, 1881 bp, Oryza sativa
  ref <308>: DATABASE ACCESSION NUMBER: AK070370
  ref <309>: DATABASE ENTRY DATE: 2001-12-06
atgtcctgaatcagtccacccctttccttcgctctctctctctaactgcagatttccctcccctttcaacgcgcgcgcgggtggtggggggaggcacggcacgaggcggaggcggcggaggaggtggtgggaatcgatccctttctgttccggccgcctcgatcgcccgctacccgcacgccgccttttcgtcccggtggatttctgcctcccttttctcgattctttcctttttcttcttcttctgcatgcgcggcgggctgtgacgccgaccatgggggacgcctcggcatccacctccgcgcccgcgacgcccacgtccacgctcatctgccgggaggatggcaacgacctcttctccgccgaccccgccgacgacgatggcggcggcggcagcggcggcgactgggagttatccattgctgacgacgaccatgtgttgctcatggaccgggacgatgagtacctcgcgctgatgctgtccaaggagaggtgtgccggcggcggcggcggcggcgagcgtggggatgaggaggaggaggagatggtggaggagtggatgaagaacgcgcgcgcctggtgtgtcggctggattgttaagacgaacgcgggattccggttcagcttgaagacggcgtatgtcgcggtgacgtatctcgatcggttcttggcgcgccggtgtgtcgatagggacaaggagtgggcgctgcagctcctctcggtggcgtgcctgtcgctggcggcgaaggtggaggagcgccggccgccgcggctgccggagttcaagctggacatgtacgactgcgcgtccttgatgcggatggagctcctcgtcctcaccacgctcaagtggcagatgatcaccgagacacccttctcctacctgaactgcttcaccgcgaaattccggcacgacgagcggaaggcgatcgtcctgcgcgccatcgaatgcatcttcgcctcgatcaaagtcattagctcggtggggtaccagccatcaacgatcgctctagcagcaatcctcatcgctcggaacaaggagacggcgcctaatctagacgagctcaagtcggtcgtgggctcgttatggcagcaactagacaccgggcatgtgtattcctgctacaacaagatgatgattcaagaggacaggtcgatgcaatcgacgacggaggtagcttcctcgggtgtctctgttgcccacattgggggatcggaggacagcgccatgggaggggccaataatgccaccaccttggaggcaaccccggacaagaagaggaaaaggttgcactcgcctcagcgccagtagagggaggagctggaggctggagctggacagcatgttggttggagtccagctctgcaatttttagttgatcattttcaccctttttcttttgtttcagctgagccctagtcagtgctcttgcaagttcagggggggttggccaaatggaggggccaacatttgattcttcttctgattatgcaattgttacagttgattgattagttagcaatggaaagattctggttttgtggagatctttccctggcccagaaaggtactagtgtaaagagcagaggaaaaggcctgaaaactgataaagagctcttgctcaaagtagggaggaagtcctcactgagatgtggaggcagagagagggaatcccaattcccaagtattgagtagaagtcattttttgtggatactgtatggttatctgttactctctgttgagtcatgccattttggttcattagcaatttcctgatgctaaagccaaacagtggtagtacatttttgttgcaagaactgattgatagtagttggatagccagggggcaggggccatctctctcactgtacttcactct

SEQ ID NO: 20040 - DNA, 1781 bp, Oryza sativa
  ref <308>: DATABASE ACCESSION NUMBER: AK070371
  ref <309>: DATABASE ENTRY DATE: 2001-12-06
acaagttcctcgctctgctcgacgacccgcgcgtccccaaggcaacgacgttcgaccaggtgcagcacgaggtcgaccggtgcgtcctccccgcgtcggtggacgtcggggccggagtcggggagtccgcgccgccgtacccgcctgagacggtcgaccggctccggtccatggccgacgccatggtcaccgccgggtacgtgacggagtgcacccagatgttcctggtggctcgccggaacgcgtccgacgcgtcgctgcgcgcgctcgggtacgagaaggcgagcatcgacgacgtagtgaagatgacgtgggaggcgctggaggcggagatcgcgacgtggaccaaggcgttccggcacaccatcaacgtcggcctctccaccgagcacgacctctgcgcccgcgtgttcgccggccgccacgccgccgtcgggcggggcatgttcgccgacctcgcccgctgcgtcatgctccacatgctcaacttcacggaggcggtgaccatgacgaagcgcgccgcggagaagctcttcaaggtgctcgacatgtacgaggccacccgcgacgcgtccccggtcatcgacgccttcctcaccgccgacgacggcaacaacagcaccgccctgaccgacctcaagcacgagctcaactccgtccgctcccgcctcggcgagttcgccgccgccatcttccgcgagctcgagagctccatccgcgccgacgccggcaagcagcccgtcccgggcggcgccgtgcacccgctcacccgctacgtcatgaactacctcaagtacgcgtgcgagtacaacagcacgctggagcaggtgttccgggagcacggcgcccatggcggcggcggcggcggcgacggcgagaacccgttcgcggcgcagctgatggaggtgatggagctcctccacggcaacctggaagggaaatcgcggctctacaaggacccatcactgagcaacatcttcctgatgaacaatgggaggtacatgctgcagaagatcaggggctcgccggagacgaacgccatgctcggcgaggcgtgggcgaggaagcagtcgaccaacctgaggcagtaccacaagaactaccagcgggagacgtggagccgcgtgctcggcctgctccgcgacgacggcgtgctgacggtgaaggggtcggtgcagaagccggtgctcaaggagaggttcaagcaattcaacgcagccatggacgagatccagaggacgcagggcgcgtgggtggtgagcgacgagcagctgcagtcggagctcagggtgtccatcgccgccgtcgtcgtgccggcttaccgctccttcctcggccgcttcgcgcagacgttcagcgccgggaggcagtcggagaagtacgtcaagctcagcgccgacgacgtcgaggccatcatcgacgagctcttcgacggcaacgccacctccatgactaggaggcggacatagcaacacaactaaatcgccgccgcgagcgcaaccgcagatggatcagaatgcgcgggaagaagaaggaggaggattaatttgagctgattataatttcttggcttaagccatgtgttaattattttgtttttttcttcttatgttcttttcttcttctttttttctggttaagaatgttaattcgatcggtcgaacaggtgatgtactactaattgttactggattatctcagggcagataggtttatgtatccattattaatccatgtacttaattttacccgatgaaattgagctttttttctttgttgtt

SEQ ID NO: 20041 - DNA, 1733 bp, Oryza sativa
  ref <308>: DATABASE ACCESSION NUMBER: AK070372
  ref <309>: DATABASE ENTRY DATE: 2001-12-06
ggttcacatatcaactggggatcttctgcgggccgaagtatcttctggcaccgaaataggcaagaaagcaaaagaatatatggacaatggtatgctagtcccggatcaagttgtgacagatatggtggtatcacgactatcacaacctgatgttagagaaagaggatggcttctcgatggttacccgagaagttatgcccaggcacaaagtctcgaaagtatgaaaatacgaccagatatattcattgtgctggaagttcctgatgatattctaatcgacagatgtgttggaagaaggttggatcctgagactggcaaaatttaccacataaagaacttccctccggagaatgatgaagtttctgctcgtcttgttacacgctctgatgatacatttgagaaggttaaatcacgtcttgatacttacaaacaaaattctgaagctgttatcccaacatactcagatttgctcaaccagattgatggaaatcgacaagtggaagtcgtttttaatgaaatagattcactgttacagaagatctgtgagaatgcttcatttaacatgttggccaaaacaaatggaaaaccacaagattctaaggatacaacagcctcaaaaaatgagtttcgtgggattccaacaagattaaataacattccacattccagggaaatcaggaaatacttttacaatgatgtactagtagccaccagacatgctgttgaagacaaaaaaactcggttgcagatagatatcaacattcctgaacttaaccctgaaatggatgtttatcgcataggaaccctcatggaacttgtgcgagagctttctctttcctttgctgatgatggaaagcgtgtgaaggtttgcgttcaaggctccatgggacaaggtgcatttgctggtattccacttcagcttgctggaaccagaaaaattttggaaatcatggactggggtgaatatggggccaagggtaccttcattaattttggagcagtaggtgctagtgaggttgataaagaagatgacatgttcatcctcattgctccccaaaatgctgttggaaactgtataattgatgacatgaaagcaatgactgatgctgctggtgacagacctgtgattcttgtaaatcctcgcttaaaggatatgcctggatcaagtggtgtaatgcaaacaatgggaagagacatgaggctaaaatatgctgcatcttttgagacttgttattccttccggcttctcttctatgctggctcattttatcctattatgggagctctaaggatggcttatcctaataaatatgagatttatcgaagggttgatgaacccaatggacaagaacgatatgttctcttagaggaatttgtggagaagccaactcctgatgaaatcaccaatgcattcagaccacgtaaaaacgaaaatgaaaagtcagcgtctggattctggggttttttgagtggtatattatgaggcaaacatttcagtaaaggctgagtaagaacaactgaaccttggccttttttttttctttttaatcgtccatgtaaatataagcagccataatgtgaagcaaataattgattcacaggtttagtaaattctcccaggcatccaacattcatagagcgaaatgcttgttttcctgttcctacactcgaccatttctaaattgatgtatagcttcatgtaccatattgataaatagtgggcaaaatttgct

SEQ ID NO: 20042 - DNA, 1885 bp, Oryza sativa
  ref <308>: DATABASE ACCESSION NUMBER: AK070373
  ref <309>: DATABASE ENTRY DATE: 2001-12-06
ttgggcgcatcactaattttgggaatgaaatctggggacagtgaataccggactaatgtggagaatttcccttcttaattgccccaactgtttgtttcctgatttgatatagagataagtttgtgcattgattcattctttgtgcccttgaactgttccttcaatttattgcagcgattatcagttggagcagaaaggtgccagcatgggtttgaggagcaagcagccaaaagcattagctttccgctgctatgcggcgagccaccgatctctaactcttgcagtgtggagccttgcagcactggtagtagttgtgaatttccatcttcttatcatacataaggaggatgagagcaccagcatacatgagatcaatcggtcaattgtaagcgagctggaggaggttgaggaggaaaagttccgggtatcgcctccccggagccggaggaatccccgggctgtgcggcgcaagggggagcagaagccaccttctgtagtggatgagttcttggatgagtcttctgcggtgcacgacatgttctttccagaacgcaacatggctatagatccaatcaatggtgggaatgacagcatgtacttctactacccagggagagtttggcttgacactgatggtaatccaatccaagctcatggaggaggtgtactgtacgatgagaaaaccgagacctatttctggtatggggagaataaggatggcaaaacatacaaagctcacagcaagggagctgatcgggttgacattgtgggagtaagttgctattcatcaaaggacctgtggacgtggagaaatgaaggagttgttctccgaggtgagaaaaagaatgtgacacatgatctccataaatccaatgtcctggagagacccaaagttatatataatgatcggactggcaaatatgttatgtggatgcacatagacgatacaaattacaccaaagcatcagttggtgtggccatcagtgactctcccacaggcccattcagttacctgtacagcaagcagccacatgactgtgaaagtagagacatgaccatcttcaaggatgacaatgggaaggcctacctgatatattcttctgaggacaacagcgagctccacattggtcagttaactgatgactaccttgatgtaactgataatatgcgaaggcttctcattgcacaacatcgagaagctcctgcgcttttcaagtatgagggcacctactacatgataacctctggttgcactggctgggcaccaaacactgcactagctcatgcggcgacagcaataatgggaccttgggagacgctgggaaatccttgtgtgggagggaatgacatattcagatcaacaacattcttctcccagagtacatttgtgttgccgattccaggactgtcaggttcattcatcttcatggctgatcggtggagcccatccgagctgagagattcgcgatatgtatggctgcctttgacagtaggtggactacctgatgaggctgcagattacagcttcatgttccctctttggtcccgggtgtcgatttactggcacagacggtggcggctccctgaggggtggagggactcctgaaatttacttgactgaaattggtatacaatttatacatggtggtcatactagagataccataccaaattattgacacgacacattggagtgcactgtatagatcaggtttagatcaggtagagttgtaaatgtgcagtttttttggtctgttcttaaatcacatatatggttgtgggcttgtggcctgttgggcgaggtgtggtgttgattattttttccttttactgagaataataatgtagatgcagaaatatcaaatatgggtttgtcttgtggtcc

SEQ ID NO: 20043 - DNA, 2603 bp, Oryza sativa
  ref <308>: DATABASE ACCESSION NUMBER: AK070374
  ref <309>: DATABASE ENTRY DATE: 2001-12-06
ggctgtctgttgccaccattaatggctggctccgtgggtagctgagctctttgctggccgagctgagctagcctacctagctggggggagagagagagagagagagagagagcataaggatcttggaggaggtggagatggagtacggcggcgggcgggaaggaggaggagggatgaacggcaacgggacggcgtacgcgggggcgctgtcgccggcggcgaggtacgcggagtcgggcggggcgagcctgacgtgggagaatctgacggcggtgctccccggcggcggcgggcgggcgacgaagaagctggtgcagggcctgtacggctacgccgtccccggcagggtggtcgccatcatggggccctccggctccggcaagtccaccctcctcgacgccctctccgggaggctggccaggaacgtgctcctgacagggaaggtgcttctcaacggcaagaagaggcgactcgactatggcgtcttggcgtacgtgacacaagagaacgtgctgctggggacgctgacggtccgggagacggtgacctactcggcgctgctccggctgccgtcgaccatgtccaaggcggaggtccggcgggtggtcgacgacacgctcgacgagatggggctccgggagtgcgccgaccggaacatcggcaactggcacctccgggggatcagcggcggcgagaagaagcggctgagcatcgcgctggagatcctcacccgccccaggctcctcttcctcgacgagcccaccagcggcctcgatagcgcctccgccttctccgtcatcgagacgctccgccagctcgccgtcgacggcggccgcaccatcgtctcgtcggtgcaccagcccagcagcgaggtcttcgccctcttcgacgacctctgcctcctctccagcggcgagtgcgtctacttcggtgacgccaagcttgctccacagttcttcgcggaaacagggttcccctgtcctagccggaggaacccgtccgatcacttcctccggtgtgtcaacgccgacttcgacgacgtcgccgccgccatgaaaggatccatgaagctgcgagcagaggcagattttgatccgttactcaagtactccacgtcagagatcagagaacggctggtggacaagtacaggatctccgagtacgccatgatggtcaggaacacgatacacgagatcagcaaaatcgagggagtgatcgaggaggtggtgatggggagccaggcgagctggtgcaagcagctgacgacgctgacgaggcggtccttcaccaacatgtcgcgcgacttcggctactactggctccggatcgtcatctacgtcctcatggcggcgtgcctgggcaccatctactacgacgtcggcacgagctacgcggcgatccaggcgagggcgtcgtgcggcggcttcgtgtccgggttcatgaccttcatgtccatcggcggcttcccgtccttcatcgaggagatgaagatgttcacgctggagcggcagaacggccactacggcgtggccgcctacatcatctccaacttcctctcgtcaatgccgttcctgctcgccgtgtcctgggccagcgcatccatcacctattggatggtcaagttcaggcccgggttcagctacttcgccttcttcgccctcaacctctacggcggcgtctccgtcatcgagagcctcatgatgatcatctccgccctcgtccccaacttcctcatgggcctcatcctcggtgctggcgtcattgggatcatgatgctgacttctggattcttccggctgcttccggaacttccaaagatcttctggcgatacccggtgtcctacattgtctacggctcgtggggtttgaaaggagcgtacaagaacgatctgatcgggctggagttcgagccgatgatgccggggcagccgaagctgacgggggagtacatcatcaccaagatgatggggctgagcctcaaccactccaagtggctggacctctccatgatcttcgtcctcctcttcgcctaccgcctcatcttcttcctcgtcctcaaggccaaggaggccgccgcgccttacatccgcgtcgcctacacccgcttcaccatcaaacgactcgagcgccgcgcctccttcaggaagacgctcgccatgtcgtccatgtccaagcggcacaaccagccgccacaccccatggccgtccaggaggggctcaactctccaatgccatactgaagaactgttattacaagttacaactactactactgatgatgatgaagatgaagatgatgattgatcgatcgagcaagaagaggccggtagtttgggcgaccttgcgacgacgatgacaacaaagatgatgatcatatagatggtgttcgtgtgccacgaatcgattaattaatacttgtgtatgtgttgcccttggattgttttcagctcgttggaagctggaagggttcataaactgatagcgtattcttttttttaagatcttgtattttactgtaagaactcggtctctgtgaccaatacacatacaaaaaggatgctgtgtagttgagtgtttgttgtttcttgtttttttccctgatt

SEQ ID NO: 20044 - DNA, 919 bp, Oryza sativa
  ref <308>: DATABASE ACCESSION NUMBER: AK070375
  ref <309>: DATABASE ENTRY DATE: 2001-12-06
gttgccaccgctcgtcttcctcccaccttccgccgccgccgccgtcgctctcctcttcgctccgcagcgcaggtaagaaggagaggaggagaaaatggtgaagcacaacaacgttatccccaatggccacttcaagaagcactggcagaactatgtcaagacatggttcaaccagcccgcccgcaagcagaggcgccgcattgctcgccagaagaaggctgtgaagatcttcccccgcccaacatctggccctcttcgacccattgttcagtgccaaactttgaagtacaacatgaagtcgagggctgggagaggctttacccttgaggagctgaaggctgcgggcatccccaagaagtatgctccaaccattggaatttccgtggatcaccgccgcaagaaccgctcacttgagggactccaggctaatgtccagaggctcaagacatacaaggccaagctggttatcttcccaaggcgtgctcgcaaggtcaaggctggtgattccactgccgaggaacttgccactgccacccaggtccagggtgactacatgcctattgctcgtggtgagaagcgctcagttgaggttgtgaaggtcaccgatgagatgaaggcgttcaaggcctatgctaagctccgtgttgagaggatgaaccagcgccatgttggtgcccgccagaagagggctgctgaggcagagaaggaagagaagaagtgaagtgaccggacatagtatctgttttgttatattcagcagctagtggatgctatcagggactaaatctaaattttgtttttgtgctggaaatagagaccagcttatcattttggtgtcatcataccccttctgtttgatatctggtactgatttgcatgctctgctatcgaatgaaattccatccatgtgttgtgtccg

SEQ ID NO: 20045 - DNA, 3095 bp, Oryza sativa
  ref <308>: DATABASE ACCESSION NUMBER: AK070376
  ref <309>: DATABASE ENTRY DATE: 2001-12-06
tggccgcagctcagcctcagtgcaacccactcgctctctctcactctcgccgcggcttaaagcgcacacggcacggcgggggcggcggccacttccacatcgccattaatgagcctggagcaagccccataggccgtagtagtagtgctactagcttcatcagctccacctcgctcggaagagatcgtctcgtcgagcgaggccctttttgctcccccaatggattcttgccgcagctagtgtttcttggcgattcttgcggcgctttgggagctgaccggtgaagagctctctttgaggcgatgggttgggcgtggcggagggagcagtgggcggttgcatggctgtccgtggcggttcttggggcggcgctggtgggcgccgctggcgcgttcgaggagggcacggcggtgtacattgtgaccatgaagcaggcgccggtgttccacaagcgcctcgacctggagaggtttgggagcagcagagtcgccggcggcggcggcggcggcgggggggacaccccgtccactagcatcctcatgaagccaaggcatggtccagcccaacctatgaattatggctcgtacttagttcgtcttcaaaattcactcttgaagagaacactgagaggagagcgctatataaagctctacagctaccgctatctgattaatggttttgctgttgtcatcactcctcagcaggcagagaggctatctatgacgaaagaagtggcaaatgtaatgttggacttctcagttaggacggcaacaactcatacccctgaattccttggtttgccacaaggagcatgggttcaagagggtggcccacaatgtgctggtcagggtgttgttgttggcctcatcgacacaggaatcgatccaactcatcccagcttcgcagacgacttgataactgacagttatcctgttcctgctcattactctggcatttgcgaggttacaaatgattttccatctggatcctgcaacagaaaacttgtgggagctaggcattttgcagcctctgcaataaccaggggagtgttcaatgcctctcaagatcatgcttcaccttctgatagtgatggtcatgggacccatacagcatccatagcagctggtaatcatggaattcctgttgttgtggctgggcatcattttgggaatgcaagtggaatggctcctcgtgcacacattgctgtctataaagctctgtacaaaagctttggagggtttgctgctgatgtagtagctgcaatagatcaggcagctgaagataatgttgatataatcagcttatccattaccccaaatagaaggcctcctggactagccaccttctttaatccaattgacatggctcttctttcagctgtaaaagctggcatatttgtcgtgcaagctgcaggaaatacaggtccttcccccaagagcatgtcatcatacagtccatggatttttactgtaggagcatctgcccatgacagggaatacaacaactatgttgtacttggcaacaatctgaccattacaggagttggccttgctcctggaacagatggtgattccatgttcactctagttgctgcacctcatgcactgaaaaacaatgtagccagtcctactgaaatgtccctaggggagtgccaagattcaagccaccttgatgaagatctgataaggggaaagatactggtctgcagctattccatacgatttgtacttggcctgtcgtctgtgaagcaagctttagatactgcaaagaatgtcagtgctgcaggagttatattctatctggatccatttgtcattggttccagctgaatccaactccaatggatatgcctggacttataataccatcatctgatgactctaaggtatttctaaattattacaatgagtcccttgtgagagatgagacctcaaacaaaatcgtcagctttggtgcaattgcaaaaatactaggaggccaaaatccaaattatggtatttctgccccaaaagtaatgttttattctgccaggggtcctgatcctgaggacaactcactggccaatgctgatatcctgaagccaaatctgatagcacctggcagttccatttggggtgcttggagttctcttggattggactctgctgaatttgctggtgaaagttttgcaataatttccggtacaagtatggctgcaccacacgttgctgggcttgctgctctagtcaagcagaagttcccttattttagccctgcagctataggttctgcattatcgactactacaagtctcagtgacagggaggggaatccaatcatggcacagagaacatacggcaatccaaattcaactcaatctccagctacaccttttgacatgggaaatggatttgtcaatgctactgctgctttggatcctgggctcatatttgattccagttacgacgacttcttctcctttctatgtggcataaacggctctgctccagtagtgatgaattacaccggcaacagctgcagctcctccgccatgacaggggctgatctgaacctcccctccatcaccattgcagtgctcaaccagtcaagaacgataacaagaactgtaaccaacgtggcgagcgacgagcgctacacggtcagttacagcgccccttacggggtcgccgtctccgcgtcgccggcccagttcttcatccccagcgggcagaggcagcaggtgaccttcgtcgtcaacgccaccatgaacggcacctccgcgagcttcggcagcgtcggcttctacggcgacaagggccaccgggtgatgatcccgttctcagttatctccaaggttgtgcaccgttcatgatttgactgatggaagaacgctgtaatatggcaaaggatctgcctgatccggcgtatgcagcgggggtaactttgactgcctggggcttaacctgaccggagattttttgttgatcttgatgtacattttgatgcatgtcggtgtaagtaagatcaagatgagtgagtggctaatatctgtaactgtaaagagaatggtgtaccggactccgtcctttcacgaatgagaaatcatgctttttctc

SEQ ID NO: 20046 - DNA, 1268 bp, Oryza sativa
  ref <308>: DATABASE ACCESSION NUMBER: AK070377
  ref <309>: DATABASE ENTRY DATE: 2001-12-06
ggctccgtgcccgtgcgtgcgattccgcgtctgccgctgccggccgccgaccgccgaccgccggtgcgcaccttcgccgagggaggaggagtctgttatcgagcaatttcaacaagggcggggccttaatctcctcgtgcagcttgtaaacctcagagtaggggtgggaaagaagtttggtgcgtggattaaattagctgaaagagaaatttgggagatgagtgagcttgcgaacaagttcttggttcttcatctagatggtgaaggtggtggagcagatgatacagaagaagcactgatccaaacatcttccagcatcaaagaggctgatgccggtgaaaatgcgctgagtgacacgttggtactaaattacgatgaaggatctcttgtatcatcatctggtgattaccagatgcctttggtgtggatagacttggaaatgactggtttggatgttgcaaaggatcggatattggagatagcttgcatcataacggacggtaaacttacaaaacaaatagagggccctgatttggttataaatcagaagaaagatctgttagataacatggatgaatggtgcaaaactcatcatgcagctagtggattgacacagagagtactacagagtacgatttcagagcatgacgcagagacacaagtgttagattttgttaagaagcatgttggttcatctcctccattaatagctgggaattctgtttatgtggatttactatttttgaagaattatatgccgcagcttgcagccatcttctctcacgttattgttgatgtgagcagtataatggctttgtgcatcagatggtaccccaaagaaaggaagcgaactcctcaaaaagggaaaaaacatagggcaatgaatgatatcaaagaaagcatcgctgaactgaaatactacgaggacaacattttcaaacctcaaaaatctaagcagtagctacatggatggagcatggtgggcatcttcatgatggacagcaaatcgattcacatgctagccatgattgaaaatggatttttcatatcaatatttccaagtgtcactttgacctcgtatttaaatacgtgttttgttttcatgtccattgatcagtgcctggatgtaagtatgcctatgttattcacctgtgaatggtattggatctatgagcacgggagcccatcacggtcagagatagcagttatatccgtgtattgtcccattttgtcaggtgatatccctttatataactgtaatttcttgc

SEQ ID NO: 20047 - DNA, 2475 bp, Oryza sativa
  ref <308>: DATABASE ACCESSION NUMBER: AK070378
  ref <309>: DATABASE ENTRY DATE: 2001-12-06
gctatctaccctaatccatccgccgccgccgccgccgccgccgccactttatgctcgtctgcctccggcgacgaggcctctcgctcctccggcagcgcccgccccgccccttcccccctctcccgcgcccgcgcagcagcccaccccgcgtcgcctccctccgccccctctccgccgcggcgatgggggagaactccgccgccgccgccgggaaggggaaggaagcgaaggggaaggcgacgacctcggcctcggcctcggcaccgaacgtcgagcccgacgtggcctaccttgaggcggtgacgcagaagcggatccggcagttcgaggagatccaggccaagcaggccctcgagcgcctcaacatcggaggcgagcccatcaggataactttgccagatggtgcagtcaaggacggaaagaaatggatctcaacccctatggatattgctaaggagatatcaagtggattagcaaatagctgcttgatagctcaagtgaatggaacactgtgggatatgacgaggccactggaaggtgattgtgaattgaagttgttcaagtttgatagcaatgaagggcgtgacaccttctggcactcaagtgctcatattcttggagaatctcttgagagggcatatggctgcaagctgtgtattgggccatgtactacaagaggggagggtttctattatgatgcctactacaatgatctgacattgaatgagacacattttggtatcattgatgcccaagcacagaaagctgttgcggaaaaacaaccatttgaacgaattgaggtctccagggcagaggcccttgaaatgttcgcagaaaataaatttaaggttgaaatcattaatgagttgcctgaagacaagaccattacagtatacagatgtggtcctctagttgacctttgccgtgggccacacatccccaatacttcctttgttaaagcttttgcttgtcttaaggcatcatcgtcgtattggagagggaaagcagatcgagagagcctgcagagagtatatggaatttcttttcctgattctaaacgtctcaaggaatataaacatctgctagaagaggctaagaagcgtgatcataggctattaggacagacccaggatctcttctttttccatcaacttagtccaggaagctgcttcttccttccacatggtgctataatatacaacaaattgatggattttttgcgacagcaatacagagatagaggatatcaagaggttttgagcccaaatatttacaatatgcaactctgggaaacctctggacatgctgcaaactacaaggagaatatgtttgtttttgagattgagaaacaggaatttggtctcaagccaatgaattgtcctggccattgcctaatgtttgagcacagggttcgttcatacagagaattgcctctccggatggctgattttggagtccttcacaggaatgagcttagtggtgcacttacaggtttgacacgtgttagaagattccagcaggatgatgcccatattttttgcagagaaagccaaatcaaggacgaagttaaggctgttttggacttcatcaattatgtttacgagatatttggatttaaatatgaattggagctatcaacgagaccagaaaagtacttaggtgatattgaaacctggaacaaagcagagcaacagctgacagaagccttaaatgagtttggaaagccatggcagatcaatgaaggtgatggtgccttctatggtccaaaaattgatattggtgtgtttgatgccctcaagaggaaatttcagtgtgcaactctacagctcgattttcagctgcccctacgcttcaagctgacttactctgcagaggatgaagccaaacttgagaggcctgtgatgattcacagggcaatcctaggttctgttgaaaggatgtttgctattcttttggagcattacaatggtaaatggcccttgtggttgagtcctcgccaagccattgtttgctccatatcttccaattcagtggaatacgctaaacaggtccgtgctaggatacatgaagctggttttcatgtagccatcgatgagacagacaggacaatacagaagaaggtacgggaggctcaattagcccaattcaactacattcttgtcgttggtgcacaagaagcagagactggacaggtcagcgtcagggtaagggacaaagctgaactagccacagtgagcattgatgacatcatcacacgttttaaggaggaagtagcagcttacaaatgattttgatttcacacccttttgctaagaatttactccaaatttgtgattttgatggtgtagcgggcagtgtaatcttgctattttatttcttgacaaaagtacatctgattgtcttttcttaataacgaaagtgtgctattcttcatcagcgacatatatagggatgggtgtttgatcaactcttgcg

SEQ ID NO: 20048 - DNA, 870 bp, Oryza sativa
  ref <308>: DATABASE ACCESSION NUMBER: AK070379
  ref <309>: DATABASE ENTRY DATE: 2001-12-06
gagtccccactctcgccgcccctcgctggcgccgccgtcgtgccgccgccggtcgtccacgcgcacccagatcccagccggcaggctgtcgctgaatatccccgcagctaaccctgcttggtgaatccggcgagcaaccagagatcgtgtaagcgcggaggatcgggatggagattattgtcattctctcgcttgtcgttcttctggttcttggagctctatttgtactaccgaaatcccgtaacaaaggtaaagcgaaggaagccagttcaaatgccaaatcagtgacatttaggagctatacaaaagaagagatctcagcacacaacacaaggacggattgctgggtcatcatcaaggataaggtttacgatgtcacctcttatgtggaggaacatccagggggagatgccatcctaaacaatgctggtggtgattcgacagaaggattttttggccctcaacatggcttcagagtctttgagatcattgaagatttctgcatcggcgagttgaagcactcatgattggagggattttgtattgcatccacgattctctcattgaaatcgaatttcgagagtgtagattattcaagttcaagtcttgcaatcccaggcgttgggacgcagatgacagggcaaaaacattcttagcgattatgatctaaaagctgccctaagcttccggatgtaatttcgttttttttttcagctggcaatttgtagacatcattctgatcaggagctgtcctatgaatgtatttcggaacatgttcttcctcgtcgttgattccaagttccgagacactcccttttgtttggatgatgatgatttctgaaagcataaacaccagagttaggtgatctc

SEQ ID NO: 20049 - DNA, 815 bp, Oryza sativa
  ref <308>: DATABASE ACCESSION NUMBER: AK070380
  ref <309>: DATABASE ENTRY DATE: 2001-12-06
gagttatctctcgtcgctctctccgtctccccgtctctccgccactcgcggctttcccacaaccagcgacggcggcgcgccatccgaccggatgaggggagggcggcagcggttgccacggcaggcggcggcgtgaaggcggctctcccctccccttcctttctccccgctcctggatcaggccacaggaggggagcgatggtggaggcggccaccgtaggcggcggaggtggcgttcctcctccctagctcccagacccggctggaggagggagtgatggtggcggaggcggcgctccctcctctccctccctccctccctcacagatctggccggagggagggagggccgcggccccagcggcggcggcgtcggccccagcgatggcggcgtgtcttctccactctccgactcgccactcccagggcagcggtggctccctccgccatctctcttctccctccggcggcggtggtggcgtcggcggtggcggcggcggtggcgttggcggcggccgcggatggatggtgtcggcggcggccacagatggatgacgtggtggcgaccgcggatggatggcgtggcgacgaccgagggcggcggtggcaacggccgagggccgcggtggcgatggccaatggcggatccggcggaaggcgagaaaagttttgtgatgtaggtttgttgttttttgatgattactttgtgattttgtgatgattgtggttgatgttttttggtgggggggggagtgatttggttgtgccgattttgggaagattttgtgatgattgtggttgattttttggggtgc

SEQ ID NO: 20050 - DNA, 1624 bp, Oryza sativa
  ref <308>: DATABASE ACCESSION NUMBER: AK070381
  ref <309>: DATABASE ENTRY DATE: 2001-12-06
tgaaccaaaatggaagccaacaccggcggcggcggcggcgtcctcgtcgtgtcacgccgcatgatccggccggagttcaaggagctgccgccggagcatgatacgacggttcaccttacgccgtgggatctccggctgctcaccgtggagaacatccagaagggcatcctccttcccaagccacccaccggcggcgagactctcgtcgaacacctggcgtcgtcgttcgctcgcgcactcggccgcttctaccccttcgccggccgcctcgtcgtggaagaggtggatggcggagcgtcgcctgcgagcagcgtatctgtctcgctgcgctgcaacgacgaaggcgctgagttcgtccacgccgcggcgcccgacgtcgccgtcgccgacatcgccgcctcgctgcacattccacgcgtggtctggtccttcttcccgctcaatggagtggttgctgcacacgccgcgacggaatccctgccggttctgtccacgcaggtcaccgagctctctgacggcgtgttcatcgccatgtctgtcaaccacgtcgtcggcgacggcaccaatttctgggagttcatgaacacatggtcggagatcagtcgaagtagcggcggcgaactgggcatctcgccatcggcgtcgacgtcgacttcgccgcctctggtggtcaagaggtggttcttggacaactgcacggtgccgatccctctgccgttcgccaagctcgagcagatcatcccgcgaagcgagcaccaagcgccggtgcaggaatgcttcttcgctttctccgcggcgagcataaggaagctgaaggcgaaggcgaacgacgagatcgccggcgccgccgtcgccatctcctccctccaggtgctgctcgcgctcgtgtggcgcgcggtttcgcgagcccgcggcctcgcgccgcgccaggagacggcgtacgtggtggtcgtcgggtgccggggacgcgtgggcggcatctcgtcggggtacatggggaacgccgtggtgcccggcgcggtgaggctgacggccggcgagatcatggagagggggctcgggtggacggcgtggcagctgaacaagtacgtggcgtcgttcgacgaggcggccatgaggggcgcgctggcgtcgtggccgcggcggccggacttcttctccgtcctgagcctgctcggcggcgccgccatcatcacggggagctcgccgcggttcgacgtgttcggcaacgacttcgggtgggggaggccggcgaccgtgcggagcggcggcgcgaacaagttcgacgggaaggtgacggtgtacgaggggccggacggcgccgggagcatgtcgctggaggtttgcctgactccggcggcgctggcgaagctcgtcgccgacgaggagttcatgggcgcggtgaccacgccatgagttgcatccatgcatgcttctattcattgcgatttgcgagctcaattggttaaaaaaaaaacattcacatcgacatcatgtaatccatttatgtcaatttgtcagtagaaaggtgatgaattcatcaacagctatagctgatagatcagagatatcactggattaccttttgtatcaaacaaggataaatcaatatgtttgtgaagtg

SEQ ID NO: 20051 - DNA, 1445 bp, Oryza sativa
  ref <308>: DATABASE ACCESSION NUMBER: AK070382
  ref <309>: DATABASE ENTRY DATE: 2001-12-06
gatcgctcccccgttcaccaagaccaccaccaccttatccctttcgcacgaccgcatctcccgcacacgcgcagtgatccggccgcttcccccgttgccgctctcttgtactaccagtacctgttgcctcgcctagctagctgctggcctggccggcgtcgcgtgccttcatggcctcgctcctacccagtccggtgttccccaccgccgccgccgccgcggcgtccacatcctcgtcctcgaggtgccggtgccggtgccgcatcacaacgtcatcttcggcgcacggttggtccaactgtcagggctggagactccatcaccgggtttgggccgcccaggctgctgatcagcaaggaggggtgcagcagcagcaacaacaagaagaaaatgaagacggtgtagtcgacagcaacgtgctcccctactgtagcatcaaccggaaggagaagaagactattggggagatggagcaggagtttctccaggcgctgcaggccttttattacgacaagaaggccgtaatgtcgaatgaggagttcgataacctcaaggaggagcttatgtgggaaggaagcagcgttgtgatgctaagccctgatgagcaaagacttttggaagcatccatggcttatgtggctggcaaccccattatgacagatgctgaatttgatgaactaaagctgagattaaggaaagagggaagtgaaatcgtacaagaaggtccaagatgcagtcttcgaagtcgaaaggtctacagtgacttgactgtcgattacttcaagatgttcctgctaaatgttccagcagcagttttagctctgacactattcttcttcctggatgatttgacaggttttgagatcacatatcttcttgagttgccagagcctttcagtttcatcttcacatggtttgccgcactgcctctaatattttgggtagcacaggcaattacgagtgccatagtgaaggactttttaattttgaagggaccgtgcccgaactgtggcaatgaaaatctttccttctttgggactatactgtctgtgcctagcggtggtgcaagaaacagtgtgaaatgtgcaaattgtagcagttcattggtatacgattctgcatcccgattgattacactcccagaaacagctgaggcttgattgaagatcacttcgcaggacaggagctgcaccaaagcaattccttgtatctaccatggagagcaagatgaacttttcatcttgtgacaatcgtgttgtgaagcatccttttttatactccttagtctgcctctttaaatattgtatatatttgcatttattaaaagtttaagaaatagctatgactatatatactgtataaacactttggaaagtttatattgtacatgaactaaactgtcgtcatatcatgatgaatgtctgactggcccatgcttattgagt

SEQ ID NO: 20052 - DNA, 1723 bp, Oryza sativa
  ref <308>: DATABASE ACCESSION NUMBER: AK070383
  ref <309>: DATABASE ENTRY DATE: 2001-12-06
gaatcgtcatccgccgtagtgctggctgtgctgcacacccggtcacccctcgcccgcaccgcacgacacaagggccaccgccgccgccacacttccccagccgccgccaaccgccacacatgcctagccgccgccggtcgcctcacttccctagccgctagggccgccgccaccgccgcagcactttcccagccgccgtcgtcgcacttccctcccagtcggcgccagccgcaagaaggtgcaggttgcagcctcggcctcgcagccgcaggtcccatcctctaccaacttcgagcctgcgactacgaatacgatggaggaagaacgagaggtgcaagagcaagtgcctcaggttgcaggtgtcgaatcccagagtaaacgcgcgagcgcgagcttgacgccggcctcgtcgaaagcaacggcgggagcagcagctgtaggacgggccgcacggatccctgcaagccgtagtcgaggatctgcaaccacgaacaaggcaatggcaacaccgacagtggcaccaagttcacgagctaaagcctctaatccctctatgtccgtggaaatggtgatcatgtcggatggagaggaggatgaagaaaacagctttgacttgaacgatgagatgtcagttagcctaccttcttcaggaagcgcaagtgagggagatgatggagatgataagtagggtcctaaacgaggtgcaaaaagggcaaagggaggtatttcactgtcacctatcaagtgcaaggtaacgagaggaaaacgggatagttgttggaaatatttcaaggtgatcaatgttccctcaaagaaggagaatgggaaaatggaatgtaaggccaactgcagattttgtcatcacagctatgcataccaccctgggggaaccaccaaagcattgaattgtcacctagataagtgcacgatttacctgaacaagcttgcaagggctaaagctcaagaaactgttcaggctttggtttgtgcatcaagttggataagagcctctcaaaatgataacagtgcacctattcttgtgatggtggagatgatgatattgaaatagtggagttccctaattgtgtggtgtcaagcaactagctacaactctagaagagacggcctgtttggttggagggagtttttaggagggattgggagtttagagggatgaggctattaagtgttttgtttggttgggagacatgggaattttggtgggatgaggatgaggaattgaggaaggaactccctccttttcaatacctgggtaggggcaggtaattgggagggaattcctcctttaatttttctaagcaaatctcagtcatccgtttttattaatgacttaatctccaactaaactccctatcaatttccatcacctctaccaaacaagatatttggattaaaaatcaaattctcatcttaatctcataatcaattccctcgtgtaaactcccaatccccttccctcgagttaccaaacaagccgagaagggatgggagtgggactatggagggagaaaggaagctgtcaagggctcagggctgcagcagctgctgctctaaactgcactccacttgtgttttgtgtttatgtgcaattgtcttggatgaaaatgatgaaccttgcaggctgcagctttactagttatgcatttatgttaaattttgatgtattgaactattgaagtatatattattgtactggactttg

SEQ ID NO: 20053 - DNA, 1010 bp, Oryza sativa
  ref <308>: DATABASE ACCESSION NUMBER: AK070384
  ref <309>: DATABASE ENTRY DATE: 2001-12-06
gaactgctgcgtccactatgacgtgttctgttcggaggcctcgattccaattcgaaggtttcggaatctgaaatggcggcggcggcggtgcgggcggcggaggagcttgcggagagggagatggcggggcgcgacgcctcccacgacgccgcccacgccctccgcgtccgcgacctcgcgctctccctcgccgccgagctcggcctctcctcctcccccgaccgcctcctcatcgtggagatagccgcgctcctgcatgacatcggtgattacaagtacaccaaggacaatgctgaggatatgagcatcgtggagaggtttcttgaagaggtggaactggagcagggccagagggaggaaattgtggcgatcattaaggggatgggattcaaaaatgaagtttcaaagaagtctgttgttgagcctactcttgagtttgcaattgtacaagatgcagatcgtcttgatgcaattggtgcaattggtattgcaagatgttttacgtatggtgggagcaagaaaaacacattgcatgatcctaagatactgccgcgtgataatttgtcaaaggagaaatacatgtccaaggatgaaaaacagacatcaattaatcatttccatgagaagctatttaagttgaaggacatgatgaagacagaggccgggaaaaagagagcagagaaaaggcacaagttcatggaggactttgtggctgaattctatgaagagtggagtggcagagcttgaagttgaccaaccaggttatgggctgttggtctgtggcatagcttgaagttggccaaccaacaacaactcatattgctagtcgtctacttggtgacattagcatgttttgttgctgatatgttaagccatgcaaaaaaacgagggataaagcacacttgagtggccaaaccactgaataatgctcctcaacaggtactttgcctgaactctgatttttttctggagcacctgtgattgatgtacatttgatcggcagcaaaacc

SEQ ID NO: 20054 - DNA, 2091 bp, Oryza sativa
  ref <308>: DATABASE ACCESSION NUMBER: AK070385
  ref <309>: DATABASE ENTRY DATE: 2001-12-06
gtgaggaaggattcagacattcagagagagaggagagggaggagagatgggaggcgatcatgggaagctcatgaagagcttgaagggtgcagctcagaagtatctcggcgtcggcttcttgctcggcttcttccttgttctcctcacatacttcaccgtctccgagcagttcgcgatcgctgcacccaacgcaattcggaaaacatcaccgggacacgcctccccgacgatccccccgcctgtggaagagaagaggccacagctgccccctatcatagagcagcggcaagcaccaaaggcagagcatgagcatgcagcggtggtacaggagaagaccccgtcagctgaagagatagagatacagaaagaaacagaagaggaccacaccaaggagaagcccactgatgacgtcaccaccacggtggaggagagcgcgccggcgaagaagccggcgtgcgacatccaggggccatgggcgtccgacgtgtgcagcatcgacggcgacgtgcgcatccacggcgcggcgcacgacgtcgtgatcccgccgccgatcgagggcggcggcagcaacccgaacccgcgggagtggcgcgtcgtgccctactcgcggaagcacatgggcgggctcaaggaggtggcggtgcgggaggtggcgtcggcggcggaggcgccggcgtgcgacgtgcggtcgccggtgccggcgctggtgttcgccatgggcgggctgacgggcaactactggcacgacttctccgacgtgctcatcccgctgtacctgcaggcgcggcggttcgacggcgaggtgcagctcgttgtggagaacatccagatgtggtacgtgggcaagtacaagcgcgtcctggaccggctgtcgcgccacgacatcgtcgacatggacagggacgacaaggtccggtgcttccccggcgcggtggtcggcatccggatgcacaaggagttcagcatcgacccggcgcgggatcccacgggccactccatgccggagttcaccaagttcctccgcgacaccttctcgctgccgcgcgacgcgccggtgagcctcgtcgacaatgccgcggcggtgaggccgcggttgatgatcatctcgcggcggcacccgcggaagctgatgaacgtggaggaggtggtgcgggcggcggagcggatcgggttcgaggtggtgatcggcgacccgccgttcaacgtggacgtcggcgagttcgccaaggaggtgaaccgcgcggacgtgctgatgggcgtccatggcgcggggctgacgaactcggtgttcctgccgacgggggcggtgctgatccaggtggtgccgtacgggaagatggagcacatcgggaaggtggacttcggcgatccggcggaggacatgaggctcaagtacatggcgtactccgccggcgtggaggagagcacgctggtggagacgctggggcgcgaccacccggcggtgcgcgacccggagtcggtccaccggagcgggtgggggaaggtcgccgagtactacctcggcaagcaggacatccgcctcgatctcgcccgcttcgagcccctcctccgcgacgccatggattacctcaaacaccagtagaggcgagctccatccacaaagactactgtaattagctactagctgcaacattttttttttttttgaatgcctagctgcaacattttcattttcgttctctatgcttttttttttttgctttctattctttcgagttctttcacagaaaaaagaaatcgatcgattatttgatcaggattacagttacattatactacttctctttgtattccctttgatgcacataatggaggatggaatggaacgaaatcgattcattattagcactgaattgtgttcgcatttggtgatctctagtttcaactcgatcaaataagtgttcattttttttttaaaaaaagtacaattagaatacccaacaactactagaaattgtacaagtacattgtgtagcacatatgcacatgtcgttgttagagatgacagatttgcattgagtgtgttgttgttgtaaacaagtagcagaggttggtagagtttggttgtcc

SEQ ID NO: 20055 - DNA, 1889 bp, Oryza sativa
  ref <308>: DATABASE ACCESSION NUMBER: AK070386
  ref <309>: DATABASE ENTRY DATE: 2001-12-06
gactccgccgcagcagcagctgatccagcttcgtcgtcgtcggcgatcgccaccggcagctaggcagtgacggtgacagtaggaggagatcaggatatggactgcttcgcggagacggaggggaagagggcgcatgacccgctgtaccagcggcgcgcggcggcggcggcgacgccggcgacgggggtgccggtggacgacgtggacaaggtggtggacgtgcccggggcggtgatcgtcggcgccgggccggcgggggtggccgtgggcgccctgctggggctgcgcggcgtcgcctacgtggtgctcgagcggtgcgggtgcatcgcgtcgctgtggcgccaccgcacgtacgaccgcctctgcctccacctccccaagcgcttctgcgagctcccgctcaggccgttcccggcgagcttcccggagtacccgacgagggaccagttcctcggctacctcgacgcctacgcgcgcgagttcggcgtcgagccggtgttccggcgggcggtgatcagcgccgagtacgacggggagtcgtggtgggtgtacaccagggaggtggtcgcggcggcggccggcggcgagcaggccgtcctcgggtgcaccatgaccgtgtaccggagcaggtggctcgtcgtggccaccggcgagaacgccgagcccgtcgtgccggagatggacggcgccgggaggttcaagggccagatgatgcactccagcgagtaccgcaacggcgacggctacgccgggaagaaggtcctcgtcgtcggctgcggcaactccggcatggaggtgtccctcgacctctgcaaccacaatgcgcgcgcatccatggtggtgcgcgacacggtgcatgtcctacctagagaaatcctggggttctccactttcggtctgtccatgtggctcctcaggtggttgtctgtccaaacggtggattggctggtactcctgttgtcgttcctcgtgttcggtgatacggcccgcctgggcatcccacggcccagccttggccccttcgagctcaagagtgtgtcgggtaagacgccggtgctcgacgtcggaaccctagccaagatcaagtccggggacatcaaggtgaccccagcaatacaatgtttccaagaacatggcgtggagtttgtggatggcagcactgaagaatttgatgttgtcatcctggccacaggatacaaaagtaatgtgccatattggttaaaggagaaagaattcttctcagagaaagatggcttcccaagaaagggaaatgcgtggaaagggcagaatggcctgtacgctgttggtttctcaaggcgtggtctctctggagtgtccatggacgccaacaacattgtgcaggatattgtgcagcgtttgcacgatatgggctatgaaagaagtgagaacaactgacatggaatggaacccacttgttttgatcagagcatttttcttgtagacacgtcatgtgctggtctggtttacatttcaccctaattaacaggtagatacaagcctgaaaaaagccatcaggacaatctaccagtgcatatgcatgcatatactttgatcaggctagtgcatctcatttttttccccaaactcataatgtatataagtcatggtataggcagtaatcatttgttgcatttttagtgatatgatttggccggcctaattttaactggagggagtgaaaactagagtattgagtttgagggagaatagcataatcagtttagttttggtcgcgcgtcttttttgagaaagctttgatttcatttcctttttttttcattttggcaattgttgtcatgttattttgtaagtgtcaattgtaacaaacaacatttgcaataatctatgctctggtagattttctgttc

SEQ ID NO: 20056 - DNA, 955 bp, Oryza sativa
  ref <308>: DATABASE ACCESSION NUMBER: AK070387
  ref <309>: DATABASE ENTRY DATE: 2001-12-06
gattccatttcttttcttttctttctccccctcaattattgccgcttctgtccatcccctccccctccaattccattccatcttcatctccatatcttctcctcctcgcgtcggcagttatctcctcgttgataatggcgtcgtcgtcgtcgtggtgggtggtgatgttgttgatggtggtggcggcggcggggtggggcggggtggcggcggcgacggcggcggaggcggcgcacgaggtgctgcgggcgcacgggctgccgcgggggctcctgccggcggggatcgcggatttcaggcacgacgaagggagcgggaggttcgaggcggcgctcggggagtcgtgcacggcgcagttcgaggtcgggctgcggtacaacgcgacggtggccggggtcatcagctacggccggatcgcgtcgctgtcgggcgtctccgcgcaggacctcttcctctggttccccgtccgcggcatccgcgtcgacgtcccttcctccggcgtcatctacttcgacgtcggcgtcgtgttcaagcacttccccctcgccgtcttcgaggccccgccgccctgcacccccgaccccctcctcctcctcacgcaggtgtgtgaggacggatcggtcgccggcggcggcgcggcgtcgcaatgaaggggacggactcgatggttgaaatcggcgaggcggaaaccaaaagaatgcgcagttttgaggcatgggagtggtcggccggtccgtcgccggcgggccggcatctgtgcagatagatagaatgaacattcctttcgttttctactactagttagtaacctttcattcctcatcactctgttcttcttgccgttcttgttgtccagtgcgatcaaagccggccgacggtggccggtagaggaggctgccggcctccggtcgccgccacggcgataatttttcgtggttatgatggttcggggatt

SEQ ID NO: 20057 - DNA, 2179 bp, Oryza sativa
  ref <308>: DATABASE ACCESSION NUMBER: AK070388
  ref <309>: DATABASE ENTRY DATE: 2001-12-06
gctccacccgccagccagccagcgcctcctcccctctcctccccacgcaacccgatccattcccaaatccctcctctcatcaactcgactctcggtcggcgtcaccggcgtcggaggcggaggcggaggcggcggccgcgtcggcaaggtagtgctgtgctggatcgagtcgagcagctggctgcgcgcgcggtttgtggctctctgtgtgagtccggcgctgctgcttcaattccttcttccccagggcacctcccgtgagccgccatctccctccctcacctacctctggattcgctccagatccgcccatgagtaggcccccacgcccaccgcctgctcgccatcgcgcctccactccaccacaccatgccgatccccaccacctctgacactactccgcccctccccctctctcattcccatggaggacctcgccctgcccgccgctcctcctgcccccacgcttagcttcacgctcttagccgccgccgccgccgtcgccgaggccatggaagaggctctgggcgccgcgctgccgcccctcaccgcccccgtccccgcccccggagacgactccgcctgcgggagcccgtgctccgtcgccagcgactgcagcagcgtcgccagcgccgacttcgagggcttcgccgagctaggcacttcgctcctcgcggggcccgccgtcttgttcgacgacctcaccgccgcctccgtcgccgtcgcggaggctgccgagccgagggctgtgggggccactgcgaggagcgtgttcgccatggactgcgttccgctctgggggctggagtccatttgcggccgccgcccggagatggaggacgactatgccgtggtcccgcgatttttcgaccttcctctgtggatggttgccggcgacgcggcagtcgacggcctcgaccgggcctccttccgccttccagcccatttcttcgccgtctacgatggccacggttgccaattactgcaggaagaggatccacgccgtactgacagaggagctgcgtagagcggaggacgacgcgtgtggctctgacttatctggccttgagtccaagaagctgtgggagaaggcgttcgtggattgcttcagtcgtgttgacgctgaggtgggaggaaatgctgcgtctggagcaccgcctgttgctccagacaccgtggggtcaactgctgtcgtcgcagtcgtttgctcgtcacatgtcatcgtagccaactgcggtgactcgcgtgctgttctctgccggggcaagcagcccctgcccctgtcactagatcataaaccaaatagggaagacgagtacgcgaggattgaggcgctgggtggcaaggttatccaatggaatggttatcgagttctcggtgttcttgccatgtcgcgatcaatcggggacaaatacctgaagccatatataatcccggtccctgaggtcacagttgtcgctcgtgcaaaagacgatgattgccttattcttgcaagtgatggcctttgggatgtaatgtcgaacgaagaggtctgtgatgctgctcgcaagaggatattactatggcacaagaagaatgcggccaccgcatcaacgtcatcggcccaaataagcggtgattcttcagatccggctgctcaagcagctgccgactacttgtccaagcttgccctacagaaggggagcaaggacaacatcactgtcgttgtaattgacctcaaggcacataggaagttcaagagcaaagcatgacattgcctccatgaacaataacaatagtttataggaagctagaaatgtgggaaatccaagacaatttatttagctgctgcaccggtacaatttgtttagctgctgttcagtactggtgctgctgcagctgcagctgcttctttgccctcgccatttatttctgccgagggatgtactactagtatactgtatttttctacacggtacagactcccaaatctgattcagggtcgaggacataaggtggatctgggaattttggggtctctcaagacaagacagaaaacataacaaaatctgtagatgtaggtaggagtcctaggacagattgggtttctgcctctggcattaatcgtttttgttaaccggtaaagatactgctacttgcaattgctgtttcatatatactcctatatctttcttgtgcc

SEQ ID NO: 20058 - DNA, 2466 bp, Oryza sativa
  ref <308>: DATABASE ACCESSION NUMBER: AK070389
  ref <309>: DATABASE ENTRY DATE: 2001-12-06
gaccattgcatgcaccaccggaacgcctcacagccgtagtcttcctttccggtcccgtgcatgcccaggacgccatgggccacaaccgagaatagcatcaaccttgccaccgctgctgcttcgccggcgccaatgccgatgtgagcccggcccggccgccgcacccccctccccctacggcgacgacgtcacgcgcgcgcgagatgccattgttgcttctgtgaggggggctcaccggaacgcgtcggcattgacgacgacccggacgaacgcgcggcagcatgatgccgcgcgtcctcatggcgtctacggaggacacggccacggcccctgccggtgggccgccggagcccccgccgcagtcgtcgtcggcctcgccgtcgccttcccctcctcctcctccaccgacaccgtcctcgcctcagcggcctcccccgccgccgccgccggccactccgcccccgcctcctccggcatctccaggcaaaaaccagagtcccgcgtcgccgtcccaagattcacctccgccagtggcgtccccgtcagtatcctcacctcctccggcaccgacgacaccgccctctccgcccccaccaagcaagtcccctccaccgccgtctccgcctcctactacgtcgtcgacaccgccatcgcatcaatcacctccggaagaaggaacctcgccgccaccttcgccatcatcaggggctacaacaccttcacctcccccaaatgcgcagtcgtcgtcgtcgtcttccacacctcctgccggcgcaggaacctcgccacctgcaccgcgcgaaatgccatcgcccgggacgccaccatcgccgccgacgacgcttattacgacacaggcgccgccgatccagccaccaccaccaccgggcggtaacagcatgatcatgccgagctccctaactacagccggcacgtctcagagcccgcctgacgccaccaccgccggcgcaccaccacctccggctccatcggtgggagcatggggcggcaacgtgccgagcgggttgctcatcggtgtcgccttcgccggtttcctcctggcgttggcgtccatgttcttgttcttgtgcatcaagaaccggtggaagaggaggcggcggccggcacaggtgatgaacctggcgcgcaggagaaccctcgtcgtgccggagcgtgtggcgtcgccggaagtgtaccagccgtcgaacggtccgacggcgtcgccgagcgggacgagctcgtacgagttctccgggacgacgtcgtggttcacgtacgatgagctggcggcggtgaccggcgggttcgcggaggagaaagtgatcggcgagggcgggttcgggaaggtgtacatgggggcgctgggcgacgggcggtgcgtggcggtgaagcagctcaaggtggggagcgggcagggggagaaggagttccgcgccgaggtggacaccatcagccgcgtccaccaccgccacctcgtcaccctcgtcggctactccgtcaccgagcaccaccacctcctcgtctacgagttcgtctccaacaagacgctcgaccatcacctgcacggaggaggcctccccgtcatggattggcccaagcggatgaagattgccatcggatcagcccgtggtttgacctacctgcacgaagactgccatcctaggatcatacatagggacatcaagtcggccaacatcctcctggatgacgccttcgaagcaaaggtcgcggatttcggtcttgccaaattcaccaacgattcggtgactcatgtctcgacgcgcgtgatgggcacattcgggtacctggcgccggagtacgcatcaagcgggaagctgacggacagatcggacgtgttttcgttcggggtggtgctgttggagctcatcaccgggcggaagcccgtggactcgtctcagcccctcggagaagagagcttagttgaatgggctcggcctctcctggtggacgcgttggagacggacgacttcagggagctcgctgaccccgcgctggagcgccgctactccaagtcggagatgcggaggatggtggaggccgcggccgcttgcattcgctactccgtcaccaagagaccaaggatggtgcaggtgtggcgatcgctggacgtggaggggagctcgccggacctgaccaacggagtgaagcttgggcagagcatggcgtacgactccaaccagtactcggcggacatcgagctcttccggcggatggcgtttgccaacgacctctccaccgctgagctcggctactccggcaaggacgacgtacgccgtccgccacgctagcagcagctccaggaccaggcccagctgagcactaacggcacatgcgctgttgttaaatttgttgtcgtaactaacacgcatgcatgtatgtaagacggggtggcagaattggtgtatatataaaaaggctttgaatagcaatcctgttgatttgggg

SEQ ID NO: 20059 - DNA, 1860 bp, Oryza sativa
  ref <308>: DATABASE ACCESSION NUMBER: AK070390
  ref <309>: DATABASE ENTRY DATE: 2001-12-06
gtagctagctgtcactcataccaagttcagccagagaaagagcaagaaacacaagagaagttcagtctctgaatgtgtgttgccaattgctgaaactctgcatgtgcatatgcaaacttgaatcagttagctaactgcatgacatccatgtcgaccggtgttgaaagggattggattgcaccgtgatcttatcttctctgagcaacaagaagaggtggaagaagcaattgatggaggagtttgagctgcagcagcagccgtattacagcaagctgctcctgggtagcccgctggagatcgccaatgtcgacgacagtgatctgcagcttgtcgccggagttccctcggatccgccgcctgcgccgccgacggccgtgaagaagaagaagaagagaagccttccagggacaccagacccgagcgcggaggtggtggcgctgtcgccgcggacgctgctggcgacgaaccggttcgtgtgcgagatctgcggcaagggcttccagcgcgaccagaacctgcagctgcaccggcgaggccacaacctgccgtggaagctgcgccagcgcggcggcgctggcggcggcggcggcggcgagccgccgcggaagcgtgtgtacgtgtgcccggaggcgtcgtgcgtgcaccacagcccgagccgcgcgctgggcgacctcaccggcatcaagaagcacttctgccgcaagcacggcgagaagaagtggaagtgcgaccgctgcggcaagcgctacgccgtccactccgactggaaggcccactccaaggtctgcggcacccgcgagtacaagtgcgactgcggcaccgtcttctccaggcgcgacagcttcgtgacgcacagggcgttctgcgacgcgctggcgcaggagaacaacaagctcgcgcagccgatgaacatggcggcggtcacctccgctctgcagggccagcagcaggctcaccaccccgtcgccgacgacgatgacgccgcgggcgtcaagagcccgcacctcaagatgttccccgacgtcgacaacatcgtcgccgccgccacggccggaaacccgctcttgccgccgccgcttagcatggcgggatgcatgctgtccagcctcgccgcgccattgtcgtctccgttcctccccgggtgcaagcttggcgtggacgcggcgcgcgacgccgccatggtgttcccgccgccgccgccgccggccgggtcagcggcggcgatcatgtccgccacggcgctgctgcagaaggcggcggagctgggcgccacgacgtcgacgggctgctacggcggcgtcgcgttcccggccatgggcattgccggcggtctcgaccggcttcccgccataggccatcatctcgcgccgtacgacgacgtcgtcgtgccggcggcgctgcaggggcagacggcgacgcagctggtcgggttcgacctgggcgggctgttgcccggccagctctacggcggcggaggcggcgcgatgacgagggccatcgggtcgctgatgcacggcggcgaccagcacgccggtgtggtggatcgccggcgaggggaaggcgtgcgcgtcgtggactacatgggcgttgacgacgacgacgaccacgggtgcttcgatggcgtgggcccctttgggcctcatattggcccatgggcctaatccactccactccatgatgcaacgcaaatgttgtagtgatgtactagtacgtattggagtttgaatctgatgaaatggagttaacacgaggcgagcttacctttttttttattcgtgttgagacaattgtttgaacttctgcagaaaatttgatagtttaaatattttttattaggtgagaataaacatattaaatccc

SEQ ID NO: 20060 - DNA, 1164 bp, Oryza sativa
  ref <308>: DATABASE ACCESSION NUMBER: AK070391
  ref <309>: DATABASE ENTRY DATE: 2001-12-06
gtcatgatccgccgcgtgcagggggaggtgtgcgcggcgctggaggaggccgacgggagcggcgcccggttcgtggaggacgtgtggtcgcgccccggcggcggcgggggcatcagccgggtgctccaggacggccgcgtgttcgagaaggccggggtcaacgtctccgtcgtgtacggcgtcatgccccccgacgcgtaccgcgccgccaagggggaggccggcaagaacggcgcggcggcagatggccccaaggctgggcccgtgcccttctttgccgctggcattagctcggttcttcaccccaagaacccatttgctccaacattgcattttaactaccgctattttgagacagatgcaccgaaagatgctcctggtgcaccaaggcaatggtggtttggaggtggtactgatttgactccttcatatatcattgaagaggatgtgaagcatttccattctgttcaaaaacaagcgtgtgataagtttgacccaagtttttacccgagattcaaaaaatggtgtgatgattatttctatattaagcaccgtaatgagcgtcgggggcttggtggaatattttttgatgatcttaatgactatgatcaagaaatgcttctcaactttgctacagaatgtgcggattctgttgttcctgcatacataccaatcattgaacgccggaaggacactccatttactgaggaacacaaggcatggcaacaactgaggagaggtcgctatgtggagttcaaccttgtatatgatcgcggtaccacatttggcctcaagactggggggaggattgagagtattctggtttctcttccactgactgcacgatggcagtatgatcatacacctgaagagggaactgaagaacggaaacttcttgacgcgtgcataaacccaaaggaatggctcgatctctgaacagcttgatttcgttcgttcgtccaatcgtttgttagctttcctcgcactctgtagccttacgatctccaaacatgtgtagttcttttacttgtagaatcctgaataagtgtatgatgcaatgcgggtgttttgtttcatctgtcgatgctgttgagctttgtaactgtggtatcagtttctctctttttttcgagtgaatgaaatatagccggtgagccttttccc

SEQ ID NO: 20061 - DNA, 1928 bp, Oryza sativa
  ref <308>: DATABASE ACCESSION NUMBER: AK070392
  ref <309>: DATABASE ENTRY DATE: 2001-12-06
gatcagtttcctcgtccttgcctcgcatagtcgcagctcttctctctctcgctcgctcgctcgatccgagcaaggtaaccgcagctgcaagcgtgcggttcttgcggatctcgcgcgggctcggctctgcgaggaggagctcatcccccactgtcccaatatgagggcaaagaagatgttttttggtttttccgtttctcttatcctcatcaacctagcttccataatggagcgggctgatgagaatctccttccggcagtttacaaggaagtcagtgctgctttcaacgctggtcctactgatctggggtatcttacgtttctaatgaactttctcaagtcaatagcatctcccttggcaggtgtccttgcacttcaatatgatcgccctgcagttcttgctatagggacagtcttctgggctgtatcaacaggggctgttggtgtcagccagtattttcagcaggttgcattctggagagctgtgaatggtcttggactagccattgtaataccggcacttcaatccttcattgctgatagctacaaagatggtacacgcggagcagggtttggcttgttaagcctcattggttcaataggtggtataggtggaagtattttagcaacaatcatggctggtagggattactggggattgccaggatggaggtttgcatttctaatggttgcatttcttagcttgttaattgggcttcttgtctacttttacacggttgatcctagaaaagtgtctccaagccattttggtgatgacgaggaccaccatgagaggtcgcatttgatcggtaatggtatttttcctccacagtccatctggaaggattcctggatagcagcaagatctgtcatgaaagtgcgaacatttcaaatcattgtcttgcagggcatagttggctcattgccatggactgctgtagttttcttcacaatgtggtttgagctcattggttttgacaatagcagttcagcagcgctaaacagcatgtttgctatcggttgtgccagtggatcatttctaggcggagtaattgcagaccgtctgtcaaaatactatcctgattcagctcgcatcatgtgtgctcagtttagcgccttcatgggtatccctttctcttggatcctccttacagtcattcctcagtcagtcgactactggtctgcttttgctgtcactctcttcttgatggggattaccatcagctggtgcgctacttgcgcaaacaaccccatgtttgcggaggtagtccctcccaagcaccgcacgatgatctatgccttcgaccgcgcgttcgagggttcatttgcctccctggctgctcctgctgttggcatggtcactgagaagatctatggctacaacgcaaagaccgtcaatctggaaaatggatcggtagcaggggcgtatgcactctcgagggggctattgacaatgatgattgttccttttggcctgtgcttcttgttctacagcccactgtactttgtgttcaagcgcgatcgagaaaatgttagaagattgcctagtgtcaaggagcaggagctaatatgattatcaaatgcttgctcgtaaggggtgataggggtttagtgaccaacagttactacaagtatctgattttcggcaccaactgaaaatttatgttcagagttgaaatgttgcagttgagtaatacagtttccactttcttcaggcagataagaaaaccacagaaacacacgatgaattgttgtataattattatatcaagagtcaagagggaagcaaaacattgtctgtcattttcttctaacttttttgtagataaacggaaagcttttaatctttctgcttacttggctagggaattttcttgtaaacctgaactttacaaagataatcatccgttctagacattgctgacatt

SEQ ID NO: 20062 - DNA, 2263 bp, Oryza sativa; identical to SEQ ID NO: 20034
  ref <308>: DATABASE ACCESSION NUMBER: AK099139
  ref <309>: DATABASE ENTRY DATE: 2002-08-28

SEQ ID NO: 20063 - DNA, 1247 bp, Oryza sativa
  ref <308>: DATABASE ACCESSION NUMBER: AK070393
  ref <309>: DATABASE ENTRY DATE: 2001-12-06
gaaggaggaggagagcgcggcggcgatcgatggcggcggccacagtaagcaacaagagggtgatcctaaaacgatacgtgactaggcttctctcggaggatgatatggaggtggtgacggtggaggcgccgccgctggatgtgccaacggggtcgaagggggtggtggtgaagaatctgtatgtttcgtgtgacccttacatgcgcaatcggatgacccaccacgagttgcccagctacatcccggattttgtcccaggggaggttttggaaaattttggcgtgatgaaggtgatatcatctgggcacctggatttcaaggcaggtgatcttgtttgggggatgaccggatgggaagaatataccgtgatcaacaatccagaatcgcttttcaagatcaatcaccctgaacttcctctatcctactacactggtattctaggaatgccagggcttaccgcctatgctggattctttgacgtgcccaagccaaagaaaggtgaatatgtctttatctcaggagcatctggtgctgtaggtcaggttgttgggcagcttgctaagatcacaggttgctacgtgatcggcagtgctggttatgacgaaaaggtcaacttattgaagagtaagtttggctttgatgatgctttcaactacaagaaggaacaagatcttgaggcagccctaaggagatattttccagagggtattgatatctactatgagaatgtgggcggcaaaatgctagacgcagtactacctaatatgagtctgggtggtcggattgtggcatgtgggatgatctcgcagtacaacctggagcagcccgagggggtgcgaaacctgtactacatcgttaccaagcgcctgcgcatggagggcttccatgtgtttgactactatgacaggtactaccggttcgaggaggagatggctgggtacctgaaggaagaaaaggtgtcatacgtagaagatgtcgttgaggggctcgacacagcaccggcagcgctcatcaggctcttcactggccgtagcgttggaaaacagctcgtcgccgttgcacgcgagtgagacaacgctgcttggcatgggagttggcattacgtaatagtactagttcagaattcagaaattgggggctttccagtttggccaatacctagttagtacatctgcttttctcaagtcagacaggagaaaacaatgatattgacgggagtacttccccaaaatgacttttttttattt

SEQ ID NO: 20064 - DNA, 2336 bp, Oryza sativa
  ref <308>: DATABASE ACCESSION NUMBER: AK070394
  ref <309>: DATABASE ENTRY DATE: 2001-12-06
tttggggagcagctcgagtatctccgtatctcccccttcccttcgcgtaaaagaaaatcccccgtctcgtctcctccgctccttgcgccatctcgcggctgaacaggggaggggcgccgatctccgtctggcgcgcagagcagggggaggggatcctgacttcgattagtaagggtattggatgaagcttgtactgatctatggaggtgggtggtccacaagatgctctggacaacagaagtgatgataatgactttgataagaatgacaattctgatcctgttgtttaccagttagttcgggttgaaggtgatggaacacttattcctgctacggaggatgaggtcttacagtttgaaactttccttcatgatgagaaggttgatgatgatctgccttctattgacgatgtaacacatgtggaggaatattttactaatgattgcatagtgaagaagcctgagtttgaagaggggccttccaaattagacactgcagatgtacagacacaaaagttagatgctggcttagaggaagacaggttatgtacattgaatgattcgatagttcttccttcaaattgttcagctgttcatgaccagcagctggataaactaaatacagaacaaggggcaaatatcattgcccaacaggacaatgcttcgactgagactacaaaatcaacagtattaaatgacctttcttctgataaagaaaaggctgatgcctgctcgaaacctgtaaatgaggcatctgcaggacaatctgtttctggggttactagttcagttcctgatttttccattttaaagggagaagtctgcttggatgatcttacaatgagagaacttcaggaagcatttagagccacatttgggcgtcaaactactgtcaaggacaagctatggctcaaaagacggattgcaatggggttgatcaattcatgtgatgttccaagttcaggttgtgttgttagggattataaagttattgccatgggtgccaaacaagaaataccagtggttgaagcaataccaaagatggaacttgaggctaatttggttagggaccaagtaatgaatcctggacatgagagagatttaccatcaagtctttcctatcatagtgaggagcaacagagatcgtccaagagactcaaaagagtaccaacagataatgatgaaccacaagtaactatttttgccgaacaaggaactactaagagaattagaaagccaacaaaaagatacattgaggagctctcagatattgacactcatgaatccactgggagactttcttcacctggaaaaaggcatgtatatgatgaggtgttattgagaccacggatagcgcctttgcatgaggttgattcgttgagcacagcctatcctactagagaagatactcttggagggtgtagtgtgcatgtgccttatgtttcaaggatgagaagggggcgccctaggagtaacttcattccatttttggatcctgagccttctgtggaatgtactgaggcccctgctgcagatgtagtgaatttggaaaaggaaggtgaacggaagaaccataagaacactgggaagaaaggagtacatgtagaaacatcttgtgaaaaggatgttcagggtctgcaggacaaggatttttgcgactctgatgacaatcccaaaacaaagcggggtgggaagcggaagcatcatcgagcatggacattgtgtgaggttgtgaagctggtcgatggtgtggcccgatatggggctggcaaatggtccgagattagaagactagccttctcatcatattcgtaccgcacctcggtggatcttaaggacaaatggcggaatctgatcagggccagccagacacaactttccactgaaaacgatggtgtttgtccacggaagagcaatccttctgccataccgataccagtgtcgattctgctacgagtaaaaaaactggctgagatgcagtctcaagctggcgacgtgagagtgccgatcaagttttcagggcagagcactacggttgtacaggggaaagtttcgggtttcttgtgatccacgtgttgcatgcaaatagagggggaaaccactgagattgatgtacgcttttggacgtctgtgaataccacacttgtatagcaaagttgtgatcgcgactcgcgttctcgtgcaaaagaaagagtcgacgtatgtattgtttgctcctttttctacacacgaacacttcctatgttctccgagagatttgactaacgtaccttgagattgacatagtcaccttaaacaccttgttattgaaagaataaatgctcctttttcgtttgc

SEQ ID NO: 20065 - DNA, 2355 bp, Oryza sativa
  ref <308>: DATABASE ACCESSION NUMBER: AK070395
  ref <309>: DATABASE ENTRY DATE: 2001-12-06
gcctttccgaccgatccaccgatcggaaaccacgccctaaccccagcaaaccccaacgcccccctccgccctgccaccctccgccgccgccgccttcgccggcgaccaccccgccgccctccccggggggacccatctcctccgccgtcccctcgccgcctgcaccccggcggtgcctcggcgtcctgctctgccgcctcctcgccgtgtgcataatacatattcggaaaggcaaatatggctacaaaactccgtcaaccgtcaactgatgcagaaaaaacagaggttggagaaatagacacaagggctccttttgaatccgtcaaagctgcagtaagcttatttggggaagttcgattttcatctgacaaatcagctgcaaggaagccaaagcctcctcaggcagagagggtgttagctaaggagacagaactgcacttggcccagaaagagttaaataaatacaaggatcagctcaacaatgctgagacaaccagagtgcaagcgttatctgagctggagaaagctaagaaaactgttgaggacctgaccaataagctggatgctatcaacaagtccaaagagctggctattcaagcaacagaggatgcaaaaactcgaacaaagcagcttgaaggtggagactcgcttgaggctgttggaaaagatggccctttaaagcaggaattggatgttgcaagggaacagtatgttgttgctttggcagatcttgatgcagcaaaacaggagcttagaaagctcaagaaggattttgaagcttcattggatatgaggttggctgcagcacagcaggaagaggaatcattgcacttagctgaaacaaacaagcaaaaggctgatcagcttcgcaaggagattgctacaattcaagagtctcttacgcatgtgaaggcagccactgaacaagcacatgaagaagaggctcaaatccttgctgagaaagatgttactaggaaaacatacaaacaagctttggaagaagccgagaagaaattatcctctttgaaaaaggattttgatcctgctgtttataaaagcctcaaagaaaagctagatgagaccaatttggagatttcatctatgcagaaaaagattgaagatgctcgagctcaagatttggagtctattgctactgtcagcacagagttggatgatgctaaggaaatgttacagaaagtggcagaggaggaaagttctcttcggagtttagtagaatcacttaaacaagagttagaagctgttaaggaggagcatgatcaattgaaacagaaggatacagaaactgaatccatagttggagacctacatgtgaagcttcagaaatgcaaatctgagcttgaggcagccgtagctgctgaatcaaaagcaacgtcagcttctgatgacttgatgttggccctccaacagttgtcttccgagtcaaaaaatgccctgcaggaagctgaagtaatgcaaaagagtgctgcagatttaagggatgaagctgaagctgcacgagtagcattagcagaagctgaacaaaagttgcaatctgctttaaaagaagcagaagaggcaaaatcagctgaagcaaaggcccttgatcagatcaagcaactatcagaaagagcaagcgctgctcgggcctcaacatctgaatcaggtgcgaagataacaatatcaaaagaagagtttgaatctcttagccgaaaggtggaggagtcagagaaattgagtgagatgaaagttgctgccgctatggctcaagtggaggctgtcagagccagtgagaatgaggcgattaagaaattggaggcggctcggaaagagatggaagacatggaattggcaacagaggaagcactaaagagggcagagatggctgaagcagcaaagagagctgtagaaggtgagctcaggaggtggcgcgagaaggagcagaagaaagctgctgaagctcagcctgctccagaagcgcaagcacatggaactgcatcttcccctgtacagaaagcttctgctggaaaagccaatgagaagaatgatggacctcacaagaacagcagaacactattgaaaaagagctttatgctaccaaatattacaagcatgttccataagaagaagaatcatgccgacggcagttctccttcacatcttcctggggacaaatctgtataatctatctgaagctcacgtctgaatgatgtgattccaaacttggaatcatggctttatgtatgatattatatttgtagttgcttgtaatatataatgttatcctggtctatatctatgacttgcctgttcctgactatttgggctcctgtgataagtttttttcttttttgtacc

SEQ ID NO: 20066 - DNA, 2761 bp, Oryza sativa
  ref <308>: DATABASE ACCESSION NUMBER: AK070396
  ref <309>: DATABASE ENTRY DATE: 2001-12-06
gccgagaccccgcgtcccggccggctgccggcgcactcacggcggcgatgcccgtcgcggcgggggaggccatgcctccgcttccgcctctgccctgacggaccccctcgctcccctcctccagaatcctcttgcgtccacgagacccgccgcgatctcgaattcgccgctccacccatgacctacctggcgacgtcccaatcgttccagtttccgatgatcgattgctcccgcaaccgaaggttggggggagaggaagctgcagggttactcgaggcgtgatcgctgacgggggccgcaccgccgcgtggagcagccgctccgactccgagccatacttggtacattccccatattaggatgttgcgtggctggacatcttcaaggttcccattggagtctagaatgttgcgcattccttgtgttgtttgactctttaataggactgctgcttcatgcgtgtaatcatgccaaggagtggggatgaacagaagaaaggagtactctcatattccggcgggctgtgaagaagtggggttaaagcaccaaagattaagacggtatccaggattcgacacgtcggtgaggctaccttcaagtctggagtggctcgaagaccgaggaatatcctgtctgttgcaaagacctagcaatacttgatgatgagtgtatacatgttcttttaagagaacaaattacagcgacaaggattggaaggtccatggacgtcaaaaggtacgtaacacatgtactttcgtcctatttctttcctggacatgtttgcttgcttgatgtatatgctctaatagtaagctaggattccagtgaatatcaatgcctttcttcgttcttctaatggtacatgtttaatccatggtactatatatcagttaattttataaagaaatctacgataactaaagcaaaaatacgatcgataacattgagaattaagacactttaatgattactccaaaacctagttctctctgtctctctctagttagtctggaggttgcagattgcattgtgcatgcaaggctgcaagagactagtgtattttccccttatcatcctagctagatatattatagttctatagttctgtatacagtttgctgcattaacgagcagactgctctaccttaatttgttcggcaatattaaccattttacccggcaaaaccatcccattaaataattgtaattgtatactctcttcggtcataaatatttgatatttaaaacaaaatcttgtgaaacttttgaccattaattgttttctcaaaatgctttgtttaaatgcatcaacttattctaatataagattgatgggcaaagtcttaaaaatttgacaattttagttccatttatggccaaaacttgtgcaaccatttacttgctcaatttttaaatatataacactgttgatttttagatatgatatttaaccattcatcttattaaaaaaatatgatgcaaatattttaaaaaaatataagtcacgcttaacgtattttgtgttaaacatcaaatttatgactggagggagcaattgattcattcacctggctacagtacgcagtacgttccgtgtgacaattttcgtttcattttgttcatttgcattttatattaattcacgacagcacaaaatcagttattatatctgttattttccatacaaggtttgtttttcttgactttgcaaggttatagctagacataatacttttttaataaattctacgttttaccattgacaagtaattggttctacaaattaccatcaacgaatctaatttttacgaaataccatcacacacgcacttttctttttctttttcatcgttattaatggactattagttgattgacttagataaaccccatataaaaagttcactttaccctaaaatataaggactgcctaagctgatattgcacttctaagggtggtctctagaacaccacaaaatagatttttctcccgcctcctctatatactagtactaagtacttatatagtacatggggaaccttgagtaaagggatcggacaaatctattataacttattaaaggaatagtaaaaggagcattcacgttcactctcacagcttagaaattctcacattaatcggggaaaaagaaaaaacagagtccatataggaatacaatttaaaaacagctgaaactcggaattttaaatagggaatatagaaaaaagagactagagtccataccggtatacaattttgaactgtttgaaattcagaattaaaaaataggaaaactaaaactagaggtcagagtccctatagaaatacaattaataagaaatattgaaagaagattatatagcccatatagaatataatttagaaaagaataaaattcggaattaaaaaataaaaaaatattaaaagatgagtttagagtccatatagaaatacaattagaaacaacgaaaatttggaaattaaaaaaggaatattgaaagaagattctagagttcatataggaatttagaacaaactgaaagtcgaaattaagaaaaacaataaaagtagagtttagagtccatatagaaaaataatttagaaataattaaaattaaaaattaaaaattaaaaataagcaatattggaataagagtctagagtccatataagaatataattattttggaattaaaaaaagaatattggaaaaaaacttagagtccatataggaatataatttataaaaacataaattcg

SEQ ID NO: 20067 - DNA, 893 bp, Oryza sativa
  ref <308>: DATABASE ACCESSION NUMBER: AK070397
  ref <309>: DATABASE ENTRY DATE: 2001-12-06
ggcgtacatcgcgcgcggagggagatcgatcgttcgttcgtcctactcgtatccatcgatcggaagaatcccagtcgccggcgcccaagaaacacaccgaacgctcaggtgatcacaggcatggcgccgcctctcctccgcggcgtgcccgtgctgatcgcgctcgtcgtcatggcggcggtggccttgctcccggccgcggccgccgacgacatgggcggcgtggtggcgtcggcgtcggggcggaggaagatggcggcggcggcggcgacgtgcgacggcgccgtgggggagtgcgacgtggacgacgaggaggaggtggaggagatggcgctgatgggggcggcgggcgccgcctccggggagacgctgatgcggcggtcgctggcggcgcggcggccgacgaacaggtacgtgagctacgcggcgctggacgccaacaaggtgccgtgcaacaagcgcggccagtcctactaccagaactgcgcctcgcagaaggccgccaacccctaccgccgcggctgctctgccatcacccgatgcgctcgcaataccaactgatcatctcctcttcctccgccgtcgccgccgtcgtcgccatcgccgccggcggcggcggcggtggcggcgaatacgctgctgtcataagtgtatgtacatatcgactcaatccaaagcgtatgtgatgagcaactgctgctgctgctgctaaaaaatcttcagtgctaaaatatctatacaagtggtagcatgcattctattatttgtcatcatcgaattaattgcgttttcaaatgttggggaaattttttttttgaagagaatgtactgaggatcagttcatgcatgtttctcggttgcactattgaaaaaagagagaatttaagcgggtc

SEQ ID NO: 20068 - DNA, 3440 bp, Oryza sativa
  ref <308>: DATABASE ACCESSION NUMBER: AK070398
  ref <309>: DATABASE ENTRY DATE: 2001-12-06
gactccacaccccaacacatcacgacttgtcgaaccccgccgccgctgccagatcggaggcgagagctccgatcccaaaacccccccgcccctcggcgatggcgccgccgcgccatctcctcctcctcctcctcctcggcttcctcgccgccgcctccctcgcgttcacgctcaccgccgccgtgtacgaggaccaggtcggcctcgcggactggcatcagaagtacatcggcaaagtaaagcaggcagtctaccacagtcagaaaagtggaaggagacgtgttgtggtgttgacagaggaaaatgttattgcttctcttgatcttcgttcaggagatatattttggaggcacgtcattgagaagaatgatcctgtggatgagcttagtttatcacttggaaaatatgttgtaactctttcttcgggaggtagtatattgagggcatggaatcttcctgatggccagatgatctgggaaactaatcttcaagtttccaaatcatcaaaacctcttctgcatgttttgtcaaacaacaaagtagcaaaggataatctggtttttgtgttggctggacgatggatttatgccgtatcaagcattgatggggtaatttcttggggaaaggagttctcccttgatggcctagatctcaagcagattattcaatcacctgagaatgatattgtatatgctgtaggacttgctggttcctcgaagctaaacttgtatcagttgaatgctaaaactggagaaacagtaaagcatatacaagagtcattccctattgcattatgtggtgaaacaatacttggttctcataatgtgttggtagctttagatgagaccaggtcagatctatttcttattgagctcaagggtgagagcatcagctacaacaaggtccatatttcagatcttgttcaagacttatctggaacagtcaaacttctacctttaatgtccaatggtgtcatagctttgcaagcatcttctactgtttccctcctgaaacttaaaggaatcgatgggttggaagtaattcagagctttgaacaaccagctgctgtgagtgatgcgttgacaatcacagaaaaagacgaagcttttgccgttgtgcagcatacaggttctgaaatcgaatttgtcgtcaaatttacaagtgatgtcaccggtgaagttattagagaaaaaattaatatagatcaacataggggcaatattcaaaaggtcttcttgaataactatatccgaacagataaatcacatggttttcgagctttggttgtaatggaagatcattcactcttgttggtccaacaaggggaggttgtttggagcagagaggatggacttgcatcaattgttgatgtaacaacttctgaattgcctattgagaaggatggtgtctcagttgctaatgtggaacataatctctttgaatggctgaagggacacatgctgaaactcaagggaactctaatgcttgccaatgctgatgaacttgctgcaattcaagcaatgagactgaaaagctctgagaaaaataagatgacaagagaccataatggatttaggaaacttcttattgtattgacaaaggctggaaaagtgatagccctgcacactggagatggacgtattatctggtcaaacttgttgcagtcccttcgttcctccaagtctggtgaaatgccttctgccttaagaatatgtcaatggcaggttccccatcatcgtgtgatgcatgagaacccatccatacttatcattggtagatctggagcagatagtgctgctcctggtgtcctatctgttcttgattcatattctggagaagaacttaactctctgaagttagaccactctgttgtccaaattatcccattgacagtgaaggattcatctgaacatcggcttcaacttattgttgattctcactcccgtgctcatctctatccaagatctccagatgccatgaatgtatttcttcatgaaatgccaaatacatatctctacactgtagatattgagacaaatgttatcagggggcattcattacaaaagtcatgtgacaattcagctgatgagtactgctttagcacaaaggagttgtggtctattgtttttccttctgatacagaaagaattgctatctccgaaacacgaaagatgaatgaggttgtccatgcacaagcaaagatcatagctgatcaagatgtgatgtacaagtacttatcaaagaatttggtttttgttgctactgtgtctcctaaagcttctggtgaaatcggatctgcggcacctgaagaagcttggcttgtggcttatcttattgatgctgtaaccggacgtatattgcaccgtgtgactcatcatggagctcaaggccctgtacatgcagttgtaagtgagaattgggttgtatatcattatttcaatctccgagcccacagatttgaaatggcagtgattgagatatatgatcaatctagagcggacaataaagatgttatgaagctgatacttgggaagcataatctgtcagcaccaaccacttcttatactcgtccagaagtaatggtgaaatctcagtcatacttctttaccttttctgtcaaagcaattgcagctacacaaacagctaaggggataacttccaagcagcttcttattggcacgatcggtgaccaggttctggcacttgacaaacgttttgttgacccacgtcgttcagtaaatcccacccaacaagagaaagaagagggcattataccactaacagatgctttgcctattattccaacgtcctatttgacacactctcttcaagtggaagctctgcgaggaattgtttctattccttcaaagttggagtcaactactcttgttttcacatatggtgtagatcttttctatactcagcttgctccctcaagaacctatgactcactaactgatgagttcagctacgcgcttctactcatcacaattgctgcattggttgctgccattgttgttacttggatttggtctgagaaaaaggagttaagagataagtggaggtaagtgaggcctcaacacgatgcagatggatttcgggccctagtcagcatcccttttcttttgccatttttgtttgtagtggtagcctctgctagggtccatgtcacttttgactaggcctttctttatgtaaccatcttctgggatgacactcttttaagtcttatagaaagcctcctgtgcgattagaaatgctgcgaatggcattgaaaaactggtagagtgccaacggcaggcatggattgcttatgagttgtaaaattttaccgcagcaactaaactgtttagcagaatattagttattgttgtccatagaacatcaatctcttgtaacttatttcaacttggcatgttccatcattatacctttttctg

SEQ ID NO: 20069 - DNA, 2173 bp, Oryza sativa
  ref <308>: DATABASE ACCESSION NUMBER: AK070399
  ref <309>: DATABASE ENTRY DATE: 2001-12-06
tggcttgccgactccgtcctcctctcgtctcctctcgacctctcctctgctccgagcatccgactccgcgcggccgaaagaaaaaagaagaagaataagctggcttgaagatatggcatctcttactccaggggtactgttaaaagtactaaaaaatataaattctgatgtgaaagtatgtggagaatatcggtccattcttctccaagttattagcatagttcctgcaatcactggttcagaactttggccagaccatggtttctttataaaagtttcagactcgtcgcactcaacgtatgtttctttatcgaaggaggataatgaactcatcttatcaaacaaacttcaacttggacagttcatatatgttgaaaaggtccaatctagtatccctgtcccagttcttgttggggttcgacctgttccaggaaggaacccttgcattggaaatccaaaggatttgatgcagatgtcaactcccactgggatttcagaagcattggctcatcaacggaaggctacaaagtcagctgaactgtctgaaagtgaaaaggagaactctcagaggaaggtagtcatcaaagagcagaaggcagttgtagcttcacgttacatgcttgggatatctagcaacaatagcaaaattaccaatctaaactccagcatagatagtgacaaaagtaatggaggaagtagcatatgttctgcaaatcagaagtcagctccgacaaaattcaaacaagaatcaaaacctcaggaacggccaaatactccatctcgcagtcctgctaagatagtttctgcaaaacaagaaattaacaaggacacacgcaagactagcgcttcttcacccagtcagaatggctcagctgtagtgaagaagcaaatgtcaaaggacagcaaaaaggagtctgcatctgaaaaaaactcaccaccaaagctttataagacttcaccaccaacaccaacaccaacaccaccaccgcctgcaatgacttcaccaccaaagctcaatttggcagcaaagcctaatggtacttccggtacagttacttctacgccgactgttaaacgaagagttactgaaactgtctcctgggactctcttccaacaagtctaatcaagtcagtaaaggttgttgcaaggaggaagactattgctcttgtagtagcagctgaggctcaaagggaggctactgcagcggcctcacttcttaaaggccttggaatattcgctgagatcagaaagtccgctgaggaggatccacatgctgcaattaccaagttttttcagctaaaccggcttatcattcagcaaagtgttttttggaaagattactcatcagagcctgtcaaagaatctcggccagagaaggaaaagccatcaaggaaagcctctgcatctcagaacaaagctgttgcaggtagtacggcaaagaactctgacgatgcttacacaagtgaaaagattgactgggccagagaggatggtttcaaggagatctccagatcatggattattctaaagaaagaatcacagtcatggtttctcagtttcttggaagatgctcttgaagctggattcaagttcgagggccaaaacaagaacaccagagaacgagtaagagggcactccaagggcggagacgggcaaatcgcggttcggttgtcgcaactgaaggagacgagtaactggctcgaccagttgcatagtgaggttgataaatctcaagatgctttggttgaaaccattgagcagctgaagcagaaggtgtacacctgcttacttgggactgtcgagactgcggcatcagcacttgaagccaggtagatgctgtcacaggagctcagggctggttgtgtttattttttggcttggaaccagctgaagggagtactctgctgtaacagaactgcaacacacaatatgatcgatcctgatgccaaggagagtgaaggaatcgatcatctaagttatttattccacttgtacaagatgacgtagggagtgattgaggtgtaaatagccgctgtgtgtgtgtgtgtgtccattttaagttatgcattaatttattcattttgggcagtggtcatgttgctgttgcgtgttggcaaatctccgatactcttcatgtttgctcaatacgaagtacaaatctgaaagctttgc

SEQ ID NO: 20070 - DNA, 2249 bp, Oryza sativa
  ref <308>: DATABASE ACCESSION NUMBER: AK070400
  ref <309>: DATABASE ENTRY DATE: 2001-12-06
gggtgccaccgcgtgtcggccatcggcgaggctctagcgctcagagtcgctgggccgctcctctctctatccgcccctgtctcgactctcgagctatgatggtggactgctatggcgtacagcggtgacgggattggctgctgctcactgctccactacgcggagagccccatgaccatggccaggcgatggctgcactgctggattggggattctctgttggcgttttcacttgggggagggagttgcctccctcgtctactgctcgcaaagatggattacagtctcctaaaggatgtcacacaggaatcacaccgttggcgcgtacgagtgcgggcaacccgcttctcggagttcaccacagctaatgagcctgacaagattttgcgccttgatttagtcctgcttgatgagcagggcgacatgatggatgcgcaaatcccaggacgccgcgttgttcaattcaagcctttgctaaaggaaggcgctgtgtattacatcaaatacttcgaagtcgccgaggcacgcccccagtataggcctgttgatcgactgttgatggcaaagttcactgctcacacaaccgttacagaagatactggaccaccatccacgttcccatcttatgcctgcaaaattctttcttttgatgaactcagagctcgggcttacaagaaagatattatttcagatgctataggcataatgacagccatcgggccagtgcagactgtttcttatgcaggtgttatgaaagctgtgcttaatgaccatataaccaatggaagagaaactgtcgtcgtggcgttatggggtccccatgctacacaattccacgctgaaaacttgcagcagcaagcagacaatggacatgttgtcatgttatttgttggtttaactgttaaatttcgagaccgccagctagccctacagggtagcactgtctgtagatggtatcctaacgcaccaatccaggaaacaatctccctcataagcagccttcacggtaacccacaggtggtcaggatgatagaggctaacttcggtcaaaaggaagctataaatgtcaaagtttctgatatttgtgaccttaatccccatgaggccttgggcaatagctatgttgtcaatataatcatcagggacttggttcctgctgagccttggtggtatatagcatgcagcacctataagagaggcacagctagagaaggaaacgcatataaatgcccgagatgcagcactgatgcaatagaaacaaggtacagagtagttatcatgggtatcgatccatcggatttggcaaacgatcaagccaaagctgctgagtttaccttctttggagaaatcggtgaacaattgattggcaggcctgttcttaacctggttgcatctgttcatggagcacgagatatagtaccaccagagatcaaagcaatttttggcagacagtatgtcattagaactagtgtgtcacgtggctcattgcaaagaaatcgggtatcctaccaggtggattcccttatgctaccccacccagatccaagccatgcaatttgtctacccagccatgatacttgcatgggctcttctggacatggctcaacatcagctaatgcagttgaaccacatgccatcgttttgtcttctactcaatctatgccaccttctacgccgtttgtgcttccagatacaaaggacacaagggacagccatggtgatcagcatgaggcaacaccacctactccacaggtcatagctatagcacatctagataaaaaacgtaaatcttctatggctgatgagaatcttggccatggaggctcatctcctgatgaacatgatcgtcgcaagccttctgttgtgcacacactgttcgtagacaagctgccaccagagctgccaaaatgacttgagcctcccatgtgatatccccagagcgaagtgaccttttgcacctggcatggcaacgcgcatacttctctccctgattgaagcaaagctaaaatactttggtcaatctattttgcagtgccaacatagaaaagagaaatgttcttttgcgcaagccattagaccaatcgatattagttttacctgttacgggctcactacccctaatagctagccaaatgataaatgaattagtatcagcaatgtttggtgtctgtaatatatgcacgttctaacaaatatcactgcaagtgataagacatagtcttattaatagtactatatctattccgctt

SEQ ID NO: 20071 - DNA, 1472 bp, Oryza sativa
  ref <308>: DATABASE ACCESSION NUMBER: AK070401
  ref <309>: DATABASE ENTRY DATE: 2001-12-06
ggcggacgcggttttccagtacaaaaaccaaaagaaagagccccgcgacctagtggagaggcggtacactggtggtggtgggggtggtgtggtgggggacgcgacgcgacgagatgcctcgggagacgccgccgccgccgccgccggagggcggcgaggtgcacgaggtggtggagggggaggacgggcaggcggaggaccaggaggagaggtgggcgcggctgctgccggagctgatgtccgaggtggtgcggcgcgtggaggcgtccgggggcgagcgttggcccgcgcggaaggacgtggtctcctgcgcctgcgtgtgccggcggtggcgggacgctgccgtcgccgtcgtgcggccgcccgcggagtccggcaagatcaccttcccgtcctcgctcaagcagccagggccaagggagttcccaatgcaatgtttcattaagcggaataagaagaactctacgttctacctctaccttggtttgacaaatgcaactgtggataaagggaagttcctcatggctgctagaaggtttagacgtggtccccataccgagtacatcgtatcccttgatgctgatgacctttcacaaggaagcaatgcatacatggggaaactgagatctgatttttgggggacaaacttcaaaatatatgatagcaagccaccatatgatggcgctaaagcatcaagtagtcgatccagtcggcgttttggaagtagaaggataagtccccaagtgtcagcaggaaactatgaagttggacaggtttcctataaatacaacctgctcaaatccagaggtcctaggagaatgtattgtgcacttgagtgcccttcaactcaagagacatgggaaaactgtctaaagacgaagttcagaaaacccacagggaacacagttctaagaaacaaagctccccgctggcatgagcacttgcagtgctggtgcttgaacttccatgggcgggtgacagttgcatctgtcaagaatttccaactagttgctgctgctgatcccaatgatcctgctagctcgaaggatgaggaaacagttctgttgcagtttggtaaggtcgatgacaatatcttcacgatggattaccggcagccactctcagcgtttcaagcctttgctatcagcctcagcagctttggtaccaagctagcttgtgaatagcaacatagtttgatgtcctcatattgccatctggttgtggttgtggatgcatgccgttgtggttgttcccggcatttttcttctttcatttctttcctttttactctggatatcaaggtactattcatatcctgttcttgtgcgggaaatgtaccattttaccaaatggatttagctccgagaaggaaattgtgttgtaaaacttttgctttttaagtgaaagcagaaggcagtctgttgtacataagttcttgatgaagtgatgataccttttttacttttggctgg

SEQ ID NO: 20072 - DNA, 663 bp, Oryza sativa
  ref <308>: DATABASE ACCESSION NUMBER: AK070402
  ref <309>: DATABASE ENTRY DATE: 2001-12-06
ggttgattctgaataatttgcagctgcgaagcgaggtggaatcggaaggaggcgcattccatggctggaacgagggtgccatcgccttctcgccgacgtacaagtactaccccaactccgacacctactacggctgcgcctcccatggcaggaaaggcgagaagcggcgcgcgccggcgtggtgtgaccggatactatggcgcggcgccgggctgaagcagaagcggtacgaccggtgcgagtcgcggctgtcggaccaccggccggtgagggcgctgttcgaggtggaggtgggggcgccgaggaggaacctcaactcgctgcggagcttcttcctgtcggagaggttcgacggcgggaggagcgccgccgccgacctgctccgggaggatggcaccgccagcagcgcgagattcggcgacaccatttgatgctttcttgcagataaacagagagaggatcagtggaagaagaggatgagggatctagagaaagagaatcagagagacagagagggtgtaatgtaaattgattattctgtcctgagtaaatgttcgtatataatctgcagtatagctaggatacagactgttcctgacttcctgtaactatacatatgtactcttcatgatcagaaattcacaataccagatcaatttgtct

SEQ ID NO: 20073 - DNA, 1272 bp, Oryza sativa
  ref <308>: DATABASE ACCESSION NUMBER: AK070403
  ref <309>: DATABASE ENTRY DATE: 2001-12-06
gtcttcaactggcagatatcccaccacagctcttccaaggctccaaccccaaatccaagccataaaacctttgcaacaaccatgagagctaagcttccaagctctgaattttcaggatgttgatgccagcttctgctcagatccctcatcacacaatacgtcctgttgcaagttacttagttctgcatcgacggcgccggcacaagtctggccggcgttttagattgcagggtcctacgaggagggtggtcttttgcactcgcagtgtgctaggttccagcaatggcgcgccatctggtggccttgtcaagaaaagaaagattgtggagcacatcattctgcttagagccaagccaaatatctcggacgctgaagaaaaggacatgctagattacttgtatacttctcagtatcagatgagagggattctagctgtgtcattagggcgcatagaggatcccaacacagagaactttacgcatgctgttttgatgcgttttcagcagaaagacgacattgcaaagttccacagtagtccctactactacaaaattctcgatgagcacgtaaaacccgtttcatatggctcggtttctgtagattttgaatctgaggttgaagatgacattatccctctcttccgtcggggagaggattttaactatggagtggagttcatgctactgatatctttcttggaaagtgcatctggagattcagtggaggatgcattagcttctcttcagaggttcatcagtcaatgcagttctttcattgttcaggcaaccttaggctgctgtctgaatcatatggacagtggttacagtcatgctgcagttatccgttttccgtcatttgatgacttcaagatattcagggaggggatggaatacaaggatatgtgggcatcaacatttcaaccgattgtggagaaatctcttgagctacacttcacagttgatcccgtgggtaaccagctgatgtagattctgagcacctgacaaaatattcagtcctggattggacgtatatattgttggtaaactcctgagttgctgatgagggaaaagtattgaaatgaaatcttgaggttttacataggcgattgtgttcatcacataaacgccttccttttccttgcccggaatgcaagaacgagagataccttgaaaatgttttatcctgtcatgaatgtacctcaatcgcaagatgtacagtgtggttggaccggctggttggttaattatattggtcctgacatgttcctatcct

SEQ ID NO: 20074 - DNA, 1722 bp, Oryza sativa
  ref <308>: DATABASE ACCESSION NUMBER: AK070404
  ref <309>: DATABASE ENTRY DATE: 2001-12-06
gagtacacacaggcgccgtcccgcaacgacacacacagcccacgaggccacgactctctccctccccctccccctctccctcctctcgccgtgagcggaacacgaggcaacgccgccacctcgagaagcgcgtcgccctctagggttttagagcagcagcgatggagggcggtggggagggcaccaccaccgccgcggcggcggcggcggtggctgcggggaaggaggaggaggcggaggtggtggtggtgaggaacccgaggtgctacctcgacgtgagcatcggcggggatatggaggggcggatcgtggtggagctctacgcctccgtggcccctcgcacggcggagaacttccgcgcgctctgcaccggcgagaagggcgtcagcgccgccaccggcgtgccgcttcactacaagggttcatgtattcaccggattgtcaaaggttttatggtgcaaggtggggatattaccgctggtgatggaactgggggagagtcaatatatggattgaattttgaggatgaaaattttgtcctgaagcatgagagaaaagggatgttatcaatggctaatgctggtcccgatacaaatggatctcagtttttcatcactacaacccgaacaccacaccttgatgggaaacatgttgtttttggaagggttataaaaggaatgggggtggttcgctcaatggaacatgtttctgttggagaatctgaccgtccaattactgatattgttattgttgattgcggagaactaccagaaggtgccagtgatggagttgtgaactttttcagtgatggtgacatgtatcctgattggccaaatgatctcgaagaaaaacctgcagaaatttcttggtggatgactgctgttgactctgcaaaatcttttggaaatgaatatttcaagaaaaaagattacaagacagccctcaaaaagtacagaaaagctatgagatacttagatctttgctgggagaaagaagagatagatgaagagaagagctcagcactacggaagacaaagtcaattatactcacaaatagttctgcttgcaagctgaagttgggagatttgaaaggtgctttactagatgcagactttgcattgcgtgaaggggagggaaacccaaaagcttttttccgtcaaggacaggcacgcatcgcactcaatgatattgatgctgcagttgagagcttcaagcatgctctgcagttggagccaaacgatggaggaattaagcgggagctggctgctgcaaaaaagaagattgctgacagacgggatcaggagcggaaagcattttctaggatgttccaaccatcaggaggttcagagaagatcgatgaagagaataactgatcggcttaagttcaacgttttgtagttctcttcatgacacatactggtgctgcctggtgaaaaaatagagttcaggtgatggatgagagagtttttgcataacagaaggtgatggatgagagagttatgcagtttttgcataacagaaggtgatggatgagagagtttttgcataacagaaacaactcccatggttgaaaatagttttggtcttttggacaccaagccttatgttttgcagtatagagtttgccacaatgctatcgtaggaaatgtctggcggattgaattgtcaaactcttggaaaggccttttgaatgaccaatcctgttaacgaaacattgttggc

SEQ ID NO: 20075 - DNA, 1350 bp, Oryza sativa
  ref <308>: DATABASE ACCESSION NUMBER: AK070405
  ref <309>: DATABASE ENTRY DATE: 2001-12-06
gggcgtgtatataggtgagttagcttccttcctgcatctcttggcttcttcttcttcttcttcttttatacccttctcttgttcgcttgcggctcggagaagaggaggagaggaggggggcaaggcaagcaaatgctcggcgccgctccggcgtattttggtggaatagtaacttaatatagagttctgggacagaaaattatggagagggaaatttctgccttatatgaaccaaaaagaaacaatgaaataagaatttttgagagttcagatgagatgtcaacagatctggctgagtatatctcgcaagtttcagaaatatctgtcaaagaaaggggatactttgctattgccctttctggaggtcccctagtcagttttttggggaaactttgtgaagcgccatacaacaagaccttggattggtctaaatggtacatcttctggtctgatgagcgtgctgtagcaaagaatcatgcagagagtaattataggataacaaaagaaggattcctgtccaaggtacctattctcaatggccatgtctactctataaacgacaacgcgacggtggaggatgccgcaacagattacgaatttgtcatcaggcagctggtcaaggtccgcactattggagtctccgaaagcaacgattgccccaagttcgatctaatcctgctcagcatgggttctgatggacatgtggcttcattgttccccaaccatccatcccttgagctgaaagatgactggatcacctacatcaccgactctccccagcctccacctgagcggatcaccttcactctccctgtgataaactcggcttcgaacatcgcaatagtgactaccggtgacgataaatcggaggctgtccatttggccatttctgacaatgcagatggtccagaagccccctcatcgctgccagcaagaatggttcagccaacagacggcaagctggtgtggtttttggacaagtcagctgcgtcctctctggatgccgagaacgatgacgcctttgagcagcatcgcgagtactaactccaatcgtcgaaagaacattccttttgctgtggatgaaggtgtgtgcgtgtgtaagtaggcggtttggtatgatcgaattcaggatgttttgccttccagtttagcagaatgcttgttgcattagtttttttgtggagggttttgttcagggagagccttgagtgtgttttggtcgttttggcaaattggagatggttttagagcgaagaggattgagacgtcagaactgagaacacccaaatttgattaggggtggtatgatattatgtgctacattatatttagttcaatcaaagttagttc

SEQ ID NO: 20076 - DNA, 2915 bp, Oryza sativa
  ref <308>: DATABASE ACCESSION NUMBER: AK070406
  ref <309>: DATABASE ENTRY DATE: 2001-12-06
gagcccagcccgccaaacacgcaccgtctcgcagcctcgcaggttaaccctgctgcctactccgccgcctcctcctccccccgcctcgcctcgccgccgcggccgagacctcaaagccctaaacccacccacccaccccatctctccctctctcctccctcccatggcgcgcctcaacccctccaaacccagctcccgcggaggcaagccgaggtcctcctccgcggacgccatggcggagcacaagccgctgccggggcggccgaagcgggagggggaaggggcgagcaagaggaaggccaagtcgggcgggttcgagtcgatggggctgtgcgaggaggtgtaccgcggggtgcgccacaaggggtaccgcgtgcccacccccatccagcggaaggccatgccgctcatcctcgccggccacgacatcgccgccatggcgcgcacgggctccgggaagaccgccgccttcctcgtgcccatgatccagcgcctccgccgccacgacgcgggcgccggcatccgcgcgctcatcctctcgccgacccgcgacctcgccacgcagacgctcaagttcgcgcagcagctcgggaagttcactgatctaaagattagcctgattgttggtggagatagcatggagagtcagtttgaggaattggcagaaaatccggatatcataattgcaacacctggcagactcgtgcaccatctggcggaggttgaggacttgaatcttcggacagtggaatatgttgtgtttgatgaggcagattccctctttagcttggggttaatccagcagctgcatgacattctacataagctgagtgatacacgacaaacattgctcttcagcgccaccttgccacaagcccttgcagattttgcaaaagctggtctacgtgacccacaaattgtaagacttgatttggacaaaaagatcagtcctgatcttaaacttgcctttttcacgctgcgtcaggaggagaaattagctgctttactgtacttggtcagggagcgaatcagctctgaggaacagtcaataatatttgtttcaaccaagcatcatgtggagttcctaaatattctgttccgggaggagggcttagaaccttccctttcctatggtgctatggatcaagaagcccgcaatattcatatttcaaaattcagggcaaggaaaactatgatacttattgtgacagatgttgctgcaaggggtctggatattccattgcttgataatgtggtgaactgggacttccctgcaaagcctaaattattcgttcatagagttggcagagtagctcgacaaggtagaagtggcacagcatatacttttgtcacttcggaggacatggcatatttattggacctacatcttttcctttcaaagcctcttagacctgctccaacagaggaggaacttctgaaggatatggagggaatgaatttaaaaattgatcgtgctcttgcaaatggagaaactgtgtatgggcgttttcctcagacaatcattgatcttgtatctgatggaataaaagaagtcatcaatggatgtacagatctaattgcattggaaaagccatgcactaatgctttccatttgtatctgaagactcgtccaatgccttcaacagaatcaatcagaagggtaaaagatttgcctcgtgaaggtcttcatccaattttcagggacgtacttgggtcagatgagctttcagctcttgcattctcggaacgcttgaaatcatttcggccgaagcagacgattttagaggctgaaggtgaagctgctaggggttcaaatcaatggctagatgtgatgaagaagaaaagagaagtgcatgagggaattataaatttagtacatcaaaagaataatgttgatcatgagccaaaggaagaattggtagagaatatttcaaactgggagagaaaagatgtttgtggtaataagcggaagttacagagctttagagatgaggaatactacataagttcagtgcctcaaaaccaacatttggaagctggactgtcagtgagggccaacgaaggatttgttgaaaatagattggatgctgctgttcttgatctagttgatgatgaaacttctggtatgcaagcacagaaaactcgatatcactggaaaaagaacaagtttgtcaagttaaatagtggggatcgtgtcactgccacaggaaagattaagacagaaagtggtgcgaagttaaagccaacaaaaacggggatatacaagaaatggcaacagaagacacatagatctatcgatactggtagaaaatttggtggctttgcagaagagggtgcatccacgacaggtagccatcaaagaggaaacagaaaacacactgcagtgggacgggggcgtcgctatataccgaacgccgacgtaccgtctgagattagaaatcccgaacaaatacagaagagcaggcagcaaaaagcaatggatattgcccgcatgaagaacagatccacaaaagagagtaaattccagaaattccagaagaacaacaggaggcacgatggacccttgaaagatggcaaattccagaagaacaggagaccggatggcaatggaaagaacaggagaccggatggaaatggaaagggacgggggaaaggcaaaggaaatgcaaatggatttggtaaagggaagggaaaaatgaaagggaagggcacaaggtgatttgacgaagaaaatgttatccaaagcacaggagaggggctgctgcgctatcaacagcaggtgctgtttgccttctcgtgtattccagttttgtttgctttcctaatcgttcctctaattgtaattcaaagcatccgagatcttaccgagaatatactcgttcgcgttactaatttaaacattggatagttttgtc

SEQ ID NO: 20077 - DNA, 865 bp, Oryza sativa
  ref <308>: DATABASE ACCESSION NUMBER: AK070407
  ref <309>: DATABASE ENTRY DATE: 2001-12-06
gtaagacccaaatcagcagtggggacgccagcatatatcgcaccagaggtgctatcccgccgtgagtatgatggaaagcttgcagatgtatggtcctgtggtgtgactctttacgtcatgcttgtgggagcctacccatttgaagaccaggacgaccccaagaacattcgcaaaaccattcagagaataatgtcagtgcaatataagataccagattacgtccacatatctgcagaatgcaaacagcttattgcccgcatttttgtcaacaatccattgaggagaatcacgatgaaggaaataaagagccacccgtggttcttgaagaacctccccagggagctcacggagactgcgcaagccatgtactacaggagggacaactccgtgccttccttctcagaccagacctcagaagagatcatgaagattgttcaagaagcaagaaccatgccgaaatcatccaggacaggctactggagcgacgcgggttcagacgaggaggagaaggaagaggaagagaggccagaagagaacgaggaagaggaggaagatgagtacgataagagggtcaaagaggtccatgcgagcggggagctccgtatgagctcactgcgcatatgaaaaagtttgtgtgcagctattgtgtagataatccggcttactatggaactgcggtgtatgcaattttcgctgtaaatttgcttctgtttggcgtttcttcgtgtaacataacttacttgggggcgcttggacttcaattgtctgattatgttttgtaagtacctacatattaagcgtatgctatgtacttggtgagaaacttctagcaccacatgtcagcaattgtacagtatattattgg

SEQ ID NO: 20078 - DNA, 2397 bp, Oryza sativa
  ref <308>: DATABASE ACCESSION NUMBER: AK070408
  ref <309>: DATABASE ENTRY DATE: 2001-12-06
gaggccccagatccctccaccccatcgcacgccacaacataacataacaccgcaaacacgcaccctcccaacagacgcctcctcccctccctccctcccacctacactccgctgcgcagccagcttcgctcgcccgctacctcactcactctcgggtgagcgcggccaccgctgccggcgacgaggtagggaggaggaggagggcaagatgttcgggcgggacccgtggggcgggccgctggagatctcgaatgcggactcggcgacggacgacgaccggagccgggacctggacaggggggcgctgatgcggcagctggacgagacgcagcagagctggctcctggccgggccgggcgaccaggccggcaagaagaagaagaagtacgtcgacctcggctgcatggtcctcgaccgcaagatcttcatgtggaccgtcggcaccatcctcggcgtcggcctcttcatcggcttcgtcatgatgatcgtcaagctcgtcccccacaagcgcccccctcctcctccccccgaccagtacacccaggccctccacaaggccctcatgttcttcaacgcgcaacgatctggtccgctgccgaagcataacggcgtcagctggagggggaattcttgcatgaaggatggcctctccgacagcaccgtccggaagagcttggtcggaggcttctacgacgcaggagacgccatcaagttcaactaccccatggcctggtccatgaccatgctcagctggagtgtgatcgagtacaaggccaagtatgaggcgatcggtgagctcgaccatgtcaaggagctgatcaagtggggcacagattacctcctcaagaccttcaattcatcagccgatactatcgatcggatcgtcgcacaggtgggtgtaggtgacacctcaaaaggtggtgcccaacctaatgaccactactgctggatgaggccagaggatatcgattaccccagacctgtcactgagtgccactcttgctcagatcttgcttccgaaatggctgctgcccttgctgcagcttccatagtgttcaaggacagcaagacttactctgacaagctcgtgcgtggcgcaaaggccctgtacaagttcggtaggctgcagcgtgggagatacagccccaatggctctgatcaagcaattttctacaattccaccagttactgggatgagtttgtgtggggtggtgcgtggatgtactttgccacagggaacaatacatacctatcggttgcaacagctccggggatggcaaagcatgctggagcatactggctcgatagtccgaattatggagtttttacctgggatgacaagcttccaggagctcaggttcttctgagcaggttgcggcttttcctaagtcctggatatccttacgaagaaatactgagaacatttcacaaccaaacagacaatgttatgtgctcgtatctgccgatgtacaattcattcaactttaccaaaggaggaatgatacagctcaaccacggaaggcctcagccacttcagtatgttgtcaatgcggctttccttgcctctctatacagcgattacctggatgctgcagatacacctgggtggtattgtggacctactttctacactacagaagtcctccgcaaatttgcaaggtcacagctcgattatgtcctaggtaagaacccactgaagatgagctacgttgtgggttttggaaacaagtaccccaagcgcgctcatcacagaggtgcatcaatccctcataatggtgtcaaatatggatgcaaaggaggctttaaatggagggagactaagaagccaaatcctaatatccttattggagcactggttgctggccctgataggcatgatggcttcaaagatgtccgtacaaactacaattacacggagcctactcttgcagcaaatgctggcctggtggcagccttgatttccctaactaacattcacgtcaaaagtggaatcgataagaacaccatcttctctgcagttcctccgatgtttccaactcccccacctccaccgtcagcttggaaaccatgaagagtcagatcgctgaatatttcttgagcatcaaacggagggaacgacagatgtttgtttggtacagcaaaggacacatacagaaagcagacaacataagcttacagagcctctattttctgtatcagtatgacagatcggtataaattcatctgtcgacaatagaccgggatgttgtgtgcaccttgtgaaactaatttttggggtccttgttgttattcgttcagagctcatgtgtgaagttctttttgtagaaatggaacctttataaaccgttttataggagtgactttatcatcatactaaaggatttgtgtaacctttat

SEQ ID NO: 20079 - DNA, 2411 bp, Oryza sativa
  ref <308>: DATABASE ACCESSION NUMBER: AK070409
  ref <309>: DATABASE ENTRY DATE: 2001-12-06
gggctgtggctgcaatccgattcaggtagatcgacaacgtcggcgggatggacgatgccggtgagatctgctcgttctcgcggtcgtcgtcttcggcgagggaggacgacgaggaggaccagcggtgggcggcgctggagaagctgccgacctacgaccgagcacggacggcgctgctggccatgccgccggacggcgagctgcgggaggtgaacgtccagcggctcgccgccgtggagcggcgcgcgctgctgcagcgcgtcgccggcgtcgccgacgaccatgcacgcttcctcgccaagttcaaagaacgcgtcgatcggtaaggcgatctcatattgacatggtgaattttggtggttttatacagtggaaaaggacgtcacaatattctgctcgagcactactacacgtaatatttttttactaatagtcatctcaatgtaggcttttgaagttagatttttagcgcaagtaaaacaaaaaaaacttcattagcacataattaattaagtattaataattataaacttgaaaaatagatttattaaattttttaaaaccatttttatatagattttattttggcaaaaaacacatcatttaatagtttgaaaaacatgctaacagaaaataaggaagttgaagtttggagttggaaaagaactgggccttagttagatactccctcggtctcattttaagtgtaaccataagcttctgtgtccaactttgatcgtccgtcttatttaaattttttataattaatattttttattgttatgagatgataaaacatgaatacatgacttatgtttttaaattttttcgaataattttcaaataagacgggtgatcaaagttgggcagggaaaatcatggctgcacttaaaatgtgacggagggagtagaagttacaaaaaaaatttagatacactcatagcatgacacgtccgtgttagtaagaaaaaattaatatgtatagccttttcatttttttatgttgtttaaatagtcgtaaaatgtttttctttcaaaaaagtagaagatctaaattattactgcctcggttcgattttaagtgtagcggtgggtttctgcatctaacatctctccatccatcttatttgaatttttttgtgattagtatttttattgttattagattataaaatatgaataatactttatgtgcgacttttttttataaacttttcaaataaagcggatggtcaaacgttccacacggaaacacgactacacttaaaatattggatggagggagtatatggtatatgtcttcacaagcatgcaagcttgatttgatccaaaaagcttgaatatgtcttcacaaatattcaaatctgaatatgaatggtcggcatactagtgtttaatctgtgtcatttttttctcgagttgtagatcaaatttagaattgagttttaataggatgataaacaactattgtataagtgttattaaatatttcgagattttatatattatacctacttgattaatattccaatggttagaataaacgagaggatcccttaaatgccaataaccagttgtccagctacatatcatatcatattaaatccttagatttcgtaacccattaccagcagtgctgtgattagtataggtatatatttctattttcactatattgtaagttatctactacctccgtcccattataagtgcacttatgaattttcgtgtccaacatttaactgtccgtcttatttgaaaattttataatttttttatagaaattagtcacaaataaagtactattcatattttatcatctaataacaaataaaatactaatcataaaatttctaaaaataagacagacggtcaaacgttcaacgtaaactctgcagtctttatgggacgcaggtagtacaagtttgaaaatatcactaaatcattttatgtgaaatttatttatttttcctgaaatattacttgattctctaactttctatgttcaatttttttgataaattccatgctaattttacttcatgtttaacgtttgcaaatgatcatttttgtatgaaaagtagtaccagaccttgcctagtaaatacatatatttaaataaaatatttacaaacggagaaccaatttatcagaatttttgcaaagtgggtgtagctccatcagttaggtttcttgtgatggaacctgcccacggagatcacatttacggctaattatatttttattcataggcgatgtacctatcgatagagagacaaccgtggtaacttggttaacctcaaaatatgtcatccgagttttacgaaggtgctcatacgggtagggtgtgcgtgtgcgttgagggatgagtgtgcgcgttttgagagcacatgcgtttgcattgtatttct

SEQ ID NO: 20080 - DNA, 2131 bp, Oryza sativa
  ref <308>: DATABASE ACCESSION NUMBER: AK070410
  ref <309>: DATABASE ENTRY DATE: 2001-12-06
gaagccgtgtgcgggagctggagacctcggcgacggaggacgtcggccatgagcaaaaagatgggagccacagtaacaacaatggcaggaggcgatgggatggatgggatcttggtccctggagccatatggaaaaagtgatagcagagatcgatggggagtatcaatttgctttttcttttctttttcttcagaatcccatcgatctgctttttttttctttttctttagaattgtgctcgatttgctagtggcatcaaattgtagtgtgtcatctatgtgttttctttgactcattgatcttgtaccgattacttgtcatattttggctgttagaacttctgttacggttagttcggtctatggccgagaccaaagaccgaagtactcggtcttgagtttttttaagaccgatcggtcttgatattctaaagaccgaattttcaaaagaccgatgaaccctaaaccctaaacccctaactgtaagatctagttatacttaggacctgtttgagatggcctaagttcatggattgatggtttatttgaatcttttttagctatttaacagaattaactattacgaagttgaaaagttgctttagaaaagtatttcaatataattttatatagaatatgtttgcatagaaaatactgtttaggagtttggtaaacgtgtaaacgaaaatccagaataaaaaaaataatgtgctagtcttcgaattatgtacatgcacctgtactaattttatgggcccactaataacaaataaaatttatactattcttctccatcccaaaatatgtaacttttaaccttggcataagtattaagaagattgttaacagccttgtttgcctcctcggactaggttaaggatggggctaggctggttagggtgataatgaagtatattggtagtatgtactcagtccgttccattttaagtgcagttgtggatttttgtgtctaacgtttgaaccgtctatcttatttgaattttttttacgattagtatttttattgttattggatgataaaacatgaataataatttacgagtgacttattttttttattctttcataattttttcaaataagatggagagtcaaacgttggatacagagacttacaactgcacttaaaatgggatggagagagtatagttcagtggtaaaaatcagatattatgttgttatatttgcggcacaattcgagggagcacatacttttttaaaaaaataaagtaattctcgatacacttttgtcaaccaatatctacatattttgaactttcatgttcctttttctcacttgatgattggatccaaagtttcatacataatttttgagtaagcatatatgtgaaatggaaagaagcatgttcgatgccagttactttctaccttctttggaagttcagcttagatatgctcagactaaacaggatggcaaacatagccgggaacatggccaacatgatggctgccaatggcagtaggtcacgacggaaactaaagtagtcattgatgaaggtagcaatagattttgtctctccgaatacgataatctccttctcatgctcatccccgaactgtgtggtgaagaaaacattgagtgtccatgacaagggggatgcgtaatacaaccatatccaccatctcggtatttgctgccatatcaatcaaccatatatttatgtatttcgtaaatacatacttacattatgaagcaataattaggtgagatgaatagttgcttactggtgcaggcacgataaaaccagacatgaggttttgcacggtgtagaacatggatgctaatatggatgccacttggatgttgggggaagggcttctccaatatgataaacattgcttccagagacaggctttcaattgttccccaaacttctgtggaaaccgtgtttggaaatggagatcgctcgtgccaacaggtggtttgctcaagcacttcactagagtgtccttgtcccttcaatcaccaattacttattattactatcaacattgcacaaaaaatgttattattacatatgagagagtaacatcaactacaattgtatggtgacacatacttaaatatcatttggtcactttagttacc

SEQ ID NO: 20081 - DNA, 2466 bp, Oryza sativa
  ref <308>: DATABASE ACCESSION NUMBER: AK070411
  ref <309>: DATABASE ENTRY DATE: 2001-12-06
gtcctcacacacatcccaaaaaccaaaaaccaaaaaccaaaaaccaaaacctctcctcttccctctccttctctaccctcttcttcgtcctcctccatccgagaggcagcaagccagcaactgcacgagcaaccacccgtagtcagtgacctaggcggcggagggagatcggccggcggcgagcgacgacgatgaagtacgtgctggtgacgggcggggtggtgagcggcctcgggaagggggtgacggcgagcagcatcggcgtcgtgctcaaggactgcggcctccgcgtcacctccatcaagatcgatccttacctcaacaccgatgctggaaccatgtctccattcgagcacggtgaagtgtttgttttggacgatggtggtgaggtggacttggaccttggaaattatgagcgatttctggacatcaagttgactcgtgacaacaatataaccacgggaaagatctatcaggctgttattgacaaggaacgaagaggagactacttgggaaaaactgttcaggttgtaccacacattacggatgaaatacaggagtggattgaacgtgtggcaatgaatccagttgatggcacagatgagccagctgatgtttgtgtaatagaacttggtggcactataggggatattgaatcaatgccttttattgaagcattaggtcaattttcataccgcgtaggggctggaaacttttgcctagttcatgtcagtcttgtaccagttctaaatgtagttggtgaacagaaaaccaaacctacccaacatagtgtccgtggactaagaggacttggactgatacctgatattttagcatgtcgcagtactcagccacttgaagaaaatgtgaaagtgaaactcgcacaattttgccacgttccgatctcaaatattgtcaatcttcacgatgttaccaacatctggcacatccctttgttgcttagggaccagaaggctcatgaatctattctgaaagttttagatcttcaatgtgtgggaaaagtgcctcgagcacctaagctgactgaatggactgaaagagccagcaaattcgacaaactgaaaactcctgttaggattgccatggttggaaagtatactggcctatcagactcctacttgtcagttttgaaggctcttctgcatgcatcggttgctttggacagaaaacttgtggtggattgggttccttcctgtgatcttgaagattctgcagccacagagactcctgatgcatatgaaaaagcttgggatctactaaagggtgcacatggtgtactagttccaggaggctttggagatagaggggtccagggaaaaattcttgctgcaaaatatgcgcgagaaaacaatgttccatatcttggtatttgcctgggcatgcaaattgcagtgatcgaattcgcccgctctgtcatgaagttgcgtggtgctaatagtacagagtttgatccagctacaacgacgccatgtgttattttcatgccggagggctctaaaacccatatgggggcaacaatgcgccttggatcaaggaggaccttcttccaggccaatacatgcaaatcagctaagctgtatggcaatgcaagctatgtagatgaaaggcaccgccaccgatatgaggtgaatcctgaaatggttccagaatttgagaaggcaggtctctcttttgttggcagggatgaaagcgggacacgcatggagataattgagctaccaactcataggttttttgttggcgcacaatttcatcctgaattcaagtcaagacctggaaagccatccccacttttcatgggattaatagcagcttcatcaggacagcttgaccatttacttcagcagtcttgcggcgttgtcagctcgccagtcagacgtggcaactactgcaacggagccacgaaacaacagaagctataccaaaatggacatgtcaagaacggcctggtgaacggctgctactatgcaaacggcaacagcattcttcatacttagcagcatagctctgcatcaggccattgcacttgagagatttacctgctttgttttttctcccttttttttgcgtgttttttctcctattttttttagggttatggattcgtctctctgctaaactaagaagagattgaaagggtccttagctccagcgacatgaagagccatttccgatgttttaaggagggagaaatgagcacttgagctgtcgcatcaacgcaaaaatagctagggtttactagtagtgaactagttaatctaatgcaatattattatttcttttgtttgttcgtttgcttgcttgatgccttatattatattgaagtttaaggctagctggaggtgtgtagctagcttggtggagcctgcacatttcatctgtttgtacattggaaaagaaccactattttcttagtaactgaattgatgaatacacattatttgg

SEQ ID NO: 20082 - DNA, 1909 bp, Oryza sativa
  ref <308>: DATABASE ACCESSION NUMBER: AK070412
  ref <309>: DATABASE ENTRY DATE: 2001-12-06
gtaaagtgatttcatacttcgtatatgtcgtctaaatagttataatttttttttaaaaaaattggcaatatagattagtattaaatatatcactccacaaacatacagttaaaattcagcttctacaagttgcaacaaaaataacaaatacatatgtgaatgagctacaactattttcaatttaatttgttttttttcaactaacaaaaatcgaatttgatattgcatgtttgtggagtgatatatttcatattcatccatgttatcattttttttaaaaaaaaattgctaactatttagataatatgtaaacaacgagtgggtgaaaatccacgtccctctgatcgaacaaatcaaacgaacagattgtctcagaactcttgaactttggcatgtactgacctgtgacgacacctggtcgacgagcttctcgtaagattccgggctatcggggtaagggtcgtacacgtagctcaccggatagggcataatcttcatgacctcgtcgaacacgtcgatgcagtagccggtgatgtttcgccgcccggtcgccgtgacgttgccgacgtcgacgaactgcgtgaagccccgcttcgtcggcacgctgacacggagcggcagcccgctcggcgacacggtccagcctctcggcgtgtcgcgcggctcgccgggccagaggatttgcctcagcgtcttggcgctgccggcgttcaggtcttgcgtgatcccgaactccggcgtccagaacccgaccgtcctggcgcccttgccgatgatgttcacgacctcgtacgccggcggctggagctgcccgtcgacgagcctgaacttgccggcgagcccgtcgaacgtcgtgctcaggacggcgttgaggagcgccgtgccggtggccgacacgccgagccggtccaggtccgtcagtggcgcgctcgtctgcggtgtctggaacgccgggccggcgacaccggccgactccgccgccgcggcgatcgcccacgccgtgtcgtacgcccagaacctcaggacggtcggctcacggacatcgtcgacggtggggtgatcccggcgtagcctcgccttgaaccgcgccgagaagttcttgacggcgtcggtctcctgcacgtacggccggaggctgaccacgccctgcatcgcgtcgacctcctccggggagaacctgtccatgaacgtggcgacgccgtcggtggccacccagatgtagccgtcggacatcatgccgagcatcttcgcgcggcggaacagcctcccggcgacgttgtggagcatgtgcacgacgaacacgcgcgtcggcatcgccctgaggcggtacagcagcgcgtcgaggcggtcgtcggtggcgtcgacgggcaccgccgtgcggtccatgatcttggcgccggcgccctgcagcgcgtcggcgagcgccgggaggatgccgctcccgtacggcgagtcctcgtacacgacggccgcggcgcgccagcggaaggcgtcgaggacggcggcgacgggcgcggcctggaaggagtcgttgacggcggcgcgcacgaagaacggcgtctgcgcgggggacagcgacggcgaggtggcggagtaggacagcacggggacgcgggagtggctgccgatgtgggcgacgaactcggtcgctgccgagctcggtggcccgatcatggcctgcacctgcacattcttgatcaggtccaccgctgcaacgacagcaacaacaacgagcagccgctcagaaattggagccaagaatttcgcagttgagactatcaattatgaaagttgttgatctgacagttatttcagcttctaatctgacagttcttgagactatcaattgtgaaaagagttttgataccgtttattgcatcattaatcaacttgatgcatatcacttatt

SEQ ID NO: 20083 - DNA, 1281 bp, Oryza sativa
  misc_feature (594)..(594): "n"=any one base of a, t, c, or g
  misc_feature (627)..(627): "n"=any one base of a, t, c, or g
  ref <308>: DATABASE ACCESSION NUMBER: AK070413
  ref <309>: DATABASE ENTRY DATE: 2001-12-06
attagaaatggaaatccagatattgctaaaagaatcatcgttgaacgcccaaatctggccacagaagaaaataaggatggtaatactccaattcagctagctgtacgttggggaaagatcgacatgctacgagtattgttgaaacatgacagatctcaagggtatgttatcaacagaaaaaatggttatcctctcctcctttctgctgcacatcgaggtcatgttgctgttgcccgggagattatcaaatattgcccagatgctccatattgcaaaaaagatgggtggacatgtcttcataaagctgtcaaatcaggtaatatggaattcgttgagtttatccttggggaaccacgacttcagaaactcgtgaacatgcgtagcagcaaggggaaaacagctctacattatgccatccagaagtgtgactcgaaaattgttgctgctttacttgacaagaaaatagacttgacaattcttggcagtgacggtaatgcagccgcttgggaattacgggatgccttggatagtgcgaagacattaaactggaatgaagtgtcaatgcttatgattaaagctgatcctccaatgcanaatcgttataatctcacgaggaagccaaagaanagtgatcaatgcgtcaggaaggatgcaaggtcgctgactcaaacatacacaagcaacacttcgctagtggcgatcctcatcgcaacaattacctttgctgctgctttcaccctgcctggaggatacagcagtgatgctggaagccagggacttcctataatggcaaggaacgttgcctttaaggcattcttgatatcagataccttagcaatgtgcgcctcacttgctgttgcgttcatatgcatcatagcaagatgggaggatctcgatttcttgctttactacagatccttcaccaagaagcttatgtggttcgcgtacatggcaacaactacagcatttgcaaccggtttatacacagtattggcccctcggctgctatggttagctgttggaatttgctctgttgctgttttagtgccaattctcactaaggtgctcggggaatggcctgtcttaaagctcagaattcggttgggccaagctttcaaatcagagttccttgatatggtctgatattatcgatatatcttgtaaatgatagcatattatatcgttattgttcaaatatatgtgtcacgtgttgtttgatcaataatagcatacattgttaaatctttaacttcatgtatataatctaaataatgtactctg

SEQ ID NO: 20084 - DNA, 2882 bp, Oryza sativa
  ref <308>: DATABASE ACCESSION NUMBER: AK070414
  ref <309>: DATABASE ENTRY DATE: 2001-12-06
gtcatttcatcgaacaccttgcaatcaccctctcaccaccgctagagatcaccattgtgaggctccccggccggagctggaggttggagggagtggaggaagagccgtgctgccgccgtcgccatgggggaagccaggtagccgctggacatcaagaaacgccgtcgagcaccttacatcgccgctgtctgcccctgtcctgcaccgcgtcgagctccacttcgccgcgtttcgccatctcgccgtctcgcgaaattgtatatcggttagtcgtgaggcaacgtatgcagcttccaggaggtgaaggttgatcaagatcatatcaagaataagaactatcctgagcagagtattgaagagaagcccttgttagtacgcttgcgtacctaacaagatgatcggagtgcggttctgttctaggtctcgttccccagtcgactgcttgtggcatgtcaactgagcccttgtattattttgtcttccactgttgtttctctgatagttgttggcctgcctggccctaatgtaagtatttaactctcttagcctgaattcattcgtgatatgttgtgattcggctatgtatgtgtgtaccaactactgatccagggattggtactgataaacacagaagatttccgatttacaaaatcgggggtcgacatgccagatctggcggaggggagggccccgccatgttgccgcctcccttcccgctggatctggcggagaggagggtgccgccgcttccgggccgcttcctcccctcccgtcggctctggcataggggagcacgccgccgtgctgccgctggaccaccgcctcccctcccatcggatctggcagaggggagggccccgccatggtggatggaggaggaggagaggagtgctgccactgttgtggatggaagaggaggagagaggagaaggaagaaatggagagaaagaaggaagaagaagagaggaggaagtggattgcgggtgcgggagatagagttcgagagagagggaggggaggaagagataaggatgggagtagatagggtggctcagctcggctcggttagttcggcagataggtgtcggttttaaaaaaaccggcacttataatatattataggtctcggtttttaattaaccgacacctataatatattacagatgccggtttttttcttaaaaaccgacacccatagtataagtgtcgatttttctttagaaccaacacctatagttgtttaaaggtgtcggtttttttatgttttcatcccgttgaggtttgaaaaacattatatataggtgccagttttagcacgtccggtacctatagtgccgatatatatgtccctttttgtagtagtgatccctcggaataatagtaaccaaacaatattcttattctgcaggtgtgaacaaattaaacttagttttgtcttgatcatctgccaactattctttttaaggttaactgtcgactactcgcatttctcatatacccatcctcctcgtggaaaacagttctcctcctagactatgtttagttcctaaaaaaagttgaaagtttagggaaagttagtagtttggaaaaaaaattgaaagttcatgtgtgtaggagagatttggatgtgatgtgatggaaagctggaagttgggggtgaactaaacacggccctagtgttctctcgttccccaaaattaatataaatatatttactctttctacacatttacatcaacacaattcgcaatatgcgaagatcgtttcatattgccttccacgtgtaccgtaaaaggggagcaaatacagtcgacagtggatggaggggaatagctctggttttcccaacagccaaccaccagctgctaagctagctcccaatcgtattgaatgaacgtatggacacatgcaccgtttaaacaccacaaacccatccttgctttgttaattgctcgatctcttgcagctgcgtgcaccgcatctgtgcatgcatccacactagcaactctacctatttaagcccctgcattcccgcgtattctcctcatccatctcatcagcaacgaaccaattcacaccgatcgatcgagcaacagtagtaggaaccatggcccgtgcacagttggtgttggtcgccgttgtggcagctctgctcctcgccgccccgcacgccgccgtggccatcacctgcggccaggtcaactccgccgttgggccctgcctcacctacgcccgcggcggcgccggcccgtcggcggcctgctgcagcggcgtgaggagcctcaaggccgcagccagcagcaccgctgacaggcgcaccgcgtgcaactgcctcaagaacgcggcccgcggcatcaaggggctcaacgccggcaacgccgccagcatcccctctaagtgcggcgtcagcgtcccctacaccatcagcgcttccatcgactgctccagggtgagctgagctatcgatcggatggatcatttatatgcatacagaagcgcgacggtgggtcgatgtgtggagccgatcgaattctgtatccaatattagtagtatctgtacgtattctggaataaaaagatgagctagctaaggtcgatcaatcaccatgcatgcatgtgtgtgcatccatggttgatcggcccggccggtcaggctagctagctttcttcttcttgtgtgttcatctcgtacgttttgctccttctcgaggtgtacgtgtaccagagagagctagctagagattctacatgcatgtactgcaactccttgtactacgtgcttgttttggaatattacacatacatatagctctttttggtacatatatagctctttgtagagctccacactagtatagatactctcatctgtgacgtcctct

SEQ ID NO: 20085 - DNA, 1543 bp, Oryza sativa
  ref <308>: DATABASE ACCESSION NUMBER: AK070415
  ref <309>: DATABASE ENTRY DATE: 2001-12-06
caaagagccacagcgaacaaaagcaatatattgtaacgaattactacctagctagttaacctggtctctccagagcaagctacccgttagtcttgatcagctagctctagctagtagttagccatgaaggtagagcaggacctccacatgagccggggcgacggcgagaccagctacgccgccaactcaaggcttcaagagaaggccatcctgaagacgaggccgctgcttcacaaggccatcgaggaagctcacgcgtcgctctccggcctctcccgcgcgcctgcaggcggcaagatggtggtggccgacctcggctgctcgtcggggcccaacactctcctcgtcgtctccgaggtgctcagcgcggtggccaaccgctcatcatgcgaccacaagtcctcgctggtggcggacgtccagttcttcctcaacgacctccccggcaacgacttcaacctcgtgttccagtccctcgagctgttcaagaagctcgccgagatggagtttgggaaggctctgcctccctactacattgccggcttgccgggctctttctacaccaggctcttccccgaccgctccgtccacctcttccactcctcctactgcctcatgtggcgctccaaggtgcctgacaagctagcgagcggtgaggtgctgaacgcgggcaacatgtacatctgggagaccacgccgccgtcggtggtcaagctgtaccagaggcagttccaggaggacttctcgcagttcctggcgctacgccacgacgagctcgtctccggcggccagatggtgctgacgttcctgggcaggaagaacagggacgtgctccgcggcgaagtgagctacatgtatgggcttcttgcccaagctctccagtccctagtccaagagggacgtgtggaggaggagaagctggacagcttcaacctgccgttctactcgccatcggtggacgaagtgaaggcagtgatcaggcagagcgggctgttcgacataagccacatccagctcttcgaatccaactgggatccacaggacgacagtgacgacgacgacgtggcgacgctggacagcgttcggagcggcgtcaacgtcgccaggtgcatcagggccgtgctcgagcccctcatcgctcgtcatttcgggaggtgcatagtggacgacctgttcgacatgtacgcgcggaacgtagcacagcacctcgagcaggtgaagaccaagtaccctgtcattgtgctctccttgaaggcaagacgctgaacctatccgttcgtcggctcgtggtacacgatgttgcattttataagtagcgtgccagtgtgtgttgttggggaccgattgatcacccagctgctctgcaaattgggtctgccatagcctttgtctagctttgagtcgtttgtcgttgtaagttaaatgcgacgtgtgcgtgagtcagtaaaagtaaaatgaactagcccacgcgaatacgcgggcatgtatcttaagttgtgtttatatgggtagaaaattaatctaattatttctatcttgattg

SEQ ID NO: 20086 - DNA, 1077 bp, Oryza sativa
  ref <308>: DATABASE ACCESSION NUMBER: AK070416
  ref <309>: DATABASE ENTRY DATE: 2001-12-06
tgcacgtagtgttcgattaattcttgagctcatatattacttattcatccaaatagtattggtagcttgttgatcgaagaattaatccatggatggattgatcagtgatgatagtatgatgatgggtggtgaggtgagggcgatcgagtcgaggctgcctccgggtttcaggttccatcccagcgacgaggagctagtcggctactaccttcggaacaagcagcagcagcagcagcagcagacggcggccacctccatgctcgtcgaggttgacctccatgcctgcgagccatgggacctaccagaggtggcgaaggttggttcggatgagtggtatttcttcagctggagggagaggaagtacgcgacggggtggcgcaggaacagagcgagcaagcaagggtactggaaggccaccgggaaagacaagcccatccttcatccgacggtggccggcgccaggaagacgttggttttctactccggtcgcgcccccaacggccgcaagaccgcctgggtcatgcacgagttccgcctcctccatcatcatcatcatccaaacccaaatattcagaatatgcagcagcaggagggggatgactgggtgctgtgcagggtgttccgtaaggggaacaacagcaatggacaacctctagccacttcttcgccacctgctcatcacctggtggagtcactcatcagctcacctgcaccaactatcatgagcgatcacgatcggctcttcaccatccagctgccgcatcaccaacattgtgatgagcagtactttttcttagatgacgatgaacagcaccagcagcagctgctagatctttcagtgctccaagctccaacctcgttcgagtctgagcaagctccaggccacggtggcatggagattaatatcgcagagatggagagcttcgacacgacctgtgctgcgctgcaagacgcgagcgattactgcatgcagctctattaattaattcaatggatggatgaatcacacgtatatatacgcatagccttaaattaattaatgtgtatcatcagcttaattaattgcgcacttggctt

SEQ ID NO: 20087 - DNA, 2300 bp, Oryza sativa
  ref <308>: DATABASE ACCESSION NUMBER: AK070417
  ref <309>: DATABASE ENTRY DATE: 2001-12-06
gaccacctcactcgtgttagctcggatctgtagcaaagagcgaagagcgaagctgcagcctgcagctacgcttgttcgcttgagacctagggtacgagcaacaataatagagagtgactgagtgagcgagcactgagtagcaagggcccggcacaaacaggacgcagccggcaacgtgtacgtcgaaccaaacagagaacagctagctaatcgatcggtcgccatgaccaaggacgacgccgtcccggtggccgtggcgccggcgaagcgcccgcccatcaacaagtacgccttcggctgcgctctcctcgcctccatgaactccgtcctcctcggctatgatatctcggtgatgagcggcgcgcagatattcatgaaggaggatttgaagatcaccgacacgcagatcgagatcctcgccggcgtcatcaacatctactcgctgttcggctcgctggcggcgggcatgacgtccgactggctgggccggcggtacaccatggtgctcgccgccgccatcttcttcacgggcgcgctcctcatgggcctcgccccgaactacgcgttcctcatggccggccgcttcgtggccggcatcggcgtcggctacgcgctcatgatcgcgcccgtgtacaccgccgaggtggcgccgacgtcggcgcgcggcttcctcacctcgttcccggaggtgttcaacaacagcggcatcctcctcggctacgtctccaacttcgccttcgcgcgcctccccgtccacctgagctggcgcgccatgttcctcgtcggcgccgtgccgcccatcttcctcggcatcgccgtcctcgccatgccggagtcgccccggtggctcgtcatgcggggccgcatcgaggacgcgcgccgcgtgctcctcaagacctccgactcgcccgacgaggccgaggaccggctcctcgacatcaagaaagccgtcggcatccccgaggacgcgtccgatggcgaggacgtggtcgccatcgtccgcgcgaacaaggcctcacagggagagggggtgtggaaggagctgctgctcaacccgacgaggcccgtccgccgcatgctcgtcgccgggctcggcctgatgttcatccagcaagccaccggcgtcgactgcgtcgtgatgtacagcccgcgggtgttcgagcgcgccggcattaagtcgaagacgaactcgctgggggcgtccatggcggtgggcgtttgcaagaccttcttcatcccgatcgcgacgctcctcctcgaccgcgtcggacggaggccgctcctcctcgccagcggcggcggcatggccatcttcctcttcaccctggccacgtccctgctcatgatggaccggcggccggagggcgaggcgaaggcgctaggcgccataagcatcgccgcgatgctgtcgttcgtggcgtcgttcgcctcggggctgggccccgtcgcgtgggtgtacacgtcggagatctacccggtgcggctgcgtgcgcaggcggcggccatcgggacggggctgaaccggctgatgagcggtgccaccaccatgtccttcctctcgctctccaacgccatcaccatcgccgggagcttctacctgtacgcgtccatcgccgccgcagggtgggtgttcatgtacttcttcctgccggagaccaagggcaagagcctggaggacaccgtgaagctcttcggcaaggacacagacgacgacgatgacgtcgacactagccgccatgagcgcaagaggtccactgagctgagcgctcagcactgaacagaacacgtccgtcccgagtccgagtgtggtcgaagcctattcgttctccgatagaaaaaagcttcgacatcgtgtgttgctttgtgaatcttcagattctggccacttaggttagattgctagacttttggatctcgtgcacatcagcttgttggccttagccaacatgtagggacattgagctgctttacgggggaaaagatcgtgtgatattccacactgcagggacgagtccacgtaaaaaggtcgcagtcaccgttgcggttacgcagcttggcacggatctgtgggtctttttcaccctgtacaacaattcaaccggccaatccttcgacgacagcattgagatccagggagccagggtctacctggctatgttttcttgttcagatattaccgtggcagtgtaattgtatacgagtctataatgtatatagctttttatgtatatgactcgatcacttttgtgtccctgtgtgactgtcgcttaatataaaggagatttccttttatttgtttt

SEQ ID NO: 20088 - DNA, 1593 bp, Oryza sativa
  ref <308>: DATABASE ACCESSION NUMBER: AK070418
  ref <309>: DATABASE ENTRY DATE: 2001-12-06
gtctgttttctcctcctcacgataacctctagggttagggttagtggcggcggcggaagcgcacaaggcggcggcgcgagctgggggcaaggcggcgcctcacgagcagggcgaggcggcggcgtggcctgaggcggcgcgctaccagggcgacgcagcggcgtggccaaggcgacgcggcggcgcgaggagggcgaggcggctgcgcgagctggggctagccggcggcgcgagctgggcaaagcggcggcacgagaaggcctcatcctctccatccctacccacaaactgcagagctcggtttccattgttcaagatggataagaggaccaagcttttagtttgtattgctgctacaaatttattgttatcaatgatggccatgattattcggtctagaaaaaagaacgagaggttcaaggagagaaggtattagatatggcccaatggttgaaagggataggataagaattgagtatctagaaacgaaaatttggaggaatgatacaacttgtattgatatgcttagacttagaagaggaagtttttttcgtttttgtaagctgtttagggattgtggtttacttgaagataccatccacatgtgtattgaggaacaagttgctatgtttctgcatacggtggggcataaccttagaaataggttagtccgcactaattatgataggtctggagaaacagtaagtcgttatttcaacaaagtccttcatgcaattggtgagctacgagatgaacttatcagacccccctcattggacactccaactaaaatagcaggaaatcctagatgggatccttactttaaggattgtattggagctattgatggcacacatattagagcctctattcgtaagaatgtggagtcttcttttcgtggtaggaagtcccatgccacacaaaatgtaatggcggccgtagattttgatcttcggtttacttatgtcctggctggttgggaggggacaacacatgatgctgtagttttaagagatgctttggaacgtgaaaatggccttcatgtcccacaaggaaaattctatctagttgatgctggatatggagccaaacaaggattcttgcctccttttcgtgctgtccggtaccacttgaaagagtgggggaataatccggtgcaaaatgagaaggagttgttcaaccttagacactaatccctccgtatacggttgaacgtgcatttgggtcactaaagaggaggttcaaagttctagatgatgccactccattcttcccatttcgaactcaagtagatattgttgtaacttgttgtattattcataactgggtcataaatgacggaattgatgagcttatagctccatctgattggacaagtgaggacattgatgaatcgtcaaccggccaagcgaatgaccatgcattgatggtttagtttaggcagggtttagctgatcagatgtgggctgaccgtaataaccatcatggagtgtaatatgtagccatgcaacttgtatttctaccttatttgctacatttcatttgtattatgaacttcttttatttatttaattcgtgtggacagcttgttgt

SEQ ID NO: 20089 - DNA, 1187 bp, Oryza sativa
  ref <308>: DATABASE ACCESSION NUMBER: AK070419
  ref <309>: DATABASE ENTRY DATE: 2001-12-06
gtcccaacgtccccaagaactcatctggccaaaaacccaccaaaatcctctcgatccatcgccaatggcggcttcctccgcagcttttgcagcgtgcctgctcgcgtgcgcgcttctcttccagatgtgcgtcgcgtcgaggaagctcaccgcgctggtgcaggacctgcccatcacaatgacgtaccacaagggcgcgctcctctccggccgcatcgccgtcaacctcatctggtacggcaacttctccgcgccgcagcgctgcggtgatcaccgacttcgtctcgtcgctgtccaccccgccgtcgccgcagccgcagccggagccgtccgtcgccagctggttcaagacggcgcagaagtactacgccaactcgaaggcgcgcttcccggcgctgtccctcggccagcacgtgctcgaccagtcgtactccctcggcaagcggctcggggagaaggacctcgtcaggctcgccgcccgaggctcgccgagccgcgccatcaacgtggtgctcacggccgacgacgtcgctgtcgacggcttctgcatgagccggtgcggcacccacggcgcgtcgccgcggtcccgcgccgggcggttcgcctacgtgtgggtgggcaacccggcgacccagtgccccggccagtgcgcgtggccgtaccaccagccggtgtacggcccgcaggcggcgcccctcacgccgcccaacggcgacgtcggcgtcgacggcatggtgatatccctcgcctcgatgatcgtcggcaccgtcaccaacccgttcggcaacggcttcttccagggcgacgccgacgcgccgctggaggccgccaccgcgtgcgccggagtgtacggcaagggggcgtacccgggttacgctgggtcgctgctggtggacccggccagcggggccagctacaacgcgaatggggcgcacgggaggaaatacctggtcccggcgctcgtagaccccgacacgtcggcctgctccaccgtcgggtagatttgttggaatggagtagaggactgttgttttgttaccacggtggagagtgttccacgcggctaaaatttgtacctgggggtagtggtgaaattctttcatttgttcaatgaaaaaaaatattagttaaagatagtactgttcgaaactgaatcaacatcctcacctcgagatcgatcatcgtcc

SEQ ID NO: 20090 - DNA, 1690 bp, Oryza sativa
  ref <308>: DATABASE ACCESSION NUMBER: AK070420
  ref <309>: DATABASE ENTRY DATE: 2001-12-06
gccccctccctcagacgacccccgaccaaaaccctagcccccaaacccgcccatcggtcgcctccgccgccggagacgatggcgaagccgcgccgcggccgctccgcctcgcgctcctcctcgggatcctcctctcgctcgccgtcccgctccgcctcctcgggctccggctcctcccggtcgcgctcccgctcccgctccttctcgtcgtcgtcgtccccttcacggagccgctccccacccgctgccaaggccagctcacctggggcacggagaggtcgatctccttcatcccctgctaagagaggatcgccatcaaagaaagggcgttcaccatcaccaccaccacctaaaaaggcttcacctcctaggaaagcatctcctgctcctgaatcagttgttctccacattgatcatttgtccaggaatgttaatgaagctcatttgaaagagatattcggaaactttggtgaagtggttaacgtggagctatccatggatcgaatggtcaaccttcctcgtgggtatggatatattgagttcaagaagagaactgatgctgagaaagctcttctttacatggacggcggtcaaattgatgggaatgttgtgaagttgagattcacacttgcaccacggcaaagggcttcttcaccaatgaaggcgcctccccctcccccaaaaagagatgttcctcataatgagaaaggcgctcctagtgctgaaaaggatgtgcagcagcgcagggaaccatccccacgaaggaagccagcttcacctccacgcaaaagaactcctccaaaccgaaggattgaatctcccaggcggcaacctgatccatctcctaggcgtcgtcctgattctccacctattcgtcgtcgagcagatgcttcgcctgtcaggcgtggtgacacacctcctcgtcggagaccaggatctccagtgagaaggcgttctccctctccaccacctagaaggcgtagatcaccaatgcgtccttcacctaggaggcttcgtggaagcccatcaccacgcagacgctcccctgggcccattagacggcggtcaccaccaccacccccaaggcggccaagaagccctcctggaagaaggctaccacctccacgtcgtcatagccgttctcccccgcctcgtcgtccccctcattcacgttccagatcaatttctcctcgaaccaggcgaggacctccattgaggcgtggaaggtctgattcatcgtattctcgatcacccagtcctccaagaaagggaccaagaagggtatcaaggagccgcacccccccaaggcatcgtagaggaagaagcatctctagcgacagccggagcagcagctcaccttccccgaggcgcaggtagaactcctgacattgcgttcctggcaggtaaaacttcttttgtttcttgactatcactatcgtttgcctgtgcttgtgtctttctgagagctcaagcggttggtttgaggggatacagagaactctgcttaaaagctttccagttaatctagattaccagtggagtctagtctgtgatctgtagttgtctactcagactcttgttggcattggttatgtagctcttcagtattatctgttctaacttcgtgactcttgcattccgaacctgaatattctgtggtgacacttgttcttaatactgttatcgttcg

SEQ ID NO: 20091 - DNA, 1473 bp, Oryza sativa
  ref <308>: DATABASE ACCESSION NUMBER: AK070421
  ref <309>: DATABASE ENTRY DATE: 2001-12-06
gattaatccgtccacaatcaaaccacttccatctctcaattctcaagcacacacacaatccaacaagcttctcgaagaattctcgatcgaggtggagtggtggtgtatgcgcgatggggctggatgtgggggaaatcggcgtcggcgcggcggacctgagcctggatctcaagatgttcgccgccaagagcttcggccgcgtcaggggcaaggacaccaccaccaccgccatgggtgactgcatccggaggctcgaggaggagatgggcaagatcgaggtcttccgccgcgagctccccctctgcgtccgcctcctcgccgacgtgattgatgtgatgaaggaggaggtggagaagaagggtggtgatcgtaaggaggatgaggaggacgccgccggcgacaagagcaactggatgagcaccgcgcagctctggactgggaattccggcggcccagacgccgccgccgctgatccagagaagcaggacaaggtgaggatctcgtcggaggcgaagtccaacggcggcgcgtttgtgggctctggcgcgccggctttcgcgcggccgaagcagagcttgatgaggaaggaggacatggcgtacgacgtcaggatgccggatctgtcgctgctctcgccgcctgcttccgccgccgccgccgacgaaagccgccgtcaggtcgtgggcttctcccaggccgcggcgagggctgccgccatggcggcgtctggccccgctctcagcctccagccccagcctcagccggcggcggcgcagcagcagcagcaggcgaggaagacgaggcggtgctggtcgccggacctccaccgcaagttcgtcgccgccttgcagcaactcggtggccctcaagttgccactccaaagcaaatcagggagctgatgaaggtggatggactgacaaatgacgaggtcaaaagccatcttcagaagtaccgcctgcacaaccggccgagagtgccaagctcaacaattgtgaaccaaccgattgtgctcatgcaagggctctgttacattcctcaagagcaaagcagctcccagtctggatcccctgagggtcctctccatttctcaggctcaggcatggccggtggcggctcatcggcggcgacggtcagctgcgaggaggaggatggcaggtctgagagctatggctggaaatgatccaagatgatgttgcatcagaaattttcatcacagctttggtgggttaggttaattgcggcgcggcgatgaaaaataataccagatcttcagggaggagtttgagaggagagactagtgtaggtgtttgtatacagtgagatcgagccttgagtgcttgagatgaaactgatggtgagttggttgttgtcatgtatatcgaaagagatgatactagctacagttttgcggcgagttttgccggttaaaggattcgggcagagctacagttttcgccctgagaattttaccc

SEQ ID NO: 20092 - DNA, 1513 bp, Oryza sativa
  ref <308>: DATABASE ACCESSION NUMBER: AK070422
  ref <309>: DATABASE ENTRY DATE: 2001-12-06
gccaatccacgcatcgtgcctctctcgccacggatcttttaggcgcaggaccaacggacaacaacgatggctcgtggcctcgccgttgcgtcgctgctgctggtcgccctcgccgtggtagcacggccgccgctcgccctggcagtgaaggattacccggccgacgcgtcggcggtggctaagaaatctccagccagtaaggctgacacgcccaccacgggtaaagaatccgtcgctggcaagaccgacgtggtcacggtggctaagaaatctccagctggtaaggcagacacgtctgccacatataaggaatacgccgctgcaaaggccgacgcggtcacggtgactaagaaatccccagccgccaaggctgacacgcctaccacgagtaaggaatctgccgctggcaaggccaacgcggccacggtggctaagaaatctccagctggtaaggcagacacgtctgccactgccacaggtaaggaatacgccgctgccaaggccgacgcgatcacggtgactaagaaatcaccagctgccaaggctgacatgcctgccacgggtaaggaatccattgccaaggtcgacgcggccacggtggctaaggaatccaccgccggcaagaccggcaagaaggctgcggcaaaggaattcacgatgtccggcaagaccaacactgaggccgacgcggccacggtggctaagaaatccctagccggtaaggctggcacacctgccacgggtaaggaatacgccgttaccaaggctgacgcagccacggtggctaagaaatctccagccgataagacgggtaaggaatctgtcgttgccaaggccgacacggctacggtgacaaagaaatccacagctggcaagaccggcaagaaggttgcggcaaaggaatcccccgcatcccacaagaccagcatggaggccgcaacaaagaaatccactgctaacaagaccggcacggagaccgcagcaaaggaatccacggtatccggcaagaccgacacagaaaccgcggcaaaagaatctacagcgcccggcaagaccgacacgacggccgcggtcaaggaatctacagccggcaaaggcgatgcacccgccatggctgagaaatccgcggcaggtaaggccgaggcatccgccgcggcaaaggaatccccaacaaacaaggccgacgcagcggcggccggccctaccagtggaggctaccaatacgtcaatttcgtcataaagaatccagtcaaagccaaggaaaaatcgagtgaccgtgccgatggccttcctatcgatccgacgcccgacggccagatgatgcactaacaaccctaaatccccaatgtacgattgatttgatgtgtactgcgtttgtatttgattttgtacatttgccatatttgagttttgtggcgcccaacttggggcaaatcaagtgctcgtttcatacagttttcgaagcaaaccaacagaaggggttgtaaaggaatataaagagggttgtgcttgg

SEQ ID NO: 20093 - DNA, 3685 bp, Oryza sativa
  ref <308>: DATABASE ACCESSION NUMBER: AK070423
  ref <309>: DATABASE ENTRY DATE: 2001-12-06
ggctctctctctctgtgtgcgctgctctgctctgctctgctctgcctgtgattcgattcgtttcgtggtgattagatcgctagcgcgtccgttcgtgtactgtaacatcgatagctctcactgatggtgcgatggggtgtgtgcgtgcgtgcgtgcgtgcgtgcgtctgaggttggagggttactcatcgatctggtagcgagcgtgtgtgcgtgcgtctgaggttgaagggttgctcaccgatctggtagcgtgcgtgcgttcgttcgttcgtttgttttttgggacccttttggtttctgggcgatggttagttttcttctcgtctcggggttttggtgattttgctgctgctatgctactatagtccatggtgatctctgttcgcgcttcttccgtgcggacgagcaccgcgagtccatggtgatctctgttcgcgcttcttccgtgcttgcttggaacgttctcgacgagtacgtcttgctcgctccttggttctatcgctttgcacgtcgttttcgtgtaatagtacgttccgtgtcagttcagttctagtactacttgtagctagtcagcgcggtgcattgcatctctctctctgctctgctctgttctttcgtgtctgctcgccaatggctgcctcgttgtctttctgatcggtggttttcttggtgaaggaggaggctaccgagcacacccgactccatgggtcatctcggttttgccggacttgttgtcgatcgttcgatcgattggtgattttgttcatccggcatatattctctctgtttttgttttctgattctgatgatatgcgcagttgcgcacacgagcgtgcgtctcctattttctgctcttccgtgatcatggcattactaattgatgcatgtaatgcaattgcagggcatggcaagcacaatgaagaagaaggtggagtccaagcataacaataaggacatgaagatggcgttgaagcatgatataccacttgaggttctgcaagaaggaatcccaactgttcttcgtggcgcgcctgacaacgaggttcaggctgggagagtcataagagtttctagcgccaccggcttgaaagaggctcttcagcaggcggggccgggagcgcttctcaaggtctatgtcgtcagctacatacctccgtccgccgcggctcagatccgtgagatgaccaccactacaagaggaggcaaggaggctcaagagaagaagccgtccgccagcgccaccattgccaaggcccagccccagccgcacgaccaagagacggccaccgccccgccccagccgaccaagtcgttgtccgcgcccttcaaattcaaggtcaagctcagatcgcactccaaggccccgccccagccgatcaagagaagaaacctaccactgtcaagttcaaggttgatagtccgaatccgaatgcctccatcggcgaggaggaggagaagggcaacatcgccggtttcatcattgccaatattcacgttcttgaagctaaagagatggctatggtggccatggaaggcgacatgtccgtccttgaagagctccagaagagaatctcatcctctccagatctcagcccgcatgatgtgcaagtgcaactaccaacaaccgctaacaatcttggaaccgataaagggaaaaacattctgttctctctgaagaaacgatatctgttagctcatctgcaagcaggtaagatctccatctgttcgtatccgcatgtacaatgtagaatcgattattgcttgcttgctcgatctgttcgtattggtctatttgcttttcttttataaatcttgtgaattcccattaattaagattgcttattgttgcatacacgtgttcctattgtattacgttcgattgaattatcagcatttgcaaatgttgtgcatcgatcatatatgtgcactgcacacggtcctcttcttaattacatcatcagtttcttagatcttcatccaccctagcctagtggctgataaagctatctgatcctgccaactgagattatgatgattgttttaatttgtgaatacctaccaagccgtccgtcccatgatctattgtcccctgatccattaattaatttgtatgttttaagttttagatagaagacgcccatctgagagataattaactagttagttagttaatgctttgatataactaaccatgccgcccactgttttctttttccttcttcttgagcgcaccttactatcttagaacaaaaaactcaaccagattgtgattgaaaatttgagcccccaactgctcaatttatactagtaccatactatcttagaaaaaaaaaactcaagcaggttgtgattgaaaatttgaaccccaaactgctcaatttatactagtactgaatatgattgagcagaacgtagttaatactcatcgaagttacaagttactagtgttagtactctactccatattgttgtctcatcattttgttgtctgatcaatttcgtacgggaattctctgttgggcagggctaggctggagtacaaaagtaaattatactactcccattatttctacctgcaaactctctgttgatcattttggagtattatttatgcttgcatgcaggccacagcaggatggccacaaacatccttaaatacgtggatcttgcccagtacaattctttcatagaagaagccgaccctgaaaaggcgtcaaaagctatggctgtcaaagctcaatatgaattagaatatcctggaaagcacagcccaggatggatggctaagcaagtgttgggtgttgcagcccatatgtattgggagaaaaagaaggccaagataatgggcgaggatggcttatgggctggtgacaaaacgactgttctgaccaggctgaagaagcaagagcaaaaagatgggaagactcgccaacaagaggtcgctcataggcgccgccctagcaggtaagccattgccattgccactactactgtatctcgatctatttactactcactccgctattatatatggtaattgagttgctcagtcaattaactaattgtgtttttaatttaggttaatcgatctgacaatttaattcttactacttactccttcacacaattttctttttttttagacttccgtgcagtctgaagagcctgcccgaagggcgagaggggccaacccagttaagtctgtccagaagcaaagaggagtgggctagaggccaaccagtctagctagaagaatagaagagtgggcgagaggggccaaccggtcaaccagaagcaaagaggagtcgtgttgacgtcccgcgccattacatcagtagagtaggagtaggagtatgtactgtttgcagtagtactgttgcctcttacttgtgtcagcttttttctttctttcgactgatgttttgcttcaagttactaagtttgtcagatttctgcttctgcttaccgtccgtaatttctttcttatgtttgctttgcgttgtgccatgtgcaatttggtactactatttcacacagttttctactactaggctgtgtttagattggcccaaagtttagaatttggttgaaattggagacgatgtgactgaaaagttacgcgtgtatgaaaggtttgatgtgatggaaagttaaaacttggaagtttggaaaaaaaaccttgg

SEQ ID NO: 20094 - DNA, 1515 bp, Oryza sativa
  ref <308>: DATABASE ACCESSION NUMBER: AK070424
  ref <309>: DATABASE ENTRY DATE: 2001-12-06
gatcaccccaatcgctgctgcgccgtcgccacaggtttagccatcgccgtccagcgccactcctgctcgactccttggtgacgtttctgtttctgttaacgttccccgctgctgctactgatgctggtctgttgctgtgcttctggaacgaacagagaacaggagtttcaggaagcggggaaagcaggaggagaaaagaaggaaaaagggaagagaggcaaaagttggggattttctgggttttcacaaattgatctcaaattcgatttctcctctgtaagggtaagaggtaactcctcttagtccatagaaatacaattttcacgtggaaatcgattaattgccggttgagtgttttcttagttgttgattatgggctaacaatagtattttcaaatctggtattaaaccatcgtgattcaggttagttgtcctaaataaagtttgtagtcatcgtcgatatctttctaacgccgctggtttcactcaattccgacaaacagtttgggataaacaacaaaaacagtactgccgaccgggtccggaaatcaggacagcaattcgttttccttaatctgggattttcagaggcataatctgattttgtgctcaacatgaaagtggtagacaattttttctagatgtccgaagttgtattatttgctaggttccattagacggtttgtgagttacgcataaaacagtaatggaagagctataggctatttaatacaaatgggcaaaaatttatatgaactgggtttcgattttagcaaatatccttgtaactattattagttagatatagtagtttatgcgtagttttgctccacaggtgtggagggttccaatgttggaggagttgagtcggattattgaaggagttaaggcaagtataagatggacttgtgtgatggataaactgtgttactttgtttggtttcatttatccaattattattcaaagttttctattatcaattatgtggttttggtattatgctacgtattcatatttcacttcatgttcaagttcacaacgttattcatgtttcattcttctggcggaagtttttgtttacattattcaagtaccatgcgtagtcatgggaatgcaatttggatcttcattcatgatccttgagaagagctgatcacacttgctcggcttatcggtaatgctaagaggatattcacacctgcccgggagggaactactactttttgcctccttcgttttaaattaaaggaagacaaatgtttcatattggttttcttattgcattaaacctgtgtatgttttactagttcaatattatacttgcggagtatttttactcactcttgtgtttaatttggtttttaggtacctaatgatattgatcggcacgggacgggagtagcacccttgaactacacattattattgcacactattaaaatttagttttagattatgtttctacttagataagttttgcgtagaacttaagaaggtcatttaaagttctggcc

SEQ ID NO: 20095 - DNA, 1214 bp, Oryza sativa
  ref <308>: DATABASE ACCESSION NUMBER: AK070425
  ref <309>: DATABASE ENTRY DATE: 2001-12-06
gagaaaacccaccaactggagctctcctttcctactccaagaaacgaagttgagagcaagaagacatggggaggggcaggattgagatcaagaggatcgagaacacgacaagccgccaggtgaccttctgcaagcgccgcaacggacttctcaagaaggcgtatgagctctccgtcctctgcgatgccgaggtggctctcatcgtcttctccagccgtggccgcctctacgagtactccaacaacaacaatgtgaaggctacaattgacaggtacaagaaggcgcatgcttgtggctcaacttctggtgcacctctcatagaggtcaatgctcagcaatactaccagcaggagtctgccaaactgcgccaccagattcagatgctgcaaaacaccaacaagcacctggttggcgataatgtgagcaacctgtcactgaaggagctgaagcaacttgaaagccgcctggagaaaggcatttcaaagatcagagccaggaagaatgaactgctggcttcagagatcaattacatggccaaaagggagattgagcttcagaacgacaacatggacctcagaaccaagattgctgaggaggagcagcagctgcagcaggtgacggtggcccggtcggccgccatggagctgcaggctgcggcggcggcgcagcagcagcagcagaatccgttcgcggtggcggcggcgcagctggacatgaagtgcttcttcccgttgaacctgttcgaggcggcggcgcaggtgcaggccgtggcggcgcagcgccagcagatcatccccaccgagctcaacctcggctaccaccaccaccttgccattcccggcgccgccgccgccgacgcgccgcctcctcacttctgaacctcatgaacttcattctgcaccggcctgctgccatggatatgatgatcagctcatcttctatatcttatgctgttatgcagacagacactactgatgtggctatatatatagtatttgtgtgctgctgcattttgttaatcccttataaattgctacttaattatctcatggagaattggagagaccaaatgggcagagctagctagttagctgtgcccaattaagaagctaaatctatcagaagtgtgtactgatgagtgatgagtatttttcttcatttgggatcaaattaaactaagtaaaacatatatatttgacttatgttttacgtgc

SEQ ID NO: 20096 - DNA, 1533 bp, Oryza sativa
  ref <308>: DATABASE ACCESSION NUMBER: AK070426
  ref <309>: DATABASE ENTRY DATE: 2001-12-06
ggcctcgtcacctcacctcggcatcacccaggtgggagggggtccgccttgacttttcgtgttcgggtttgggtttgagtgccgcatctgcaagcttgtgcgaggggggaatctctcttccttgctgtggtggcggcgggcgggagggcggcgttgatttcgttggggtttgcgttgcgtgcggaggacggggttgtgtttgtgtgtgtgtttgtgctgatttgggcattggtgttggtggtggaggaggatggggaactgcgtggcgaggagcgggacggcggtggatgcgggtggtgatggaggggaggatgggaagaggcggaggaggaggtggaaggcgccgcgggaagatcagctcgggatggtgcccggccggatcttctccaacgacggccgcagccggacggcgacggtgtacacgcagcaagggcgcaaggggatcaaccaggacgccatgctcgtctgggatgggttcggcggcgaggacgacggcgtgctgtgcggggtgttcgacgggcacgggccgcacgggcacgtggtggcgcggagggtccgcgactcgctgccgctgaggctcatgtccgcggcgcgcgacagcggggcggacatgccggccgccgcatggaggaaggccttcgcgcgcgcctacaaggccatggacaaggacctccggtcgcacccttccctcgattgcttctgcagcggaagcactgccgtcaccgtcctcaagctcggctcggatctctacatggccaacattggggactcgcgcgccgtgctcggctccagggaggccaccggcggcggcatggtcgccgtgcagctcaccgttgatctcaagccggatgtccccagcgaagcggagaggatcaagaagtgcaggggcagggtgttcgcgctgcaggacgagccggaggtgccaagggtctggctgccgttcgacgacgcgccgggcctcgcgatggcgcgagcgttcggggacttctgcctgaaagattacggggtcatctcggtgccggaattcttccactggtctctcacagaaaaggaccagttcgtcattcttgcatcggatggggtatgggatgtcctcagcaatcaagaggctgttgatatagtgtccgcgtccccaagcagatcaaaggctgcaaaatcccttgttgaggcagccactcgtgaatggaaaaccaaatatccaacatccaaaatcgatgattgcgcggttgtttgcttatatttggatggaaaaatggaccatgagcgtgactcaactgcctcattggacaacatcagtattgaagagggttcagttgcagatcctaatgaacctcaggagcaggagcccaccttaactcggaatttcacagttaggacagttgcaggcagcacgcaagaggagaccttagcaggggtggatgcgaggattgctggtgtagcgaacgaccaaaattggtcaggtctcgatggagtgacacgggtaaactcacttgttcagcttcctaggttttctgaagagagggcaattggccg

SEQ ID NO: 20097 - DNA, 938 bp, Oryza sativa
  ref <308>: DATABASE ACCESSION NUMBER: AK070427
  ref <309>: DATABASE ENTRY DATE: 2001-12-06
gacgttttttttttcttttttttttcataggcattttcgtggcctttcgccctggacacctgcctcttcctatggcctgtggctcgccgcgatggcgccgccgccgcacgcgctcgccgccgccgcaacctccgcgctcggggtagcggtgggggtgcggctgctcctcgtcctctcccgctcgcgcgcgctcaagccgctggccgccgccacgtccgccgcggcggccgcgctcaagaccccgcgcgtgctggccgccgcctcgtccccgctcgccgcggtcctcgcggcgtccaaggccgcctccaagtcctacaaggccgcgcgcacgctcggccccgccgcgcgcctcccttccctcccctccgacaagcgcctcaaggccgccttcgccgccgcctcgctcctccgcctcgccgccgccgcgccgccccccgtcgcgtcccccaccggcgtcgcggccctcgcgatactcaagtctgggtacaagctctccaagaactcggccaaggtcatcgagggtttcctcggcctccaggtgcacaagggcatcaggaatggtgtcgacgcgctcggggtggtcgtcaaggtcgccgtcatcgcctccgaggtcgccgtatgggtcggcggccgatgctggggcggccggcgtgggcgctccgtgcgatttctctgctctacccgcccgagcggtttactccttgttcggtacagcaaatctgaagcccaagttgtgctctttgatcatggacttggaatagctgcgatggatggagatgagaagcagatggaggagcaagagggctctgatttactctgcctcgcggtacctgtgcctgaggcaacaaattattagtgagttagcacttggcacaaaactgttgtacaattgcatatatcagatattgtcatgtagagatggctttgaattttgattg

SEQ ID NO: 20098 - DNA, 1101 bp, Oryza sativa
  ref <308>: DATABASE ACCESSION NUMBER: AK070428
  ref <309>: DATABASE ENTRY DATE: 2001-12-06
gaccggccgcggtagcggcggagctggcgccgcgcacgatcgcccccagccacagccatcctcctctcgcccgaggtgagctccgatccgtctttgcctttgccccgatcgtaccccggctgcgatggagggggggagcaacgacttcccgggggacctcctgcgcgcggtcctgcagaggctgccgccgcccgacctcgcgagggcggcgtgcgtctgccggctgtggcgcggggtcgcctccgaccgcgccgtgctggaggccgccttcgcgtcgccctggggggtgcgccgcgtcgtcggcgagccggagacgagggccttctggcgcgccgcgtccctcgcccggttcgcgctctcgcacaccgtccgccgcggggacaccgtccccggcatcgcgctcaagtactccatccaggtgaccgatataaaacgtttcaacaacatgatgagcgaccatgggatctacttgagggagaggcttctgataccgatcagcaatcctgaaattcttcagggtagcacatgctacattgagatggattataacgctagaagagaggttgcagtcttttatccccagggacgccctagtggaaaagcagaatcctcgacgaacactgctgctgcagaacgacgaagcagaaggattttggagtcagtcaagcgaagcttgcataccgatgacagaaccgctgcgtactacttatctgtcacagacggtgatccaagggcagccatgatggagtactctgaggacctaaggtgggagaggcaacaaacaggccactagatgtaaggtcaatgggaagataagggcatggcatttgccgctgcgtactacttatctgtcacagacggtgatccaagggcagccatgatggagtactctgaggacctaaggtgggagcggcaacaaacaggccactagatgtaatcatgtaaggtcaatgggaagataagggcatggcataatgatgcaggttattggaagatcactactacctgtttggccgcttgaacaatatatatgtggtttaccctctgtacatgtaataatgtgaatttgtgaacatatgtaatgtatcatctttttttttc

SEQ ID NO: 20099 - DNA, 3546 bp, Oryza sativa
  ref <308>: DATABASE ACCESSION NUMBER: AK070429
  ref <309>: DATABASE ENTRY DATE: 2001-12-06
gatgcaggatggtgttttggacggattggccttgtgccgtgctgctacagtacgtgtgatctatgtccatcgtgttgggtaatgagtaggctgtgttaatgtggactgtttgtgtgttgatgtggggggacgcaagctggtgagatgcgatcgccggcgcaaaattggtcttatggcatgtgagatggtcatgggctcatggtggcaatatggcatagggcaaccagtgcttggaaatcatgtgatactggctggtggcaggagatgctgaaagcaacggcccggttatgtcacaattatctgtggatttcagctgggcgctgctgttcttgaggaaatggaagcggttgtgttgttgaaagttgaaactggaacagagcatgatgtgagctttgcctgggcttttaggagaaactgacattatggcaaagaaacattgcggggtttgatgcaggttagaatgcacttctagaagattgcaaggtacatgtaaatgtggaattttctacgacatggccagttggactgagaaatgcgctacagataagctcctagactttcattgtggtggcaagagaacttttatgcttgcaagaaagatattcaagtatacattggatgagttcagactggtgatgacagggagactgaactgaaatgctgatttttttttttgactggtcatcgggcagaagagcttccctacctgaattttatagacaatggagaacggtataatgtcagttcgttacattagagtgtaaggaggaagaaagagtttcttttcaggattcaactacaatcctatcggcacaatttaggcgttcagcccaaagggtcgcttcttcaaggcatttagaggctagcctggctgtagagggagtttggttccggaagacgacatcgtggcggtggttccatagccccaagaagcacaataggtaaaaaacctggaaatgtttggctggaatctgatttggtctacgcagattgtgtaattcttgcattgagctgatgtttggttggatccccagcgagctccaatgcaacaacaaagggacattggatgaagaagtgaggagcagtttcatttgcgccagcacagagaacacatgttgctgattgtaccacattcttcttgaagagattcaacttggttgggagccgttctttagaaagtagccaagcgaagaattgtactttcggaggagctcggttcttccaaatgaacgtctagttcgcacaaggttgtcttggccctttcagggcttgatagatttgcttcatcttcagtatactagcacctccgactgcttttctggtatctgcgtcttctcccaatgatctctcctgcctgattgcacacaatgcagggaactgctgctgggccaccgtcgatagtctatgcacgatgatcttccaactggcctatgaacatttgggcaacttgtagattgtttgtctttcacatgctgattttagtaaatgtgaatatatatgtatacctgataatcctcgaggtctcgctgacaagtgtttcggatgtccatgccaatgcagtagaaggtatggctccatgagtctttctgtgccagatgcttcacatgtatttgaaagctatagagcattatttgcacttgaagtcagatggataccattcttaatgcaataggaatgtatcaagcatgctccattcctctgccatgcacctgtcaccagaaaattagttctgccagttgattgaaaaggacaagtaggtagcgatatcacaggaataagcattagaagaggtgaaatgtggaagaacttgttctatgctaagcatggattgaattccggctgtttgttctgatatcatccaagtccattgtgcattacaaatacaccgaatttgatcaagtcaattttcccagttataggcaagcaggtccaaatatgaacttgcacagttttttttattcatagtggaaatttatcttccatctacttcatgcttattggcaaggatcattctcaaggttctcaattattggtgatcattgaacaaggttactgagagagaagagaagcacaacacaatgcttcttgaagtcaatccgcttcgataatcatgcgggggttgtttatctatttacaatcaatttagagaaggctgagcgtctccagcggcttgacggtggcctccagccggcgacgcggcggcgtccgcggcatggccggcgccggcaccgacggctgcacgaacttgcagttggggcacgccggcgaggacttgcagagcatgacgaggaggtggcagttgacgcacgggacggccaccattggtcccaacgagcctacgccgccaccgccgccggcgatcctcgcatcgtcctccgcgatggcagcggcgccgccagagctcgccttgccggctccgacgtggaaggtggacgggatcgtggagatgttgagctccaggtccagagtgttgctgccgccgtgctcctccatgggcctcacccagctcttcctcatggtcttcctgttcaggtcaaggcactgctcccagtccatggggagggggtcgttgaggtggaggtccaggctcgcgtgggacacggcctcctcccaggcgaagtgcttcctcctcttcctgctgccgtcgtcgctgctgccgtccgactccgacgacgacgagctcttgccggcgccggcaccgacgccgaagcccagcaacgtcggccccagggagagctccggctgcacctccatcgaccggccgatcctttctttaatttcggaaccatgggacctggctgcaccattgaagatgcttggatatgtcgttagatgattaattgcctccattcttagcaaacaaattcacagattcccggatgtttgctcgctcttcttcagtaactgggtctccttgaactttgacaagacttctgtccaagagcatttgagttaattttctgtgctgaagcttgacctatggtcaccaaacaggataataaagtgacgagaaggtgtgcatacactgcttccccaagggagaagagactgaactcctcagagacatatagtgtcagacttgagttcattgaatgcagtacgtgttcttttcttgccccatacatctcaacagaagatgtatacgagactacaccaccatggcaggcagaaacggttgcattcaacacactacacctactgaagtaagatcctcctatacacctccattacctgtttgctccgtttggttcatcttcctcgccgccggcatcgctgggccttttggttggtgacctgagcaccacgcctgaagaatttgcacgcctgagaggcatccaacaaactcatgggttctacctgaccaggcagcctgacgagttgcttgtttggtttgctgttgctgcctgagtagatgattactgctaactcaagtattagacgggaagaaaaaaaatctcgagaaaacggcttggcgtctcgggaaaaatttcacaaaatccatatgctacctagctttccattaataaatcaatcacctatacgagg

SEQ ID NO: 20100 - DNA, 711 bp, Oryza sativa
  ref <308>: DATABASE ACCESSION NUMBER: AK070430
  ref <309>: DATABASE ENTRY DATE: 2001-12-06
ggagctccgagcaagaagctctatcttctcctctccttgtcaacctagctagtagctaggtaagttacctcgatcgtgcaggcgatggcaacgccggcaggaggacggccgtcgcagccgcagccgcaggcgcagcagctgtcggtggatttcgaggcgctgagctacatcagcagcctcgtggaggcgttccaggcgttcgactccgacaacgacggcctcgtcacggcgccggagctgaggggcctcctggcgtcgctcggcctcgacaagccggagcacgaggtgcgcgacatgctggcgcgcgccgacgccgaccgcgacgggaagctcagcgtggaggagctcctggacgtgatgaacgccgggcagctcggcctgggcgcgctcggcgcgctgctgcagtccgccgtgccggcgctcgagtccgcggcggggcccgacggcgtcctcggcgccgatgagctcgccaggctgctcagcgtcatgggcaccgccagcgttgaggactgcatggagatcatcgcctgcatggacggcgacggcgatggcgccatcagtgtcgaggagttcaggctcatggcccagctgctctagcttactatccactccgtaggctctaccaaacatacaactttgcaagaagctacgcgttgttggagaatacttgatgatggttttagcaataagagatcgagtttatcaactctg

SEQ ID NO: 20101 - DNA, 2175 bp, Oryza sativa
  ref <308>: DATABASE ACCESSION NUMBER: AK070431
  ref <309>: DATABASE ENTRY DATE: 2001-12-06
gaccattccttcagttctttgtctatctcaagacacaaataactgcagtctctctctctctctctctctctctctctctctctctgcttcacttctctgcttgtgttgttctgttgttcatcaggaagaacatctgcaaagatcttccacagcaacagctagacaaccaccatgtcggctctcaccacgtcccagctcgccacctcggccaccggcttcggcatcgccgacaggtcggcgccgtcgtcgctgctccgccacgggttccagggcctcaagccccgcagccccgccggcggcgacgcgacgtcgctcagcgtgacgaccagcgcgcgcgcgacgcccaagcagcagcggtcggtgcagcgtggcagccggaggttcccctccgtcgtcgtgtacgccaccggcgccggcatgaacgtcgtgttcgtcggcgccgagatggccccctggagcaagaccggcggcctcggtgacgtcctcggtggcctcccccctgccatggctgcgaatggccacagggtcatggtgatctctcctcggtacgaccagtacaaggacgcttgggataccagcgttgtggctgagatcaaggttgcagacaggtacgagagggtgaggtttttccattgctacaagcgtggagtcgaccgtgtgttcatcgaccatccgtcattcctggagaaggtttggggaaagaccggtgagaagatctacggacctgacactggagttgattacaaagacaaccagatgcgtttcagccttctttgccaggcagcactcgaggctcctaggatcctaaacctcaacaacaacccatacttcaaaggaacttatggtgaggatgttgtgttcgtctgcaacgactggcacactggcccactggcgagctacctgaagaacaactaccagcccaatggcatctacaggaatgcaaaggttgctttctgcatccacaacatctcctaccagggccgtttcgctttcgaggattaccctgagctgaacctctccgagaggttcaggtcatccttcgatttcatcgacgggtatgacacgccggtggagggcaggaagatcaactggatgaaggccggaatcctggaagccgacagggtgctcaccgtgagcccgtactacgccgaggagctcatctccggcatcgccaggggatgcgagctcgacaacatcatgcggctcaccggcatcaccggcatcgtcaacggcatggacgtcagcgagtgggatcctagcaaggacaagtacatcaccgccaagtacgacgcaaccacggcaatcgaggcgaaggcgctgaacaaggaggcgttgcaggcggaggcgggtcttccggtcgacaggaaaatcccactgatcgcgttcatcggcaggctggaggaacagaagggccctgacgtcatggccgccgccatcccggagctcatgcaggaggacgtccagatcgttcttctgggtactggaaagaagaagttcgagaagctgctcaagagcatggaggagaagtatccgggcaaggtgagggccgtggtgaagttcaacgcgccgcttgctcatctcatcatggccggagccgacgtgctcgccgtccccagccgcttcgagccctgtggactcatccagctgcaggggatgagatacggaacgccctgtgcttgcgcgtccaccggtgggctcgtggacacggtcatcgaaggcaagactggtttccacatgggccgtctcagcgtcgactgcaaggtggtggagccaagcgacgtgaagaaggtggcggccaccctgaagcgcgccatcaaggtcgtcggcacgccggcgtacgaggagatggtcaggaactgcatgaaccaggacctctcctggaaggggcctgcgaagaactgggagaatgtgctcctgggcctgggcgtcgccggcagcgcgccggggatcgaaggcgacgagatcgcgccgctcgccaaggagaacgtggctgctccttgaagagcctgagatctacatatggagtgattaattaatatagcagtatatggatgagagacgaatgaaccagtggtttgtttgttgtagtgaatttgtagctatagccaattatataggctaataagtttgatgttgtactcttctgggtgtgcttaagtatcttatcggaccctg

SEQ ID NO: 20102 - DNA, 858 bp, Oryza sativa
  ref <308>: DATABASE ACCESSION NUMBER: AK070432
  ref <309>: DATABASE ENTRY DATE: 2001-12-06
gacacgaaggcgttcgttatcctctgctgcttctctgcggtttgagcgagcgagggaggaagaggaggggaggagacgaagatggccggggtggcggcgttgcagggcgcgatggcgtccctctccatctctgcgccgggggcggcgagcaccagcagcttctggggccacccgctctccaccttcgccgccgcgccggctggggttaaatttatgatcaagacatgcccaattcaaatgaggcttaagcgatgggagaggaagaagtgtaaaccaaacagtcttcctgtcctgcacaagatgcatgttaggattggcgatacagtacaagtcattgcaggccgtgagaaaggtaaagttggagaagttacgcggctttttaagcacaacagcactgtaatagtgaaggacttgaacttgaagtccaagcacaagaaaggaacagaagatgaaccgggtgaaatcgtcatgattgaaggccccatccacagctcaaatgtgatgctctactcaaaggaaaagaatgtggcgagtagggttggacacaaattccttgaggatggaacgaaggttcggtacctggtcaagactggtgaaataattgacagtgctgagaattgggtcaaggtgttcaaggaaggaagttcggagtgatcatggtagcatgggagtcctgcacattttctgaactgcactttttgtatgcccaaatgagttgatgcttttctagattcagatttcagagtcttgtaaatttctatacagttgccaacatttttttgtatccaatgacatgcttggcttgttaaccagctactagaatggttcagctacattcgctcatacaaatgattttgt

SEQ ID NO: 20103 - DNA, 3664 bp, Oryza sativa
  ref <308>: DATABASE ACCESSION NUMBER: AK070433
  ref <309>: DATABASE ENTRY DATE: 2001-12-06
gaagcagcagcggcggaaggcgagcgccaccaccaccctctccacctccgccaccaccaaaatccgcgcggcgccgccccaaaaccctaatccgcgcggcccaccgcatcccgcggcgctcagatctagggcatcccccggcgatggcggaggcaagggcgacgaggcggcgggcggaggaggcggagatggaggcggaggcggggacggagggggacgacggcgacggtggcggcagcagcgactacacgtcggaggacgagggcacggaggactaccgccggggagggtaccacgccgtccgcgtcggggactcgttcaagcagggcgcctacgtcgtgcagtccaagctcggatggggccacttctccaccgtctggctcgcctgggacaccggccactccagatatgtggcgctgaaggtgcagaagagtgcacagcactacacagaggcggccatggatgagatcaagatcttgaagcagattgccgatggtgatcctgatgactctcggtgcgtcgttaagcttcttgaccacttcaagcactcggggcctaatgggaaccatgtgtgcatggtgtttgagtttcttggtgataatttgctgaccctgataaagtacacggattaccatggaattccacttcccatggttaaggagatatgccgacatgtgctcattggccttgactatctccaccgcacactttcaatcattcacactgaccttaagcctgagaatatattgcttgaatccactattgatccctcgaaggacccccggaaatcaggtgtgccgctggtggcaccttctgcaagaactgatgatcctcctccaaaggcacatgcaccatcagtgaatggtggtctcaccaggaaccaaaagaagaagattcggaggaaagccaagcgtgcagccgctgcaacttcagaaggaagtgggactgttgcatctggggagacggatgggtcagatgataggggaaatttgagtacggcaaacgagggtagtccgaatcaggatggagacaagaaagaagaaggtgaagggagtagacggggtagcaaagggaccaggaaaaaaatggcattggaggctgacctgaagtgcaaactggtagacttcggaaatgcatgttggacatacaaacagtttacaagtgatatccaaacaaggcaatacagatgccctgaggtgatactgggatccaagtattctacatctgctgacttgtggtcctttgcatgcatatgctttgagcttgccacaggagatgtgctatttgatccgcacagtggtgacagttatgacagggatgaggtatgtctatttatttctttccaagacatttcatatctatacaaaacttaactcaaactatcacctgtcaacactttagcttaaaaaaataggagtctatcacaatagaaatttgagtgatcaagccaaatgacatctactggctacagcccaaaactccagtttggcatgtacctaggttttcttttgtgacaatacttaaaaggaacatcactctgaaatttgatatttgtcaacatctaattgtgccatgatctcataaccaaaagcaaataaaatgaaagctacaaagattgttttggagaaattatttcttaataaagcttgagcatttcgatgcatcttctgactcagatttgtgggattcggtaggaatctaaccaattattccagaaaaaaaatgataatcaaattttaaatattgtaaataagaacatttcgttttgaaggcgatcatgtttggacaatggtaaggttgatatacataaaacattgtggggtaccggcctgatacagctcatttcttgttcatgtttgcttactgtttcacaataattttgaacacatagtatattttcttttcatgcttagttatgagacctgacaaggcctccaaaccaaaccaaccaccaccaccatacacaattacacgacgcaccctctcttcctccttactcgtggaagaagtactgtagcacataagatgacaggagaaaactttgctatgccatgtgtttattcaatttgtagtgtacttggctattcgagtctgacactttccttttaaccatgaataacatgcacctatgcattagaaactcgctttgttcaagaaataaacgaagtttcggttattggcagtttggcatggtctctggcatacatactttactattataattgtgattttatcattttgaaaatctgtgaacgtactcgtctacatcacgtgttctacagaagctataacttgtagtctataagagagaaaaaaagagagaatgaaactaagtcataccaatgtgataaaagccacagttttcttctaaaaatgatcggcaacagatgaaaggtaatgttaaggactggtctaagctagttcttttcaggtatgtcatatggttatcttgattgaatgaattctgaatgtgattgataaatacatttcaagtttgtggtatatggtattggaacatatcattgactacatgaatgcatgatgccaattgcttttttttgtcaagttgcattataagctcaaaccttttattcagttgtcctagttgattgaccacttcatatttgtgggaaatcaactgctgaatttattcaaacttttcatttagcaatattactaattgaaaagttctctgagtaatctttttataattcttaaacacctgccattgtttggagatgctgtgtgaaatagatatgggcaagtagcaaaaccataatgatagatatgaaatctagttgtcttccctatagtacagaatgccatccctttccattggaagtttattctgatcaattcttgcttgaagcaggatcacctcgcgctgatgatggagctattaggaatgatgcctcgaaagattgccttgggtggtcgatattcacgtgagttcttcaatcgttatggggatttgaggcacattcggcgcttgcggttttggccgctcaacaaggttttggttgagaaatatgaattcagtgatatagatgcaaatggcatggcagagtttcttgttccaatacttgattttgttcctgaaaagcgtccttcagccgctcaactgcttcaacatccatggcttgatgtcgggccccttcgccggcagcctaaacggccatcagacctgacacagaattcgtccgatgatggtgtttcagagaaacagaggattgagaatgaagagagagatgcaatggctgtgaacttggggaacattgccattgacggtgcttcatccaagacaactgaagacccccaagcaagtactatgcaaaataaaacaaatgctacccctgctaagtgagatgctattaattttacaagctgcattgtgtaagactgttttcagattagatatgtttcatgggaaacgagtgtttctttagatatattaggaatagttcctcggggaaagaaaagtagggcagacatttgttgtatggggttggttgggcaatgttagatttgttggggctgcagaaatgtagacacccctgacctttttcctggacatattctttgtacaactagaatctgcgattttttaaaaactctttaggagtgcacaatgatgaaatgagagtgatgaacctgagttattttt

SEQ ID NO: 20104 - DNA, 1465 bp, Oryza sativa
  ref <308>: DATABASE ACCESSION NUMBER: AK070434
  ref <309>: DATABASE ENTRY DATE: 2001-12-06
ggtccccttcgtcgccgccgcaatcacacgcacaccctttacccgccggaacgcgcgcacttgccttgcccccccgccaaacgccagcgacaacagctatagcagcagccgcgagccgcgaggccttctcctcccgggacgccgcgcgaatgccctcccctcgctgccggggggaagaggagcggtggcagcaggcgagggcgccgcggcggcggcggggatggcggggcggccggggtacgtgacggtgccgatactgtccgtgctcgccgcgatcgggtacgtgtactacacggcggtgttcctggcgatcccggcgtggctggggctcgccacggcggccggggtggccaacgcggtggccttcaccgcgctggccgccgcctgcgtcgcgacctacgccgtcgccgtctcccgcgacccgggccgcgtgccgccggccttcttgcccgacgtcgaggacgccgagagccccatccacgagatcaagcgcaagggtggcgatttgagatgttgtcagaaatgttcccattataagcctccccgtgctcatcattgtcgtctgcaagagatgtgttctaagaatggaccatcactgtatatggattaacaattgtgttggacatgaaaactacaagattttcctagtctttgtgctgtatgctgtagtagcaagcttatattcactggaggtgctgtgcacagtttgcctaagaatgaacaattaggcagtgattcttctagaacatcaattatcatttgcggggtatttttgtgtccactagctttggcattgtccattcttttgggttggcatgtgtatctcatctttcataataaaactactattgagtaccatgaaggagttagggcaatgtggttggcagaaaaggctggaaatctataccaccatccctatgaccttggtgtctatgagaatcttgtttcagtgctagggcctaatgcgttgtgctggctctgcccaatatcaaggaatacaggcaatggtattcgtttccgtacatcatatgatataccactatctacaccaccaatttgacatcaggtagcattacattcatgttagatttctggtaatttgctaaaaaaacttggttgcctatccaagtgtgaaatgtgctattctcgcaatagcatttgataacccttcataaaggaatagcgtttgtcaatgtcttgaaactcttgcatcaagagtttgtacttgatgtgatcaaatgtgtaaatgacactccacgtgtaagatacaggaagaggagctggatattcctccaggctctaaggatctatatggattttggagctagaaatgttaacttggttttctttttgctttgcaattttcgacatacttgatgagaagagtcgccagcgcctctaccgatctagagtggttgtattcatacacagaagtccaaatacatgagtgcctcttgtaaagttc

SEQ ID NO: 20105 - DNA, 1244 bp, Oryza sativa
  ref <308>: DATABASE ACCESSION NUMBER: AK070435
  ref <309>: DATABASE ENTRY DATE: 2001-12-06
cctgcggctcgatccccaccaccaccaccagcagcggcagcctcggccggcgcggcgcggcgaggtggggaagcgaggaagagtgggagggctctcgccatggcgtcgaagcagatggaggagatccagcggaagctggcggtgctggcctacccgcgggccaacgcccccgcccagtccctcctcttcgccggcgtcgagcgctaccgcctcctcgagtggctcttcttccggctcctaggcgacagatcgccgttcacgcagcagaactggcagggggatagcctcgaccgcgacgaggagaacagcaggatccaacacctggccgagattgcgaatttccttggtataacgccttcggttgacacggaggcaattcagggtagaggtagctacgatgagcgtgtagagcttctctgtctcattgttgatctagttgaagctagctgctatgctgacaatccagagtggagtgttgatgagcagctggcaaaagatgtgctgctcgtagattcaattgcagagaaacaagcccaaatattttctgaagagtgcaactatttcctgcagatgttcagatacaatcaatttaccccttgcctgatataacagaactggagttgaagctctccgagtatactaaaaagatgtcaaatttgcaactgatggttcaggagttagcatctaagtatgactataatccgaatgaagactatgccgagacagagttaaaactgagggaacatttgcaatcgttcctagaaacagtaaaatccttcaatatgatctacactaaggaaattcatccttggacacatatgatggaggtccctcaattgcatggttttggtccagctgctaatcgcttgttggaggcatataacacacttttgaagttccttagtaatttgaggagcctacgggattcgtatgcagcaatggctgcaggatcgctttcagcatctaatgagccttcatctgtcaccaaaattatctccgactgtgaatctgcacttacattcttaaataacagcctttccatcctttcaacttctgtggcacgggagcagggtgagactctgaattcacagtagcctgatatcaggatacttgaataaccttgtagcaagtcgatcatttgctttttgtggcttgtagtattgccgttgtgccaattgtcgttgtgttcttgtgtctgtagttcgtaactgcatagatgaaaactttaacattagcttatatcg

SEQ ID NO: 20106 - DNA, 999 bp, Oryza sativa
  ref <308>: DATABASE ACCESSION NUMBER: AK070436
  ref <309>: DATABASE ENTRY DATE: 2001-12-06
ggcccttcctcgcgcggcctttttttaagcttatctctatcactcgctcttccgaccacgcctcatccgccatggccgcctccttcctccgccctctcctccccccgaaacccttcctctccgccactcctaaaccccacatccccgccgctacccccagtgccatcgtgcgctgcaccgcggcgcccaagccggccaccggctctatcgccaagcccagccaagaagaggccaacaacaaccaggagcaagaacccaacgccgccgccgccgccactccggacgaggccggcgccaacccgcaccgcatccccgacgacgagaccccgccgtctgcgacggcgaccacgtcgttcgccgtggcgcggcgcgtgccgtcggccatctcccccgaccgccggcgccggacggcgctgacgcagggggagccgccgaactacgagatcgggtggaagcgcaccaagaagctgccgctggagaagcccaaggggtgggccatcgcggacttcatggagaagctggaggggctgatggcgcgcgggcggtacgggtccggggagctgctgggcacagtggccggcgtggtgacggagcgcgcgcgggaggaggccgagatcctggtggcggagggcggcgtggaggagcgcgtcgcgacggagctcttccgcgtgctccggctggtggagatggacgtcgcgatggtcaaggccgccgtcaaggaggagaccgtcaaggagcgcgtcgagatggcgcgcgcgcgctgccgccaggccatcctcgtcgcgctctcgctgtgacgacggacgcaccgcgtggtgcccaactgtaattctgattccttcactgatttctcgcatagccactatacacagttgcaactggtcatcaggtttttcgtgtatgtatacctgaattttcagtagcatttgcaatcaaacactgaaaccatgtatacgagaaatggatgggatagccaactacgtgcacttattatgctgc

SEQ ID NO: 20107 - DNA, 3946 bp, Oryza sativa
  ref <308>: DATABASE ACCESSION NUMBER: AK070437
  ref <309>: DATABASE ENTRY DATE: 2001-12-06
ggagcgccagggccatgccccaaatcgatctcgcctcgagctcgaggccctcgcgcccgcggattccagccgattgaatcccccccacccctaaccccgttctctcggtgctctgctcgttataagcgggtggcctttagccctaggttttttgttcgattgggattttatatatcccgcttggttggggggggggggatcggatttttcgtttcggtgccgcgaggtgccgggggggtttcctcgattctggcgcggttttgcttagaggaattccggatttcttagcggaattctgatttccgggctgttgcgaggtgcatctaccagccatggcgccggcgccggccgtggatgcggagggggagtgtggcggggggaagagccacaacaccctcaagcccgacggtgttcgtgtagctgcagcctctaccaccctggactcctcggatagccatggtccagccgctgatgttcagggcgggggtggctccggcgagaggttggactcctccgacggcgagggacgagccacggatgttcagggcaggagcagcgccggggagagcctggtggtgaaatccgagcacgcgtgcgcggcggatgaccccgtgggtgacggtgcccttctcgcccctgccaacaagcctactggcgcggaccctttggcggtagcatcctcctcgcatgacatcgatgcggcgagtgctgatcccgcaaacgacgaggaagacggggacaccacggaatgctcgagttcatttgggaactcttgctgcgagaccgatgatgaggctgaccatggtggttcggaagtggattctccattttcggagaatgctgatggtgttcaagcattgattcggcctagaaagaaaaaggtaactgctgagtggaggagtgctgtccgcccaatgatgtggagatgtcagtggttagagttgcgcatgaaggaccttttatctcaagtgtcgaagtatgaccgagagcttgctctaatcaacaaaggaaaagaattgcagcaggcagtaaacatgacaaatggttctaggtcagaatcagcacagtcttccaaaagccgtgaaaatagttgtatggagaggcgaaagaggagaagacttgaagaaactgtgaatacctcattgtacatcaagaagcacgagatattgtcatacttctttgataaacagaataagggtgctgaaacagatggcatcttaattgatgacgatagcagtggcccaggtatgtatatggtagtgtgtccacttgtatagttgtgctggagtttacacaggaagcattgtagttagcaaaaatttgcattaaaccaatctgcaatttacctaattatgtgtgtcacatttctagtggttaattgataatagagtctttaggagcttaaggactgttaaatctatcattagctaagtgcttgcgtgtcgcaagttctcccctacacttcacaggttcctctcccgattgagctgcttgttttcatctcctctttgttgtattaatggatggtatggccttgaatgtgtaagaacttatcaaccaaatggagatgaaaaatgtaaaacattttgctgcatttttaatttctaaatacttaaaaacacaacattgaaatagaccatagcaacactgtactgatgatcaggtacaatgcactaataactaggtgttgaatgattcatctgcgcagcctatagtaatcagaatggcatgtgtgtcctcgccacgattgccagcacagttgaccaggacccagcctggtgtccaccaatgcgtgttgacgtcctttgcctagaaaccgtgcgggcaacccacgccctatcgcccaatcattcattgcctgtccgcatgctatgctttaagtctttcccaggtcccaattgagatcactcccatttcctgactatccattacccaggtaatcaacagaacaatgcaactctagcccaaattaggtggtaaacataaggtagaagtttgatgacccacccaacttctaagcctgaccagttaatctaagaccaaggcagcccagtgtggcatcttattcttcccagtcccagctgccagccatgtctaagaccaagcgtacttgctgccccttgccagttatttgaattagcttgctagtgtctatggactgggtacctggggagttccaatttaggtggggctggaacgcccacaagccccaatggtaagttcacagtcacggagaaaagcttggctataaatgacaccttgctggtatccttggtaaaatgtatgtgtcttgttaatgattaaaagtagtatacatctcattgtcagtgtgttacccacatctttccttaccgcgatgtaaacattttggtatcttcgtacttttatttttagtgttatccattataattttggattgaactaatgaagggcagcatacttgagctattcagacattggttatgttggcattgcaaaatgaaatctatcttcattacctaatgtctgaattttacatgatttctcattgccaacgctaactctttatacgatcgattcctacagttggcaatgatgttaaaggtgggatccatactgttgggttgcttgagcccaaggaatatgatatggttgcggagcaactcacactgcagaaatttcttttgacaattgatggtattcggtcccaagttcttcggctacaagatcgtctcagtaaggttcgttcaaaacaagaaaacatggtttccttggtggaccatgcccatatcaaggtgtctgagaagaggctaaggactcaaaaacggtcattctcatataagaaagatagatatagtaaatcaaagaaaaagaagaatctaaacattttatcgaaggaagaggataaaccagctcatgcagtaatatctactttgtctaagagggcaccagattgccaaacagaagttacaatgtacagtagcgaagaaaaaagtggagagaggtgccagtcacataagaaagccatcactgtggatttactccttccaaatggtcatatgggagatttgtgcaaagacaatgatgacgtcctcatagacaatcaagcagccaatgaaggataccagccatttgagaacgccaagcagccgatggataaatcattagaactaacagagaaggtctgtgaaactgctaatttgagagttggaagtaactcttcccctgttgaagtcacaagcacttcagctccattcagagttgagaacgcttctgtttccctggaagccaggagtacgcctggtcaagtggtgaagcaagaaccggtttttgaaaaaccaccagctttgaagcatgtctactctggaaagaggaggcgaaaacttaaaatgaaggagggtagtggtcctgtatctggattgacccagagtaaagaggcctctaaaacacctgctacaaagaagaaaactgagagcacatccccagctgcaaaaaagctgaaaattgaggagaccacagccccagatgaagggaagaaagctgtgaagactcactcaactggaaagaagcgaaaagctggaaagtcatgctcatctaccaagaatcaggaagctgagaattcatcctgtgctgcaaggaaggatataagcgaaagcaccccctccaaaccgaggattgaaaaggcagtcttggtggcggtgaatagccggagaagtcagagggtccggaagccgaaaatttactgaaacaaagcagtctctccaatttcaggattgtgtatgtatcacagacgcgtctttttatgttttccgtgctgctgaaatttatttctatacgttattatgtgctcgccatgtaagttagtgtatatatcagcttgtctagataaagagggttcgtaatggtttagccatacctttttcttttgggctgccagactaaatagtacagttatcttgtgctgtcc

SEQ ID NO: 20108 - DNA, 1206 bp, Oryza sativa
  ref <308>: DATABASE ACCESSION NUMBER: AK070438
  ref <309>: DATABASE ENTRY DATE: 2001-12-06
gaaaagcaagcagcccagcccggcggggccgcggtgcacgcgcgctgcgacgaccacgccgacgccgacgccgggggaagacgagcagcaggggagcgccctcgaagccgagaggagggggaggaggaggacgacgacgaggcgcgcggcggagggcgccatggacaccttcttcctgtcgcacggcgcgcccacgctgtccatcgacgacaccatcgcggcgcagggattcttcaagtcgtggctgccggcggcggtggcgggcgcggagttgccgcgggcgatcctcgtcgtgtcgggccactgggaggcggccgcgccgacggtcaacgtcatccgcggcaacaacgacaccatccacgacttctacggcttccccaaggctatgtacaagctgaagtaccctgcgccgggcgctcctgatctggcgatgaagaccaaggagcttctggagcaagccgggttcgggccggtgaaggaaaaccacagccgcgggcttgaccacggtgcgtgggtgccactgatgttcatgtacccggaggcgaacgtgccggtgtgccagctctccctgcagagcggccgcgacggcgcgtaccactacgagctcggcagggcgctggcgccgctccgcgacgacggcgtcctcgtcctcggctccggcagcgcgacacacaacctccgcaggatggggcccgagggcacgccggtgccgcagtgggcggcggagttcgacgggtggctgcaggaggcgctgctcggcgggaggcacgacgacgtgaagcggtacgaggagaaggcgccgcacggcagggtggcgcacccgtcgcctgaccacttcctcccgctgcacgtcgcgctcggcgccgccggtgagggggccaaggcggagctgatccaccgcagctggagcaacgcctcgctctcctacgcctcgtaccgcttcaccaccgccaagaactgaaaaccggtcgacgcgatgcacgccggctcgccgcatgcaaccacgtgtttgcttgtaacatatttgactcgaacaataatccccgtgggctcacgtagacgtgtgtgccgtgttcgtgtttgtatttctcggagccgtggcttggggttgtttacttgtttttttttttgtaagattgggttgggcctgggcctgggcctgggccgtggcacagccttatggcgttaattggtgttcttatttgg

SEQ ID NO: 20109 - DNA, 1760 bp, Oryza sativa
  ref <308>: DATABASE ACCESSION NUMBER: AK070439
  ref <309>: DATABASE ENTRY DATE: 2001-12-06
gctcttcttcctccgctccattctcctcccaccctcccctgcgccatcgccgacgcgcgccgcggcgaacccaccggatcatcttctcgcgcgccgccgaattccctcccgcctccgccgaatccaccggcgggcgcccgatccctcatcctcctcctcctctgctcgtgccgcaggcgcgggcggactccctctttctctctcgattggaaggaatagctgcttactgttgaatattgacttgcttttgttgctgtcacaatgtcgggcctgctgaattcaaacctgaacaattctgcgtcaaatcttcaagactcaactggaagaccgtttacagggtccttttctggtcaatctggatcagttccagggggtttccatcactctggtttgcacaacatgcatggaagtttaaatatgccaaatatgcctggatcgttttctcagaggaatgctgccatgagtggccttccatcctctggggttcaacagcctggagggagcatgcctgggagatttgcttcaaacaaccttccagttggcatgtcccagatccctcatggtcattcaggagtcggtagtagaggattgaatgttggtggaggtccagcatttagtagtagcctgaatattggtggtaccattcaaggcttatcctcaaacctgggtgctggtggtagtcgtaattctgttcctgggatgtcagtatctccatctttgggaaatttgggtcctaggatcactggttctgtaggaaatattgtgggtggaagtaacattggaaggaatataagctctggtggattatctgtgccaagcatagcatcacgcatgaatttgagtggcaatgttggcagtggcggtctgaatgtccaaggatccagcaggatgatgaatggcattcttcagcaaggatcacctcaaatgctgaacatgatggggagtttatatccaacatctggaggttctttatctcagaaccaaatacaaggaggaaataattcccttggttctatggggatgctgcatgatgccagtgacggtgctccatttgacatgagtgattttccccagctgactggtcgacctagttctgcgggtggtccacaaggacaatatggctccctacggaagcaaggagttggtgttaacaccattgttcagcaaaaccaggaattcagcattcaaaatgaagacttcccggctttacctggatacaaaggcaacactacagattatgctatggagttgcatcacaaggaacaacttcatgataatgtacctgttatgcaagcgcaacaatatccgatgtcaagatcagttggctttaacttaggaagtaactacccaccaaatcgtcagcaacaccagcaaggtgctaattcagttcagaatgctggtcccccaaatatcggactaagaccactaaattctccaaatcaaacttctagtttgggatcatatgagcaacttatccagcaataccagcaacctcaggctcaaaatcctttcagattgcagcaggtgtcttcagctacccagtcatatagggatcagagtctaaagtccatccaggggggccaaacaccatctgatccatatggcttgatgggattgctaggagttatcaggatgaatgatgttgacttatcatctcttgctttaggaatagatttgacaacattgggtttaaacttgaactcaccagacaatctgtacaagacatttggctctccatggtcaaacgagccagcaaaagg

SEQ ID NO: 20110 - DNA, 2097 bp, Oryza sativa
  ref <308>: DATABASE ACCESSION NUMBER: AK070440
  ref <309>: DATABASE ENTRY DATE: 2001-12-06
gagggcaagcagaggcagcactgcccaaaccacctctttggcctgaattgcgcgacgctaacggcagcacactctcctgctactgctccattagccagcagccggtggcgcacaaacgccaatcgatcggaacgcatggctcagatgctctccgccgtggccatggtgggcgccgcctcggccgcgtcgcccattgtgacgaagagcctcgtcggcgtggacgcgccggcgtcgggcatcacggtcgtgtcgagacaggacgtgcgcccggacggcgcttcggcggtcggggacctcacgctgtccgtctccgacctgcccatgctgtcgtgccactacatccagaagggcctcttcttccccgcccccgacgtgcccatggcttccctggtttcgttgctcatgtcttcgctgtctcgggcgctcgccatcttcccgaccctcgccggccgccttgtcacgctccccgatgatcgcgtcgtcatccgctgcaacgacgccggcgtcgagttccgccacgccgtcgcgcccaacctgtcgctggatgacttcatcgtgcccgacgccgacgtcccgaccaagctgaccaaggacctgttccccatggaccgcaccgtgagctacgacggccaccgccgcccgctcacgtcgttccaggtcaccgtgctcggcgacggcgccgtgttcatcggcatcgtcgcgaaccacgccgtggtggacgggacctccttttggcacttctttaatacatgggccgccctttgccgtggcgcgtcacccaagctgccggacttccgccgcagcttttttggcgagtcaaccgccgtcctccgctttccaggaggcgtgggccccgccgtgaccttcgacgcggacgcgcctctccgcgagcgcgtctttcacttcagcgcggatgcgattcgcgagctcaaggcaatcactaaccgtcgcccgagcggcggtcaagacgccgaggtctacggcaagatggcgcacgatcggaagaatcccgaagggctcagtgcgatctcgtcgttccagtcactgtgcgcgcagatatggctctcggtgacgcgcgcgcggcagcgtctggcgcccgacgcgacgagcacgttccgcatggcggtgaactgccggcacaggctgcgcccggcgatctcccctgtgtacttcggcaacgccatccagagcgcagcaaccacggccacggtggccgagctggcgtccaacgacctgcggtgggcggcggccaagctcaacgcgagcctggcggcgtacgacgacggcgcgatacgccgcgccgcggcggcgtggcagggcgctccccggtgcttcccgctgggcaacccggacggcgcggtgatcacgatggggagctcgaaccggttccccatgtatgagggcaacgacttcgggtggggccgccccctcgcggtgcggagcggccgcgccaacaagttcgatggcaagatgtcggcgttccctgcccgcgccggggacggcagcgtggacatcgaggtgtgcctcgcccccgacaccatggcggcgctgctccgcgacagcgagttcatgcagttcgtgtcgtgatcgttccgccagtgcgtgcgcgagcgcgcgcgcgactattggtccatcgtgacacacatgccgttgcgctgcggctttgcgtccgttcctgcccatagtttggtcctttggtgctaagataatgtatccgtgttctggttgtgcagtgccagcgtgccgtggcagtagtagacagtggtaactagtagtagtacttggattgactagctgttactattacttgtaactactccagcaagcattggcgcgttgcaggggggatggagctcgtgaaactgcttgattgctaaagtcttccgggcgttcaagtacgatgaaccgattaatttgcgtttgattaggatggatttaccttttccttaggacagtctcaacccatgatgtgcataagtagtgtctatggtgctgtgtcaataagacatcacaatagaaactgcattctacaaccaccatggttggttttttaaagtgggccattaataaatacaacatctctcttctttatcaacc

SEQ ID NO: 20111 - DNA, 1519 bp, Oryza sativa
  ref <308>: DATABASE ACCESSION NUMBER: AK070441
  ref <309>: DATABASE ENTRY DATE: 2001-12-06
ggcatctccgctcctcgaccgcgagagaggagaggagagagagagagagagagagagagagagagaggcgttgcgagattcatcaggcaggcgcaggagaggagaggagaggagaggagattcattatgggggtggactactacaagctgctgcaggtggagcggggcgccaccgaggaggagctgaagaaggcgtaccggaagctggccatgaagtggcacccggacaagaaccccaacagcaagaaggaggccgaggccaagttcaagcagatctccgaggcctacgaggtgctaagtgattcccagaaacgagcagtctatgaccagtacggagaagaggggctcaaagggcaggtgccacctcctggagcaggtgggcctggtgggtcttcatactatgggggtgatgggtcgacgttccggttcaaccctcgaagcgcggatgatatatttgctgagttcttcggattttccagcccattctcaagcatgggtggcatgggtggtatgggtggaggtgttgacaggggcatgcggggatcaaagtttgggatgtatgacaatgatatatttgggtccttctctcagttccctggtgaggcatcaatgcatgctccccaacggccccagaaggctgcaccaattgagaaccgactgccttgcaatctagctgacttgtacaaaggcaccaccaagaagatgaaaatttcacgggaaatattagattctagcgggagaaccatggttgttgaggagatcctaacaatcgacataaaacctggatggaagaaagggacaaaaattacttttcctgaaaagggtaacgagtctccgcatgtgattcctgcggatattgtattcgtgattgatgagaaaccacatgatctgtttacacgagaggggaatgatctcgtcatgacacagaagatttccttggctgaggccttgacaggatgtacagttcaggtaacagcactagatggtcggaacctaacagtaccaatcaataatgtcgtctaccctggctacgaggaggttgttctccgagagggcatgccaattccgaaggatccatcaaagaagggaaatcttaggatcaagttcaacatcaaattcccctcaaggctgacgtctgagcagaaatcagaaattaagaggctactagcttcttgaggaacacaatataccgttaggttgtctggttttttgggtgcactggggagaccaatcagatgttaagctgggaaatgtgaataccatccaaagactcattttttgtgggttctggttattccacctttgtaacttaaaattgtcaattttggcagaataattcatcaaaatagataattctgtgtcaacatgccgtgcttatgtgtgccatctcctactgagcagaggctatcaaaatgaagccgcagttccaaactctgtttttttttcttttttgtactggactgcagagggtacccctggttatattttgagtatttctcgtccttgctgggccaatctt

SEQ ID NO: 20112 - DNA, 2010 bp, Oryza sativa
  ref <308>: DATABASE ACCESSION NUMBER: AK070442
  ref <309>: DATABASE ENTRY DATE: 2001-12-06
ggtggtaggtaagggatctcaggatgggacctggcacccatatccaccaaccactgttgtccctgagataatagacgcgtgctttgcagagtgatccaaagctagctagtcctaccaacaatggaggtcgccgccatggagatctctacctcattgctcctcaccaccgtggctctctccgtcatcgtgtgctacgccctggtcttctcccgcgccgggaaggcgcgtgcgccgctgccgctgccgcctggccccaggggatggccggtgctgggcaacctgccgcagctgggcgggaagacgcaccagacgctgcacgagatgaccaaggtgtacggcccgctgatccggctccggttcgggagctccgacgtggtggtcgccggctcggcgccggtggcggcgcagttcctccgcacccacgatgccaacttcagcagccggccacgcaactccggcggcgagcacatggcgtacaacggccgggacgtcgtgttcgggccgtacgggccgcggtggcgcgccatgcggaagatttgcgccgtcaacctcttctccgcgcgcgcgctcgacgacctgcgcgctttccgggagcgggaggccgtgctgatggttaggtcgctggcggaggcgagcgccgcccctgggtcgtcgtctccagcggcggtggtcctgggaaaggaggtgaatgtctgcacgacgaacgcgctgtcgcgcgccgcggtcgggcgccgcgtgttcgccgccggcgcgggcgagggcgcgagggagttcaaagagatcgtgctggaggtgatggaggtgggtggtgtgctgaacgtcggcgacttcgtgccggcgctccggtggctggacccgcagggcgtggtagcgaggatgaaaaagctgcaccgccggttcgacgacatgatgaacgcgatcatcgcggagaggagggccggatcactactcaaaccaaccgacagtcgtgaggaaggtaaggacttgcttggcttgctcctggctatggtgcaggagcaggagtggctcgccgccggcgaggacgacaggatcaccgacacggaaatcaaggcccttatcctgaatctattcgtggcgggcacagacacaacatcaaccatagttgagtggacaatggcagagctgattcgacacccagatatcctcaagcacgcccaagaggagctagatgttgttgtgggtcgtgataggctcctctcagagtcggatctatcacatctcaccttcttccatgctatcatcaaggagacattccgtctacatccatcaacaccgctctcgctgccacgcatggcatctgaggagtgtgagatcgcaggctaccgtatccccaagggtgcagagttgctggtcaatgtgtgggggatcgcccgtgacccagccatatggcctgacccactagagtacaagccctctcggttcctccccggtgggacgcacactgatgtggatgtcaagggaaatgatttcggacttataccattcggtgcagggcgaaggatatgcgccggcctcagttggggcctgcggatggtcaccatgacagcggccacgctggtgcatgcattcgactggcagctaccagcggaccagacgccagacaagctcaatatggatgaggcgtttaccctcctgctgcaaagggcagagccattggtggttcacccggtaccaaggcttctcccatccgcttacaatattgcataaagatttacgagttgaatataattaacgaaaagttatttccgtgtgtgtggcatcaaataaatagagggtatgaacttttgtcatggtgttgcatcattgttgtatgttggtagattggtttttcacgagtatctatactccttataaaaaggagtagtggtgatgattctgctaccaccccactaccaactcttatctttttttaaggacatctaggattagtgggcccatatgtcattactctcaccaacttttattcttgtgaaaggttattaccgtgcg

SEQ ID NO: 20113 - DNA, 1655 bp, Oryza sativa
  ref <308>: DATABASE ACCESSION NUMBER: AK070443
  ref <309>: DATABASE ENTRY DATE: 2001-12-06
gaccaccatcaccaccacctcgaaggtcttgagctccatctccggcgacggcggcgacgacgacgacgacggcgaggaggagctagtagctagctgagccagacagcatggggttcgcggtggtgaggacgaaccgggagttcgtgcggccgagcgcggcgacgccgccgtcgtccggcgagctgctggagctgtccatcatcgaccgcgtggtggggctccgccacctggtgcggtcgctgcacatcttctccgccgccgccccgagcggcggcgacgccaagccgtcgccggcgcgggtgatcaaggaggcgctggggaaggcgctggtggactactacccgttcgcggggaggttcgtggacggcggcggcgggccggggagcgcccgcgtggagtgcaccggcgagggcgcctggttcgtggaggccgccgccggctgcagcctcgacgacgtgaacggcctcgaccacccgctcatgatccccgaggacgacctcctccccgacgccgcccccggtgtccaccccctcgacctccccctcatgatgcaggtgacggagttcagttgcggagggttcgtggtgggcctgatctcggtgcacacgatggcggacgggctaggggccgggcagttcatcaacgcggtgggcgactacgcccgcgggctggacaggccgagggtgagcccggtctgggcccgcgaggccatcccgagcccgccgaagctgcccccgggcccgccgccggagctgaagatgttccagctccgccacgtcaccgccgacctgagcctggacagcatcaacaaggccaagtccgcctacttcgccgccaccggccaccgctgctccaccttcgacgtcgccatcgccaagacgtggcaggcgcgcacccgcgcgctccgcctcccggaacccacctcccgcgtcaacctctgcttcttcgccaacacccgccacctcatggccggcgccgccgcctggcccgcacccgccgccggcggcaatggcggcaatgggttctacggcaactgcttctacccggtgtcggtggtggcggagagcggggcggtggaggcggcggacgtggccggggtggtggggatgatacgggaggcgaaggcgaggctgccggcggacttcgcgcggtgggcggtggccgacttcagggaggatccgtacgagctgagcttcacgtacgattccctgttcgtctccgactggacgcggctggggttcctggaggcggactacgggtgggggccgccgtcgcacgtcatacccttcgcgtactacccgttcatggccgtcgccatcatcggcgcgccgccggtgcccaagaccggcgcccggatcatgacgcagtgcgtcgaggacgaccacctgccggcgttcaaggaggagatcaaggccttcgacaagtaaaatgcttgtgaaatgtgaactttgttattgttactacttctatgggctcgttgctcaatgggcttttttttgcttttgttttgtgtgtgtgggccgacacgattggtcaaaagggatttggtggaggcccagttgtaataagatggtccacgcatcatggattaatcgttaattgtaaggtagtactacacggatttgttaacaaggaataagttcacttgatgaccc

SEQ ID NO: 20114 - DNA, 1401 bp, Oryza sativa
  ref <308>: DATABASE ACCESSION NUMBER: AK070444
  ref <309>: DATABASE ENTRY DATE: 2001-12-06
ggaatacatttcatcgaacaccttgtgtgcatgcttcatcatcaccggttggagccgaagccggcgtagctgaccgcgggaaccgtggctcgggccgcctctacttcctctgctgccttggatcaacgtcgggaaccacgcatcgaacacctgcaagcgtcgccgctagccgcccctgtttcgtccgcactgagctgcgcgccgccgaacttcgccatcccgctgtctctcgtttattgcaggtacaaagaggatggtactgtaaaacaaaattcagagttcagagccagcaggagtatcaacttcagagaaaataaaacatgagaacaaaattcacaatgcaggagagtgaaccttggtgatgcacaacgatgccaggttcgtcgatgccaagatgatgcttaccagccccatatcactgggttatctgaaacagcaacaggataatcaacctcccatcaccatggtaagttgaagaatttttgagatttagaatgtcgagaggaggattcttgggtgtgttcggccgccatggcgaagagaggccggtggtgtggatcctttccccatctgtcgctttgtccatagcctcctccgtcttctcagattccaacctggtcggggatggcgatgacgaaatggaccctcatccgttgtgctgttgttgtgcacgagcagggtttgcaagttcggttgccatagaaatttcggtggttgccgagaatttgagactttcgtgattttcggaccgaaattatttaaatttttaacatattttgactgaatttgaacaaattttgacaaattttgcaaatatttgacaaaaagccaaaaattcggggaagatttgtgcttgccggtgggggccgaaaattaccaaaatttcaaaccatgtgcatgagttggaagaacaaggaagagaggtggctccgccgtgagatcgagcaacggaggaggcggggacgaaggcaacgcacgagaggcggagatgacagcggtggaaggaaggcgggggagcagaggaggaaacggtggcgagagagaggaggcggcggtggcggggagaagggcaacgatggaactttgcagtcgcacgaaggaagaattgaacttcggcatggataaaatggaaaaaaaatgagaactgaaaatctgcttaggggtttccttgtgtaagcaatgaattggaaaaggacagggcgttcttgtgttttgctggttaaggactgtattttaaaaggtgcagattgtctaccaaaatggtcctaatgtgtgtatcatagaggcccagcacaacacctggggatacacagaatagcatgccccaatgcttactgcatgtcatctgtatatccttatactgcaacatggcagaaggttttcactacaaaacagagtatt

SEQ ID NO: 20115 - DNA, 1237 bp, Oryza sativa
  ref <308>: DATABASE ACCESSION NUMBER: AK070445
  ref <309>: DATABASE ENTRY DATE: 2001-12-06
ggttcgatggtttcttccattcttgctacagaaaaataagttcttgccggcccaactcaacacccgctgctcgatcccgatcagccacgcttcctcttccgccgccgccgccgaagagggggactcgatagaccatgacgacacccggatcctgcccctcgtccacatccgccgcccactctcccgtctgcctcgccccctccgccgccgcaggggaatcccaagagatggtgcggccgcgcatggtgctgttcggcgactccatcacggagcagtccttccgccccggcggctggggcgccgccctcgccgacacctactcccgcaaggctgatgtagttgttagaggctacggagggtacaacacaagatgggctctattcttgctacatcaaatctttcccctggttggaatagtgcctcctcttgcgacaactgtattcttcggtgcaaatgatgcagcccttttgggacgaacaggcgagcgacagcatgttccagttgcagagtataaagaaaatctcaaaaagattgttaatcatttgaaggattgttccaagtccatgttaattgtactaatcactccgcctcctattgatgaagatggaagggaaagatttgcacgatcactctatggagaagaagctaggaagctccctgaaaggacaaacgaaatggctggtgtgtatgcaagtcagtgcatagagctagccagagaaatgaatatacactgcattgatatttggtcaaagatgcaagagaccgcaggatggcagaaactttacttgagcgatggactgcacctgacgccagaaggaaatgctgttgtccacaaggaagttgtccaaacgttgagaagtgtgggtctgaaagcagaagaaatgccatatgatttccctcaccattccagaattgatggtagttgcccagaaaaagccttccagtgaagtgtgatgccttgaatagcttgtggtgcggttcatctggagatctcttttcctctttgaattaggagaaagatcaaattaaagacaatgttttactgcttctatcatgagcttttggagtgaggaatttagcacccatttttactctggaagaaataaagttctcttcttgaaactgagaaattgatagtggtaggagatagtagtccgtggcctgtaaccgttcagatttctacatgggcacacgaccatactgggaatcagaaaattagaccccgtggattatctgg

SEQ ID NO: 20116 - DNA, 1128 bp, Oryza sativa
  ref <308>: DATABASE ACCESSION NUMBER: AK070446
  ref <309>: DATABASE ENTRY DATE: 2001-12-06
gacacacaaaccacaaacccgcatcgtctcctcctcctccacttgttgttcaattccccccccccctctctctctctctctctctccgtcgcagatctcggcaagggggcaacaaggtaggaggcggcgatgggttcggcgagccgcgcggtgtcgtgcctgtgctgcccgtgcaagtgcctggcgtgcggcctcttcagctgcctctgcagcatcctcatctccctcctcgtcaccctcggcgtcctcgccctcatcttctacctcatcttccgcccccacatgatcgccgccaccgtcgactccgccgccctcacccagttcaccctctccaccaactccgccctcgcctacagcctcaccgtcgacctcaccgtccgcaaccccaacaagcgcgtcggcctctactacgacaacgtcgagtccctcgccctcttcgacggccagcgcttcggctacgcccccctcgactccttctaccagtccaccgaggcatccaccaagctctcccccgccttcaagggccagcagccgctccaaggcgacatcaccgccgccaacttcaggtcgcagcagaccgccggcaagttcgacatcgaggtcaagctcaacgccaagctcagggtcaaggtctgggccttcaaggttcccggacccaaggccaagatcagctgccccatcaccgtcccagcgtccgcccccaacgcccccgcattccagcgcaccgactgcaaagtctggttctgatttcgatggttggttccgcttcgcatttggggattactattagccagcactgcttccagtatggacggatggattcttttgtttctttcgatttgttgatgagggattagctcgccggatgttgctgtacatcgctgtggtttaggtggttacatatcttctagcccttgtagctagcgcttgtcatgcacatattatcgatccatgtcttgttcttcttagttttttcccctttcttttgggtacggcttacttactgctgttcagatcatatatgactgtatgttggttgatacattcagagattttattcaggatcacctattacttctatgagtgacatctattatgattccttggttgattctgagttgtgccact

SEQ ID NO: 20117 - DNA, 703 bp, Oryza sativa
  ref <308>: DATABASE ACCESSION NUMBER: AK070447
  ref <309>: DATABASE ENTRY DATE: 2001-12-06
gataggagtactacgcagacgcagacgcagacgcagaccaagaagaaatacaatacactagctaccatggccgctctttcctctgccgccgtcaccatcccttccatggccccctccgctcccgggcggaggaggatgagatcttcgctggtcgtgcgcgcctcgctcggcaaggcagccggcgcggccgcagtggccgtggccgccagcgccatgctcgcgggcggcgccatggcgcaggaggtgcttctcggcgccaatggcggcgtgctggtgttcgagccgaacgacttcaccgtcaagtccggcgagaccatcacgttcaagaacaacgccggcttccctcacaacgtggtgttcgacgaggacgcggttccgagcggcgtcgacgtgtccaagatatcgcaggaggagtacctcaacgcccccggcgagaccttctccgtcacgctcaccgtccccggcacatacggcttctactgcgagccgcacgccggagctgggatggtcggcaaggtcaccgtcaactaattattctttcttctcaatctaaatatgcctcctacggctctatcctatatatatatatatcgatttgtccatcgcgaatatactacgtaccgatgatctgttcctcagttttctcttgtgtgtatgcaagtgtgtatcaattatcaatagcaatgagacgaacaattcaacg

SEQ ID NO: 20118 - DNA, 1403 bp, Oryza sativa
  ref <308>: DATABASE ACCESSION NUMBER: AK070448
  ref <309>: DATABASE ENTRY DATE: 2001-12-06
gacaagtcacaagcaacacagagtgaaaaaaaatggcacgggttcccgtctctcgccaccttcgcgtcgcgctgcttgctctcctcgtggtcgccgtcgccgccgcggcggcggcgcgcggggatcagccgcgtcgcgggcatagcatggccgcgcggcacgagcggtggatggctaggttcgggcgcgcgtacgcggacgccgccgagaaggcgcggcggatggaggtgttcgcggccaacgcggagcgcgtcgacgccgccaaccgcgcgggcggcgaccgcacctacacgctcggcctcaaccagttctccgacctcaccgacgacgagttcgcgcagacgcacctcgggtacagctgggcgccgccgccgccgtcgcaccggcatggccaccgcgccgagaatggcaccgccgcggcggcggcggatgacacggacgtgccggacagcgtcgactggagggctcgcggcgccgtcaccgaggtcaagaaccaacgcagctgcgggagttgctgggcgttcgcggcggtggcggcgacggaggggctcgtccagctcgccacgggcaacctcgtgtcgctctcggagcagcaggtgctcgactgcaccggcggcgccaacacctgcagcggcggcgacgtgtccgcggcgctccgctacatcgccgcgagcggcgggctgcagacggaggcggcctacgcgtacggcgggcagcagggcgcgtgccgcgccggcgggttcgccgcgccgaactcggcggcagccgtcggcggcgcccggtgggcgcgcctgtacggcgacgagggcgcgctgcaggcgctcgccgccgggcagccggtggtcgtggtcgtggaggcctccgagccggacttccggcactacaggagcggggtctacgccgggagcgccgcgtgcgggcggcggctcaaccacgccgtcacggtggtgggctacggcgcggcggcggacggcggcggggagtactggctggtgaagaaccagtgggggacgtggtggggcgagggcggctacatgcgcgtcgcgcgcggcggcgccgccggcggcaactgcggcatcgccacctacgccttctacccgaccatggacagctagctcaactgagcactggacagtgaacactagactgatgcaaatatgtactaatattgataagaatgttacgcctaatgcaaatatgtaatatgtgtgggcgtctggcttctaagtgataagctattaagccatagttaaggagtatatagtagataaaatgattatgaaaccagaactgtatcgacatatgcagttaaagaaactgatgtcggtaatggatggagcaaataagcacttgtacacattaagaaaagatgattcagaaaattcaggacatgcttattgcgc

SEQ ID NO: 20119 - DNA, 1794 bp, Oryza sativa
  ref <308>: DATABASE ACCESSION NUMBER: AK070449
  ref <309>: DATABASE ENTRY DATE: 2001-12-06
gtcgcctcgccacctccccccctgttttctccatttctcctcccaatttttttctccgcatccgcagaaattctgtcccctcctcctcctcctccatttccgatgtattttattcgatttcgagatttgttttccggtgcatagagctcacgtacaaccgccgcgccgaacggtgcatgtgaactgttcggcgaaacgcgcaggtgaggagaggtcgcgaggagcggctgctgcggcggcggcggcggcttcgattcaggtgggggtgggtgccctagggtttcgctgccgggatggatggccgggagcagcagcagcagccgcgcgtgagctcgccgccgccggccggcggcggcgtgatgatgcctcagcacccctacggcgccgcgccggcgatgccgccggggtcggcgaatgttatgcacggggtgccgctctcgttcaaccccatggcgtcgccgaccgcctcgtcgcctatgaagcccgcggatatgtcggggaccatgtaccgcaccgatcccgtcgtgcagggcatgcagcagcagcccggttccggcggtggcggcacggcggtcggcggaggggagctcgtgaagaagaagagggggaggccgaggaagtatggtcctgacgggaacatcgggttgggactgaagcccgcggctgcagcagggacggaggccggcggaccttcaggtggtgcaggatcgaactcgaaccctgacgggaagcgcagagggcgacccccaggatccgggaaaaaaaaacagctagatgctttgggatcttccgggacatcttttactccccacataataacagtgaagcctaatgaggatgttgcttcaaaaataatggcattttcacaacaaggccctcgcactacatgcataatttcagcaaatggcgctctttgcacagcaacactacgtcaaccagcaacttctggtggtatagtaacatatgagggccactttgatattctctctctgtcgggctcatttctgctcgcagaggatggcgacactcgtagcagaacaggtggtttgagtgtggcacttgctggaagcgatggacgtatagttggaggttgtgttgctggaatgctgatggcagcaacgcccgtgcaggttgtagtggggagtttcattgctgaaggtaaaaaaggcaaggaagaacatctgaaacgtgagccaacatctgccccgacgccgaaccacgcagctggctttggcgcagccacggctgccagtcctccgtctgatggatcatcaagcgaccactccgatgacccagggagtcccatgggacctaatggcagcacattcaataattcaggtcatcccatgcattcttcgtatgctcctgttagctggtcgctatctgggaatcaaggccgttacgatcccgacctgaagatgatgaccgactagataatcctgtgtttttaagctctgttagctgttgacccagtagagtgtagggatcagggattcagtgtttcctgcaccgacaccaccggcagcgttggccaataatccggtgcgctagtagtaatcagtatcacaatgcctgaacaaaagagatcaggaacaaataagtagccccagcgcatggcttggcctgtcaggtagctaatttttatttttctcaatcggtagcttatttagcatgctttgtcagttgtcagcctagttgtacggttttcttatgaatgtttgtacacctttttcttttctcgctagtattcggcgtgtacgaatcttaattaagattggaatgacatgttattgg

SEQ ID NO: 20120 - DNA, 1720 bp, Oryza sativa
  ref <308>: DATABASE ACCESSION NUMBER: AK070450
  ref <309>: DATABASE ENTRY DATE: 2001-12-06
ggcggatcggctcgagggtgtttccccactctcgcgtcgattcgcgcgatggacctgttgacatcggcgatgaagagatgctgcaacggcaagacgctcctccgcggcggccgcacctgtcgctgctcgtccgccagcgccattggatcttccggtgtccgtggcaaggaggaagcgtcgacttcggcggcggactccgagccggataagaagaggtggaggaagaagaggttctggaggaagaagaagaagaaggccaagaaggatcactacggcgacgccgccgccaccgagcacggcagcgagcgcgccagctgcaggcgctacgagaacgacgccgtggccgacctcgtgaacgacatatcgtccaagtcagatgtctgcaacgtgtacgcagccgaggggattctacggatcacccaccagaacatccccagcatggtgctcacgtacaggcagctatgcaacgccaccgactccttcagcccgaacaacctgctcggggaaggcggctttgggagggtgtacagagccacctcgaagagatcaacgagatcgtcgccgtcaagcagctggacaaggacgggttccaggggaaccgcgagttcctggtggaggtgctgatgctcagtctcctgcaccaccccaacctcgtcaagctgctcggctactgcaccgacatggaccagagaatcctcgtctacgagtgcatgcggaacggctcgctggaggatcatctcctagatctccctccaaaggcaaagcctctcccgtggcaaacgcggatgaagatcgcggtgggcgcggcgaagggcatcgagtacctgcacgaggtggccaacccgccggtgatctaccgcgacctcaagacgtccaacatcctcctggacgaggacttcaactccaagctgtccgacttcggcctcgccaagctcggccccgtcggcgacaagagccacgtcagcacgcgggtcatgggcacgtacggctactgcgcccccgagtacgccatgaccggcaagctcaccaagacgtcggacatctacagcttcggcgtcgtgctgctggagatcatcaccggcaggcgggcgatcgatacctccaggccgacgcacgagcaggttctcgtccaatgggcggcacctctcgtcaaggacaagaagagattcgtgagactggctgacccgttgctggaagagaaattccccctcaaggggctttaccaagctctcgcgatcgcctccatgtgcttgcaggaggatgccagcaacaggccgatgatcagcgacgtcgtcgcggcgctctcgtttcttgccgagcagaagtatcatccccaagatggcccggatcaggccgcccggaagagcagagacagggactgtagcaatcctcccaggaagacagacatggtttctgagatcaaggcagatgatgaaatcgagcacaggtgaccatagaggagtaacagcctagcagggaagggaggagctgcaggactgtctgctctcttgaatttcttgtgtaatgtacaccacctaggcaggatgtaacagcaacaagtcgatgttgactggtacttggtctgttcgtcaggattcattaccaggttattggagctcgcaggactgtctgctctcttgcagtcccaagttattggagctaactatagatacgatgagaatgacaagaatgatgacattaccataagccagttatatcg

SEQ ID NO: 20121 - DNA, 1157 bp, Oryza sativa
  ref <308>: DATABASE ACCESSION NUMBER: AK070451
  ref <309>: DATABASE ENTRY DATE: 2001-12-06
tgatagccatcatacgcaaacaagtaaacatggtgagagtggtgggagcaactctggtggatctagagccggcctattcagaacaccaatttcagggggcgtacacactgcgacttctgttcatgatttacccccaccggctcgagctgttcgcaatctgatggagcaggcacggtttgctcatctgtgtactgtcatgtctcggatgcatcatcgacgtgcaggatacccgtttggttctctagtggattttgcacctgatccaatgggacaccccattttttcactgtcccctttagccatccacacaaggaatcttctggaagatccgaggtgcacagtcgttgtacaggtgcctggatggagtggactgtcaaatgcacgtgtaacaatttttggtgatgttgttcccttgcctgctgacctgcaggaatgggctcatcaacagtatgttttgaagcaccaacagtgggcatcccatcagtggggcaacttttactattacaaaatgcagacaataagtgacatatatttcattggaggttttggcactgttgcttggttagatgtgaaagaatacgaggctctcaaacctgataagattgcgactgatggtggggagcaaagtttaaaggaacttaatgcaatgtactcaaagcctttgaaagagcttttatcaaccgaaatagaggtagatgatgcagctcttatatcaattgatagcaaaggtattgatatacgagttcgacaaggtgcacagttcaacatccagaggatggcctttgagctgcattacagcgtagaaacacttgaagaagccaaggaagcgattaggaggatattaggcaaatcaagatggcatgccaaattttagacttccttcaaatctgaatgatgaattcatggatggaaactatcaagcgcctgaatcctgtaaaatatttgtatatactcatgtaatttttgactttgtggtgtgccagatggaataagggaattccatttcactcttgtgttacaagggcctaaaaggcctgaagactaaggatagagtcaaatgttattagcttctgtacagtcaattcacttctagtgctgggtttgataggaaacgaagtacatgcagctaacaaaatgtaatatccaaaaatggtttg

SEQ ID NO: 20122 - DNA, 2307 bp, Oryza sativa
  ref <308>: DATABASE ACCESSION NUMBER: AK070452
  ref <309>: DATABASE ENTRY DATE: 2001-12-06
gggaattaataaaatgtagtgaccgtgccgacggaggaagacgaagacaggagacggttactggagttgagtactccacccaccacaccacacaagagagagaagggttggggttggggtcactctttccttttctctgttgttgttggcttgatgatgagctgattcgcataattccaattccaattccaattataattccaagaggcttatcatcaactcaactgaagaagaagaagaagaagaagaagaagaagaggaggagggttgtgaactgatttgggaagggagggggaggaggaaggcgatcgatcggcgatgggcacgtacaagtgctgcctcatcttcaagcgccgcttccgctggaacgacgcgccgccgcccgacgatgtccgcgccctcttcgccaaccactccgccggcggtggcccccacatggccgccgacggcctccgcgcctacctccaggccaccggccaggacggcgacgtggacatggagcggctggtggagcagatccggcagctgcaggggcgcggcgggcgcatcccgcgggtggggcgggcactcccactcctgacggtggacgacttccaccgattcctcttctcccacgagctgaacccacccatccggcacgggcaggggcaggtgcaccacgacatggccgccccgctctcccactacttcatctacaccggccacaactcctacctcaccggcaaccagctcagcagcgactgcagcgacctccccatcatcagggctctccagaggggcgtccgcgtcatcgagctcgacatgtggcccaactcctccaaggatgacatcagcatcctccatggcaggacgctcaccaccccggtctccctcctcaaatgcctcctctccatcaagcaacacgcctttgaggcctccccttacccggttatcatcacgctcgaagaccacctcacccccgatctccaggacaaagcagccaagatggttcttgaagttttcggcgacatcctctactaccctgacaaagatcacctcaaagagttcccttcgcctcaagacctcaagggccgtgtcctcctctccaccaagccccccagggagtaccttcaagccaaggatggtaatgctgccaccatcaaagaggacgccaaggccgccgccactgacgatgccgcatggggaaaagaagtcccagatattcactctcaaatccactctgccactaaacatgaccaaagagaagatgacgacgacaccgatgaagacgaagatgacgaggaggaggagcagaaaatgcaacagcatctagctccacagtacaaacaccttattaccatcaaagcaggaaagccaaaaggtactctacttgatgccttacagagtgacccagaaaaggttagaaggctcagtttgagcgagcaacaacttgccaaattggcagatcatcatggtaccgaaattgtaaggttcacacagagaaacctactgaggatatacccaaagggcactcgggtcacatcatccaactataatccatttcttggttgggtgcatggtgctcagatggtagcgttcaatatgcagggatatggaagagctctttggttgatgcatggattttataaagctaatggtggctgtggttatgtgaagaaaccagatttcttaatgcaaactgatccagaggtttttgacccaaaaaaatccctatctcccaagaaaaccttgaaggtgaaagtatacatgggggatggttggcggatggacttcacgcagacccactttgatcaatattctcctccagacttttatgcacgggtggggatagcgggagtaccagcggactcggtgatgaagagaacgagggcgatagaggataactgggtgccggtgtgggaggaggatttcaccttcaaactgaccgtgccggagatcgcgttgctgcgggtggaggtgcacgagtacgacatgtcggagaaggacgacttcggcggccagacggtgctgccggtgtcggatctcatcccggggatccgagcggtggcactccacgaccgcaaagggatcaagttgaacaacgtcaagcttctcatgcgcttcgagtttgaatgacccaacacaccgacactttctttctttctcgccgcatcgcattgcactgtgcctgtgcttgtgcagcatccatcatttggtttggtttttcatgttcctgtgcatacgcatttgtgtctgtacataggctcggtcctgtatattgtttgtgagtaacatgtaataataaggcttcacgccatgttcattccg

SEQ ID NO: 20123 - DNA, 1279 bp, Oryza sativa
  ref <308>: DATABASE ACCESSION NUMBER: AK070453
  ref <309>: DATABASE ENTRY DATE: 2001-12-06
agagacatcatctccaataatattccttcaaggaagccgcttcgattcccacatcggagatggcggcttcctccggccgccgccacgcgccgccgtcgggttaggaagggctcgaggttggagaggcaacaatggcgatcgcttcgtcatcgtcgtcgttgctgctgctgatgtttcttgcgttcttggatcatggcgccgcggtggcgaacctgtcgtccatcgaggccgccgtccgcgaccgcgcgttccagctgttccgccgcacgagcgagatcgtcgccgtcgacgtcccggcggtgctcgccggcgccggcgtcgaggcctcggcgacgcgcgtgcgcagcagcgccctgtgggccgatggcgtcaacgccaccgtgcccgggctcgccgtcgccgtcccgccgcgggtcgtcccggcgccgttcgcccgccgcgtcgccatcgtgttcgtccgcttcctcggcgacgcctcctcctggctgttcgacgcgccgcccgggtacgcgctggccgcgccggtggtcgcgctgctcgcgttcgacgcgtcggggcccaacggcggcgtcgcgctccgcgcgctcggcgcgcccgtccgcgtcgagttcagggacatctcgccggcgagcgggttcaacgccacggcggcgaggtgcctgaccttctcgtccggcggcgggaaggcggtggcggcgcacgccgtggccatggagcccggcccgtcgtgcgtggtgtccggcacggccacggggcactacggggtggcggtgcgcgtggagacgccgccaccaccgccaccgccacgaccaccgccggtgagggagcggtggtgggtgtggaaggtcggggccaccgccggcggggtggcggcggcgagcttcctggcggtcaccgtggtcggcgccgtgaggtggaggaggaggcggcggagggaggagatggagcggcgcgcgatgtgcggggaggagctcgggaggatggcggtgagggggagcaggatgccgtcggcgaagatggtgaggacgcggccggagttggtggaggagctaagctaacctccgccgccgtgagttgcaccggcgagccgccgtagttttcgtaaggttttttttttctcctttcgttttttaggtgtaattttttcttttcagattattacgagacaaatgtacagtacattaaactctttcaaaaaaaaattcacgtgcaactcaaactcaaattcaaattggattggaatgtacattgcagttgggttatgttaaattttgagagc

SEQ ID NO: 20124 - DNA, 1082 bp, Oryza sativa
  ref <308>: DATABASE ACCESSION NUMBER: AK070454
  ref <309>: DATABASE ENTRY DATE: 2001-12-06
gatatagtatgtgcctgcctgcccctcgccatccccatttcctccaccttcctactacagctgctttccgatggatcacagcggcagcgtcagcgccggcggcaagatgatggtgaaggcggcggcggcggcggagtcggcttctaccaacgaacgcacccagagcttcagcggctgcaattcagagaaattttaccatatcgaaagccctcataagaaaaggaagtctcagtatgagctgagtgatactagggtttcatcactgaagtacaagtttcggaacagattagcttggcaggaagatgaatcttcaagaacagaaagcttaggatgcaacagtattttcgtcaacaggaactatgacatggatatggtgaacagagttgaagaattggagtcctgtgacaacacccaaagccttattggtgggtgcattgaagtggactctataaacggaatcgagagccacaaaatgctgaaggtccaggcattttcatccagcagctcaagcaacaacatttcatctgatgccttcacttcttcccgtagtaatggcaccaaagatactgacagttgggatatgcagcacctggagtatgatcaccctggtctaatgctgctaccatatgatgatgacatagaggaggcatacgatgtactaggacaatatgatgttgtaatgaaaaatgatctagcgagtggtgatgttgatggttctgctgctggtgtcatagatgagaagctttactcgaatggaatagaagatttactcatattgccaagaggccagaatagcattcatgacgagaagaataagctgacgatcgatcaagagtttgagcagtattttacaaggctcatgctttagcattgatgatgtcataaatctccgctctgttcaacatcggaagacgctttgctccctgcagtcagtgtgtgatttgagcttagccctgcacgagcgaatgcgagtgttagctgctataggagctaggtgcctatttttgtacatcttcttcactgctatgtatatatgtcttctgagttctgaacggactaatgtactcctctgaagtctgacc

SEQ ID NO: 20125 - DNA, 2713 bp, Oryza sativa
  ref <308>: DATABASE ACCESSION NUMBER: AK070455
  ref <309>: DATABASE ENTRY DATE: 2001-12-06
ggcacgcctacacccagccgccgagacgaggaggagcagcgcagaaagttttcgctcttcgatcttccgcccaagttcttcgctcgcatcctccatcggtcttctcttcctagctttctgatggaacgaaggagtataaacggcttggcagcaatgcaagctgagtgaaagaggaggtatggaaaaacttgttccagggcaatcttgacttcacacattggaccaaatggtgccaagccatggccggcctgcttgtacctgcagcttgaggaatccagaaagctcgccaatttgactcccacgcattttgagcagctgagcaacaatggaattcggaggggtattgcagttgtggaatgaatggggggtacagatgctggtcctagcaagcttcgcgttgcaggtgttcctcctcatcttcggagggatccggcggcacagctcctcctccgtgctgatgttcttcctctggtcggcgtacctgctggccgactccacggcgatatacaccctgggccacctctccgtcgacggcaggtccgacgagcacgagctggtggcattctgggcgccgttcctcctgctgcacctcggtggcccagacaacatcaccgcatacgcgctcgaggacaacacgctttggttgcgccacctgcagactctcgccgtgcaggttctaggagctgtgtatgtgatttacacatacattgtcggcagcgggaccgatcttctgatggcctcagtctcgatgttcatcgccggacttctcaagtacggcgagaggatatgggcgctcaaatgcggcaacatcagcagtatccgcagcagcataagcaccagaaagttcaagactgacccttacgagttgctggcattgggtaccagcgaagaggagctgctgcttggagcccactcccaattcgacatctgcaaaggcgtctttgccgatatcataatgctgccaaatccgtcgctcctctcgcgatccaaacggcgatcggtgatatcctacctggggatggatctgtacaagctggtggagatggagctgtccctgatgtacgacttcctctacaccaaggcagcggtgatccacacatggtacggcttctgcatccatttcgtctcgttgttcggcacggccaccacgttcctgctgttccagctgatcatcagcagcagcagaggagatgggtacagcagagaggatgtggtcatcagctatgtgctgctggttggggccttggtcctggagatcatatcagtgtgcagggctgtgctatccacctggacatgttctctgatgcaccggaggggcagggcatgggagtggcctctccacattatcacatcctttagccgccgtgtccacccggcaagccggagactctggtcaggctcaattgggcagtacaatctgttccacctttgcgcccgcaacacgaacgagattgggagtaggttggcaaccagattggggctccaggactggtggaacatgatgcacttctcgggcaccttctcgaataccggctctttctcaatacaagatctcaagaaactggttttgcaagcactggaagagaaagagcgagcgctgcaatacaaggataccgacctgaactccaggggcagcttcatactcaagagtatgaaggcctatgacgactttgcccgatggagcgtcaacatcgacttcgacgagagcatccttgtttggcacatcgcgaccgagctgtacatccggagatccaaggccaggcacgcgaaagagctcgttgaggctaccgaggtgctgtccaattacatgatgtttctgctggtggtgaagcccaacatgctgcccggtgctgcacgacacaacatacatctcccctcctgtgaacagatagaagggcattgtcgtatgggctttggtggtgagaaggataacccggtggcggcatcgcccataagctggaacccatactgtatgctcaaggaattgctccaccatgatggccctagttgctcaagtatcccacggagggagaagctcgcggagatcgtgtggagtttctgccaattcgcactgggatcagtaaaggcaccaaatccacacggcgaatccatccgcgacagtgcaaacatgtactcggtgttgctcgccaacgagcttctcggcatcgagtcgcggtggtgtgagcagcgtgacaccttggaactcatcctaggggtgtgggtggagatgttgctgtacgctgcgaaccattgcagccaggagtcgcatgccaggcagctcagcaatggctgcgagttcatcaccatcgtgtcgttactagcacaccacttcaagtactactctggagcatccaggggcgcggacgagctgtatgagagtaacccttcaatgagaacggtgagaagttggtctagatccctttcttaatgaaattggtcgtactgaatctttcggccgacccggcaaaagaagttggtatagatgaattctatcaacggtttcgctctttcctctagtagaagcagaggattcaacacttccatccatgtaaccaaccgttgttatctcgttgttatcggtaaacaaacatactccctctgtcaagaaatgtaagcattttctggctatgcgcttggacaaaatgcttatatttgtggatagaggcggtaattattgggatatatagagtaacacaagttggaagattacttg

SEQ ID NO: 20126 - DNA, 2393 bp, Oryza sativa
  ref <308>: DATABASE ACCESSION NUMBER: AK070456
  ref <309>: DATABASE ENTRY DATE: 2001-12-06
gatccccaaccccgagtgcagacgaaaccagcctgaccgatttcccaaaaaaaaaaaacaaaaaggaaatcagcctgaacgccggcggcgctcccgccgcgctcgagctctgctcctccgatggtgaccagatggagcgagaagggccccggcctcaagatcctgtggatctggaccctgggaaccgctggaattatgattaccaatgtcgtccggacgcgcgtcaatgatatgcagaagatcctccaggaggaagacgaagcagcagcagccgccgcccccatggcctccggcgagcgtgtcctgaaagacgatgagtagaacagaacgtctctacttatcaaaattccctgaaccccgctgttgtgccaagctgagttaggtattgtttatctggttcgtcttagtggattttactggtaaaacagctacttgcttgagcggaagtatggaattacttgattcaaaatactgggtcgtctaccatctcatttagaactttttagatcttcatacagtgaattttctgttggctagaaagaaggtgatcgaacatcttcaggcatagctataactgagaatcctgagggtgcagcaatgagaacatgcagtgttcctcaaacatccagctgggatgtgacatacaaaaggattcggtagtgctgaagtctagtgagcacataggtcctgcagaaattgggttacttgcaaccgtgggagtgactactgtcaaggtatatcgtcgaccaaccattgctgtattttctacaggggatgaattagtggagccagccacagcatctctcagtcgtgattcgtgattccaaccgggctatgttaattgctgctgctattcagcacaagtgcaaggtagttgacttgggtattgcaaaagacactgaggaaagtcttaaggagcatatggatgcagctctaagttctgatgctgatatcattcttacttctggtggtgtttccatgggcgatagggatcttgtcaaaccttgtttggcaagcatggggaaaattcactttgaaaagattcggatgaaaccagggaaaccattaacatttgctgagatcgtaacagaagattcatcaaaaccatctaaaaaggttcttgcatttgggttgcctggaaacccagtgagttgtgttgtttgcttcaatctctttgttgttcctgcaatacgttcactctctggctggtcaaatcctcatctaccaagagtgcacgcacgtctactgcatcctttaagaggagacccacatcgtcaagagttccatcgtgcagtgatcagatgggtgcctgatgatggatctggtagacctggatatgttgctgaaagcacgggccaacaagctagtagccgcctcctaagtatgaaatctgcgaatgctttactggaagtaccattagtggggcagatgttggaggctggaacatctatgcaagctatacttatttctgatatgaccagttcaccttttgacaagctacccactgcttcaaatccgttgccatctcatttatttccttctgcaaaaagtgtttccacagatttgtctcaggttccagcctcacagaatactgaagttaaagtagcaattctgacagtgagcgacactgtttcattgggtgcaggccctgacaggagtgggccaagggcaatatctgtagtgaattcttcatcagagaaattgggtggagcgactgttgttgctactgctgttgttccagacgatgtggaaaaaatcaagaacattttggtgaagtggagtgacattgatcgtgtcagcctcatcttgacactaggtggtactggtttcacacctagagatgtcacaccagaggcaacaaaatctgtcatagagaaagaagcacctggcctcacatatgtcatgcttcaggaaagtttgaaggtgacaccattcgcaatgctatctagagccactgcggggatcagaggatcaacacttatcatcaacatgccagggaacccgaacgccgttgcggagtgcatggaggcgcttcttccagcactgaaacacgccctgaagcagataaagggtgataagagggagaagcacccgcgccatgtccctcacgctgaagctgcgcctgtggaccagtgggatcggagtttccgagccgcgtcgtccggcaggggatgctcgtgcgagccatgatcggggccgatgagaatttggtcctcgcgggctatcggcgttcacttcgtcagcttgtcagttccttcgttagcccagccgcgttcagctcggagctaagcagtgacgattttggttctgctcactgtttttgttttcacttcacccgaaccttacgaacaccagtgtgacaaataaagtggttacagtatatttgatcttgt

SEQ ID NO: 20127 - DNA, 1470 bp, Oryza sativa
  ref <308>: DATABASE ACCESSION NUMBER: AK070457
  ref <309>: DATABASE ENTRY DATE: 2001-12-06
gtcaaaaattaatacggttgttctcttccatttctcttcaagaagcatgtggcaatcagtgtgagctactgaggaggtgtagtgatctccactgccaccatgaaggcggcggcgatggaggagccctcatcgccggcagcagtggcggcgcggcggagaagaacggcggcgaggaggaggggttggtggtgaccgagatcaagaagcagctgtacctcgccgggccgctcgtcgtcggcatgttgctgcagaacgtcgtccagatgatttccgtcatgttcgtcggccacctcggcgagctcgccctctccagcgcctccatggccacctccttcgccggcgtcaccggcttcagcttgctggctggcatggcgagcagcctggacacgctgtgcggccaggcgttcagcgcgaagcagcaccacatgctcggcgtgtacaagcagcgggcgatgctggtgctcgcgctggtgagcgtcccgatcgcggcggtctgggccttcaccggcgagatcctcctcgtcgtcggccaggacccggagatcgcggcgggcgccgggagctacatccggtggatgatcccgacgctgttcgtctacgggccgctgcagtgccacgtccggttcctgcagacgcagagcgccgtcgtgccggtgatgctctccgccggcgcgacggcggcgaaccacgtgctcgtctgctggctgctcgtgcacaggctcgggctgggcgccaagggcgccgcgctcgccaacgccgtctccttcctcaccaacctctccgtgctggccatctacgcttggcgacccgtgttgtgatgctcctggcgttcttggtaggaacttcagaaggcctcgtgatggttattgtgcgcaatctctggggatatgcgtacagcaatgaggaggaagtggcagattatatagctaagatgatgcctattcttgctgtgtccatcctgttcgatgcaattcagtgtgttctgtcaggtgttgttaggggctgtggacgacaacagattggtgctttcatcaacctaggggcttattacctggctggcatacctgtagcattctttttcgcctttgtctgccatctaggaggaatggggctatggtttggaatattgtgcggattagtggtgcagatgcttttgcttctcaccatcaccttgtgcaccaactgggataaagaagcactgaaggcgaaggatagagtttgcagttcttcacttcctaaagacttggcaacatgaggttacatcaacagaagagcaaatgcatgcagttttattggatgcgaagtattacaaataaattgtttttggtacccttggcagaatcaatgaatgcctgagttttgatagtttgagttagctagcctaggtatgatttttgtaacgcgcaaaaacctatcagatcttgtattacacattctagatataacaaatattagtgtttcctcttgacc

SEQ ID NO: 20128 - DNA, 1263 bp, Oryza sativa
  ref <308>: DATABASE ACCESSION NUMBER: AK070458
  ref <309>: DATABASE ENTRY DATE: 2001-12-06
gagcacataccattgcaagaaacccttcacatcttactgaaacagctactactcctgctagctagctcaagctcaagctcaatctcaagctctttccactaagctccgtgtgtctagctcatcaatacctggctagctagctagttgcttgatcgatatatatcctagctaagtgatggacttcgacttgttcaattcctacccggaatcgcagcttgacctgatgagcacgatgcttcagctggagcagctcactgcgctcagtgaccagtcgctgttcatggcggcgccgacgtcgccgccggtatcacccatggggaccccttctccccagttctcaccaccgccgcagatgtcggtcaccaccaccaccgccggtggcggttaccaggatcagtataactccatgccggcaacgtacggcgccggtgcgggcgtgcaccagctggacttcgcgatgtcgtcaccgggctccgactccggcgcgccgcagggctcgtcgtcgtcgtcctcgtcggaggcgatgcgggagatgatcttccacatcgcggcgctgcagccggtggagatcgacccggaggccgtgcggccgccgaagcggcgcaacgtgcgcatctccaaggacccgcagagcgtggcggcgcggctgcggcgggagcgcatcagcgagcgcatccgcatcctgcagcggctcgtcccgggcggcaccaagatggacaccgcctccatgctcgacgaggccatccactacgtcaagttcctcaagtcccaggtgcagtccctcgagcgcgccgccgccgccaccggcgccgccgcccaccgcgccgccgcattcggcgccgcctacccagctgccttacccatgcagcaccacgctccgtggtagctgcacgctactagctcccacatggatagatggtgatgagacaatcgtttcccattactatcgcgtctcacatgcttgtcgccgtcgtcgtcgtcgatcgatcaatcaccactgctgctgctgcagcatgcatgatcacatgcatgtgcaaattagtagtacaagatgtaggagactacctgattactagtaccatttattattgctgttgtacgttaccgcatgctagctcgtacgtacgtggctgctccgagcttttgttggactcgcagcccgtacgtgcatgcgcgtttcattcgaccgtaggcttgtactgtactgtacacatttccttctattctacccccctgttcaatgcagtacgtttcccgtacctc

SEQ ID NO: 20129 - DNA, 2513 bp, Oryza sativa
  ref <308>: DATABASE ACCESSION NUMBER: AK070459
  ref <309>: DATABASE ENTRY DATE: 2001-12-06
gatctctgatctgctagctagtacagtacatatccatctatccgtctgttagagtaaaaattccccatttaattaggatcgatcgattggattgaagctggcgatggcgagcggcgtgtgccctcctgcggagctggggttcggggcggagtactactcggtggtgaacggggtgtgcagccgcgccggcagctacttcggcggaaggccggtgctcacgcaggccgtcgggtacgccgtcgtgctcggcttcggcgccttcttcgcgctcttcacctccttcctggtgtggcttgagaagcgttacgtcgggtcgcagcacacgtcggagtggttcaacacggcggggcgcagcgtgaagacgggtctgatcgccagcgtgatcgtgtcgcagtggacctgggccgccaccatcctgcagagctcgaacgtggcatggcagtacggggtgagcgggccattctggtacgccagcggcgccaccatccaggtgctcctcttcggcgtgatggccatcgagatcaagcgcaaggcccccaacgcccacaccgtctgcgagatcgtccgcgcccgatggggcacccccgcccacctcgtcttcctcaccttctgcctcctcaccaacgtcatcgtcaccgccatgctcctccttggcggctccgccgtcgtcaacgccctcaccggagtcaacgtctacgccgccagcttcctcatcccgctcggcgtcgtcgtctacacactcgccggcggcctcaaggccaccttcctcgccagctacatccactccgtcgtcgtgcacgcggtgctcgtcgtcttcgtcttcctcgtctacacctccagctccaaactcgggagcccgcgtgtggtgtatgatcgcctcatggccgtcgccagcgccgcgcgcgactgctccgccgacctctcgcgcaacggccaggcgtgcggccccgtcgccggcaacttcaagggctcctacctcaccatgctcagctcggggggctcgtcttcggcatcatcaacatcgtcggcaactttggaacggtgttcgtagacaacggctactggatgagcgccatcgccgcccggccatcctccacccacaagggctacctgctgggcggcctcgtgtggttcgccgttcccttctcgctggccacctcgctcggcctcggcgcgctcgccctggacctcccgctcaccgccgccgaggcagccaagggcctggtgcccccggccaccgcaacagcgctcatgggcaagtccggctccgtcctgctactcaccatgctcttcatggccgtcacatccgccggctccgccgagctggtggccgtctcctccctctgcacctacgacatctaccggacgtacctcaacccgggcgcctccggcaagcagatactccgcgtgtcgagggccgtcgtgctcggcttcggctgcttcatgggggtcctcgccgtggtgctcaacgtggcgggggtgtccctggggtggatgtacctggccatgggagtcattgtgggatccgcagtcatccccatcgccctgctgctgctgtggagcaaggccaacgcggtgggcgccatgggcggcgcggtgtccggctgcgcgctgggcgtggccgtgtggctcacggtggccaaggtgcagtacgggcgcgtgaacctggacaccacaggtcggaacgcgccgatgctggcgggcaacctggtgtccatcctggtgggcggggcggtgcacgcggcgtgcagcctgctgcgcccgcagcactacgactgggggaccagccgggagatgatcaccacggtggagagcgtgcatgccgcgctggacgacgagctcaaggaggagcgcctggtgcacgccaagcgttggatcgtcaggtggggcctcgtcttcaccgccgtcatcgtcgtggcgtggcctgcgctgtctctgccggcgaggaggtacagccttggctacttcacgctgtgggccgcggtggcgatcgcgtgggggactgtgggctcggtcgtcatcatccttctgccggtggccgagagctggaccaccatcaccaaggtctgcgccggcatgttcaccaacgacgctgtgtacgaccgcctcgacgacgtcaacctccgcctccgcgccatcatgggcgccatgcccgaggctgagaagcgctaccgccagctacacgagacggagatgcaccctgccggaacccatccggccaacgacgacgacgacgacaataataataatcagatgatgcactcctgattccatccaatcatccatccatccatccatagactaattaagatttctacgtactacatactactcgtacgtacactttttatatacacacatatatgtatggagagcccatataattaaaaaagagtgtgcatcagcagcgtgtgcatgatagtgaacacgttttgtgtatactacaaaataaccgatgtttctcgttagctgatatgttggttgataataaacaggcagcctacgtcatcttc

SEQ ID NO: 20130 - DNA, 2875 bp, Oryza sativa
  ref <308>: DATABASE ACCESSION NUMBER: AK070460
  ref <309>: DATABASE ENTRY DATE: 2001-12-06
ggactcgagtcgagagagggtgcctcgaaatgcacgttgatataaacagcccgcagcgaaaccaccccaaaaaaccaaaaacccaccacccccacgcggtgccactgccaccgcccctcgccgctgacgaccgccgccgccgccgccgcacggacattccgcacacgcccgcggggggcgggcggcgccgcgtcgctgatccaacgcgagcacgttcgtcgtccatccatcctcccgctcggatttggagtcggcaaccgctcgggctcgcgtcgcggcaactgaagcggcgaaattgcaacaggcacaggcaggtatcaagtttctagtgcactaaacaacctttgagatgggtactgtagagaatatggaagggagagaagagcgttcgactgatgtggaacgggatggtaaacaaggaaaagaagttgaatcggactatgaaccagctagagactctgtttcatctcagggtgaggctaacagcaatgaagataccagagccaaaagagtctcaagggttccaaagaagctagtgaagaaagattcaaaggaaaacagcccacgctcaggcagaattaattccaatcgccaagtgcagactaagctgcaatatatatcgtcaaacaatttgcagagcaaatctccaaagccaaacaaaacatctgatggtgctaaaaccattgagataacaaagccagatacagtgacagttccttcttgtccttcatctgaggtgtctgaggagatggatgataaacccattgagaatatagggacggatgataaatccattgaggatgtagctgatgataaggccactgagggcacggcctcttatgataaggccactgaaggaaaagctgctgatgatacgaccgttgaggacaacaccactgatgaaaggagcattgagagtggcactgatgataggaccattgcgggtatagcagctgatgttaaatctagtgaagaggcaaaggagattgatatattggatgaagccccaaattgtgatcagagtactgctactgacgaggaaatagctgatactgaagaaagcatagcttatgatggtaaatcagctgcatatgaaaagagtgaggaattagaatctaaatgtgaaaggttggagcaggaacttcgagaagttgctgcccttgagatttctctttattcagtagtgccagagcacggttgttcatcgcataaattgcacacaccagctcggcgtctgtccaggctatatgttcatgcatcaaagttttggtcctctgataagaaagcttctgtcacaaagaacttcgtttctgggcttgtccttgttgcaaagtcttgtggaaatgatgtttcaaggttgacattctggctatcaaacaccgttgtcctaagagagatcattgcacaaacatttggcattacacgccaaccaagtcttgctatgaaggctttcagcacaaatgttaatgcaaagatgctcggtaagaactcttcaccaacgcggcggaaaaacaactacagtggcaagcatgctagacctgctatctggccattacctgatgattggcgggaaactggtacactcgtggctgcactggagaagattgaatcatggatcttttctcggattgttgagtcagtgtggtggcaggcattgacaccccacatgcaaacactggtgaaagatatatcaagtccaaaggctgggagtttgttgggacctgctttgggtgatcagcaacaagggaacttctccattcatctttggaaaactgctttccaagatgccttcagcagaatatgtcctcttcgtgctggtggacatgagtgtggatgcttaccagtgttggcaaaactggtgatggagcactgtgtagctcgtttagacgttgctatgtttaatgcagtcctgcgtgaatctgcaaatgaagtaccatctgatcctatatctgacccgattgtcgactcaagagttctaccgattccagctggtgacttcagctttggatcaggtgcacagctgaagaactcgatcggaaattggtcccgatggttgcaagataagtttggcatggttgctgctgcccctgagaagcatggtcaagcaggagatgagagtgatgacagaagtggtgctgctgatttttattctttcaagctgctcaacgagttaagtgatcttctgatgctcccaaaggacatgcttcttgaaaagtccatcaggaaggaggtctgcccttctattggcattccactggtaacaaggatactctgcaacttcactcctgacgagttctgtcctgaacctgttcctggaatggttttagaggagctgaatgccgagagcttgctggagcgcttcacggagaaagatgtgatcaccacattcccctgcgtcgcggctcctgttgtctactgccccccttcaccggaggatgtcgcggagaaagtagcagacgcaggcgggaacgcggagccggacctgagggcctccatggtgcagaggagagggtacaccagcgacgacgacctggacgacctgggcaaccccctggcgtccctgtacgacaggagctctccaccctcaccctgcaacggggcctctcgttcgactacacggcaaggtggctctatgtcgaacgcgagatacgagctcctgagagaagtatatggtcggagaggcctggtttgagtaaccagtgaaagtgtggaacggaagacgaaaagagagcctcttggtcttgggttgcagatttgctgtgaggtgaacaaggggttggaaattggtcgggaaggaactgctttgcaacagacgctgaatgaacgaacagcacttggatatcctcatggcaaaatgctagagtgtttagaaccc

SEQ ID NO: 20131 - DNA, 2262 bp, Oryza sativa
  ref <308>: DATABASE ACCESSION NUMBER: AK070461
  ref <309>: DATABASE ENTRY DATE: 2001-12-06
gcttccccttcgcatttggcttcccccttccttcctcaccccaatgcctcctctccccttcttccctctcctctgccccccacgctcccacgtcactgccaggtaggccccaccatgcaccagcttccttcccccgccccctcctccgcctcctcctcgccgtcgacgacgacggcgacgaccacgtcgctcgtgtcgcgcgcccgcaccgcgatccactccgccgccgcccgcgtcctcaccgacatcaaggccgacctccgagatgcggacggatccggggcgctcagggcgccgtccccgcggccatcggcggatcggcaccccgactccatcgccgccgtcgtgggttcgccgcgagacgaggccccagatataatctcctccccagatggggatacctcaaatattgaacctgactcaacttcttcaacaaagatggcctttccttcagtttcagtggttaagcagctggttgctgccattgacaacggtaaaaatttcaagtcaatgaatgatatgaggtctaatggagaccaattactgaaagagaaggggggcttgagcttatctgttgtcaaatcacttgttcggcgtgaaaaggatgaaagatcgagttctgaatttgttggcgatgatgaaacacaatctttgatgtacacattgttcaaattagaggagcattttccccatgacaaaagtcaatgcaactcagagttgcatcactcaatatctttgcccaaggatctacacggtgcaccacctggaagtttcactcatcaaatagcagagactattggcaaaataagttctgtatacaaaatggcgttcttttggcaatccctagttctcgagttgaagaaactatggtccgatgggcaaccggtgcctcgaatgccactggatgctgctccagacttgaattgttgtttactgcatcaagagatacaagttataaattgctgcattgccaggaaaaaacggagaaaagccgccaaggaatcactggattcattgttaaaacgtgcaagtattgataactccaatcacttgtattcaaatggggactctcctgacagcgagatgtatataaaaggtagtgctggtgacaatgttcttcggcttggtgctgatcatccatcagagaacttaacgttgttggaaactggtgagctcgtatattctccaactctgcaggaaggtcccattatgacagcagagcttataaaagaaacagaagaacttgtcttaaggactggaagtgttggtgctgggtgttctcaacttctatcagatatgcaagccttcaaggccgcaaatccagggtgtgtcctggaagacttcattagatggcactctccacctgattggtctgaagattgtgcagcaagcagcgcagaagttggggagggctcatctagacgaggtcgattaagtgagagaatgcaaacaaaagaagggaacttgtggaaggaattatggggggctgcaaaaccaatacctgctgttgaacaggcgcctatatatgatgaagatttagctgtggagagcatttttgatgccttggaagttattgaaccgtcaaaactttttgagcagctactagctgtcattctttctgtatgctttgtagcagcagaattggtgctaccagcaggtagcaacttgtcgaaattattctacgactgtaaagattacatactcagcatttaccaagatgacatatcaaaagagaagctagatgagatatgcaaggtctacgagacgatggaagccatagtaactcaccctgaagaaactcttcagataatggaggcacctgatgaaaagtccccccttgagagtaaaaaccggttcaagatcaagctcaactttatcggcaaagatcgccatccactgtggaagcgtgcaccaaaggaggagaaaaaatcatcaccgaaagacgagaaaagatcgtcagaggaaaggagcacgaaaattttctcaaaccttcttgacaagaaggtttccatattctccaagaagaatgcaaaaccaacaacagaggtaccgccaccacctcccccttcatctgcccctggaccattcgatgatagtgagtggacgattttgtagatgcaaatcgtggatgtttcctttgtacaatttgtagagtggtgccacaagatgtcgggaataagctcaagctgtaaatactccatccaattcattaaccaatctgaaataaaatgaaaaaaaaagagatgaagattttacctaacc

SEQ ID NO: 20132 - DNA, 2176 bp, Oryza sativa
  ref <308>: DATABASE ACCESSION NUMBER: AK070462
  ref <309>: DATABASE ENTRY DATE: 2001-12-06
gagatggtcttcttcttccttccacaaaagcaagaggttccccggagagcgcgccgccggcgacaaggacgacgagccgcctccccgaatcgcgaccccgccctatcctcctcctcctcctctgtgcggcctgcccccctcgcgcgcacggccgggccggcgaggggttgacgtgacgcggccggtcgacctcctcctccgtctgcaaggttttgatgtcggacaacagtttacgatattccaataatatcttagctgcagtataacaccactgcccccattctgttgccctcaaatcagctccatttagagtgtttaaatgtgcttatcttctcggattctcaatgggaagacacgatatttctccactctcagaagctcgcacactgaaaacaaatgtatcctctctgtcccggtctcatctctctcacaccatcatctccccattctcctctcccgagcaaccgtctcgggtcttctccttaagctaccgctggtccactctgtcctccgttccctctatttggggcctatcccatcactctctttctccttcctctccctacttcgccgttttgccaacatgacacttgataactactccctcaacattgccatctctgctgccgctcgcgtcccatcacttgatgttggctcccagtttcatgccctttctttgaaactcagcctagcttcagattcatttgtccttaatgcccttatcaacatgtactcatcttgtaattatccagcttctgcaaggttagttcttgattctgctccacgatgggcctctgacgtagtttcttggaacacaatcattgctggatacatacgaggtggtatgcctaataaggcgttgcaatcttttcaccaaatggccaaagagcaagttaggctggacgaggtcactctgttaaatgtgctggttgcttgtgcaaggacaggcgcaatgaaggttgggagcctttgtcatgctctagttgtgctgaatgggtttgagataaattgttatattggatcctctttggttagtatgtatgcaaagtgtggtatggttgaggaagctcgcagggtttttaatagaatgcctgaaaggaatgtagtttgctggacctcaatgattgctggatgtacacaatctggtaggtttaaagaggctgttgatctgtttagggacatgcaaattgctggtgtgaaggctgatgacgctacaattgctactgttgtatcatcatgtggccagatgggagcacttgacttgggacggtatctccatgcttattgtgatggtcatggtttagggaaagagctttctgtgaaaaattcgttgattgatatgtactcgaagtgcggggatgtaaacaaggcctatcagatatttcatggattgacaaagcgggatgtgtttacttggacagtaatgataatgggctttgctatgaatggtctctgcgttgaggcactagatttgtttgcacagatggaaggagaagataaggttatgccgaatgaggtcatttttttgggtgtgctaactgcttgcagccatggaggtttagtggaacaggggtaccatcacttccatcgcatgtccaaggtctacaaccttgtgccaagaatcgaacactatggatgcatggtcgaccttttgggacgtgccaagctgttggcagaggcagagcaattcattaaagatatgcctgtcgctcctgatgtggtagtatggcggtcattgttgtttgcctgtagagcttctggacaagtggggcttgcagaatatgcagcagaaagaattgaacagttggaaccaaaaaggtgtggagggcatgttttactctctaatgtatatgctaccacattaagatgggttgatgtgaataatgtgcggacagggatgggcaatagtaggacaagtaagaagcccggttgctctttcattgaagtcgatggctgcatacatgaattctttgcgggagatgagtctcattttgagacagaagctatatgcaacactctttttgggatcaatgagctactagtggcggagtccttcctaatgtaaaagcttaggagttccatatcaaccaaatatatccatttcaaatgtacaatgctgtggttttttttatcagcttatggaatgatgaaattgaaaatttgtctttacttttgc

SEQ ID NO: 20133 - DNA, 1341 bp, Oryza sativa
  ref <308>: DATABASE ACCESSION NUMBER: AK070463
  ref <309>: DATABASE ENTRY DATE: 2001-12-06
ggcaaccaagcaaccatcgattcgatcctagcttaagccgagtgaagtagctagcaggacattgttggtagtgtgatcttctccctgttttgcaacaatggcctcacgcagtagtgccctgctcctcctcttctcggccttctgcttcctcgcccggcgagccgccgccgactacggctcctggcagagcgcccacgccacgttctacggcggcggcgatgcgtccggcacgatgggcggggcgtgtgggtatgggaacctgtacagcaccgggtacggcaccaacacggcggcgctgagcacggtgctgttcaacgacggcgcggcgtgcgggtcgtgctacgagctgcggtgcgacaacgatgggcagtggtgcctgccgggcagcgtcaccgtcaccgccaccaacctgtgcccgccgaactacgcgctccccaacgacgacggcggctggtgcaacccgccgcgcccccacttcgacatggccgagccggccttcctccagatcggcgtgtaccgcgccggcatcgtgcccgtctcctacagaagggtgccgtgcgtgaagaagggcgggatcaggttcaccatcaacgggcactcctacttcaacctgattcttgtgaccaacgtggccggcccaggcgacgtgcagtccgtgtcgatcaaggggtccagcaccgggtggcagcccatgtcccgcaactggggccagaactggcagagcaactcctacctcgacggccagagcctctccttccaggtcgccgtcagcgacggccgcaccgtcaccagcaacaacgtcgtgccggccggctggcagttcggccagaccttcgagggcggccagttctgatcgagtactcggctaattccgtttttcagttcacttttctgcagaaatgtcagtgtgagattgagattgaggtggaggaggagggaggcctctttgctatagtaaaagagaagaggctttggctattctgaggctgcttattaattagcacccgcttaggcctttgctttctcccataggtccagtagacataaataagttatcatggagttgggcattttttttttctgcattgttgtagccttggtttaaaatttggcaaggcaatttaaggattatattgtagaacagcagggaggtggtgtcttgtaacttttgttgttacattgtaaccccccgaatcaggccacatgggccggaggagtttgtgggggagcaccggagcactcttgtgcttttgggaccatgaactatgctagtttatgggtctatgtatatgatatgtttgtgatttgattatactttcttttgtcgccttatcaagtacc

SEQ ID NO: 20134 - DNA, 1169 bp, Oryza sativa
  ref <308>: DATABASE ACCESSION NUMBER: AK070464
  ref <309>: DATABASE ENTRY DATE: 2001-12-06
ggtccagcggcagctccgaccagtcccctcctttcccctcctcttgctactgtagctttccaatctctccccctccggcccctcttcaccttcgattccggcggcttgccgccggcgagggttggaggaggggtccggccacctccccctagtagtattgtgtcaggtttgtcctgtagttagggtctgtcctgtgtctcttttgccggtgaggttctatggttgccggagttattgatggcgttggcgttggtcgatggcgagctgtggatgtttcctggcagcggcgtggtctcgtcgtcgtcgttgttggtgtcttgcagctagtggaagtggaggatatgctggatttgaagcttgaggtgatggggcggtgtctggtcttgccgccgccgtggtcattgctgctgcgcatggaggtgctgttggtgctctacgagaaggtttattgcttgtggtctctttccctctgtgccggctgtggtctgggatggtggtggtgctttgtgcctcttgctagtgtccgggatgatggcgtcgtcgccggagtcggtgatgtcgttgtccctgccaccgagctggccgaagcccttctccgacctcctccctcctcgggttcccagttggtgcttctgcttcaccttctgctagtccgctctttcccaacgttgtgcgtcgttccctctagagaacagttcattcgtcaatggttgtgctcttcactgcttcagggtggctggatctggggtccttctccctcttcgtttctgggcagttgtatccacgctgggtgggccattcgggttgagctcatgctcctcagattcaaaggcgaactccgtggtgaagtttggttaagtccggtgaagcttacaccaaaatctacggctcaacagcaaatctccaatttgtgcagactctgtgaaggcgtccgaagaggattaccggttcgtcaagcggtctgcatgtcaaaggagacccaaggttctaatcgtcgtggcttcgccgcagctcctgtcgattcgcgccttctacgctgcctagtttcaggaggttgtttgtactcttagtctagttttctctgatgtgcatcttgttggttctttctgttggcgatgtacggggcttgcccccttgatctgttgctctaatatatatgtttaagtttc

SEQ ID NO: 20135 - DNA, 3030 bp, Oryza sativa
  ref <308>: DATABASE ACCESSION NUMBER: AK070465
  ref <309>: DATABASE ENTRY DATE: 2001-12-06
gagtggtggttacaccagcaaataactccaagcagcagcatcagcagcagcagcaacagttgagaggaggaggaggaggaggttagctagctcgtcagtataatccttctcgacagcaactaataaaggaacaagcaaaactatttctttaggaggcaaacattattccatatttggtgctgctgttagtgggtggtctgagctttttttatttaggcaacaaggagcaagctagcacaactgctgcttgctagagagaggagagaagaaggaggagaagaagaggagagagaggagctctgagctctgtgctctctcttgctgctgctgctggctgctgctcacttttccttttgggattgttacttattttaatcctgggatctgattttgtccccatattgggaggatcgattatctttctcccctcctctcctctcctctcatcccctctcccctatctatctgtcttgaagaagatcagctggctgctttggtgtcaatcgctgctgcagttcctgttgcctttgccctgcgccccatcaggagcacaccctcagattttgattggtagctgtgttcgtagcaataacagcctggcagagaatctttgagaagttgcagtctattagttcaacaagggaagttgaacgggatcaagtttagtctggataacaaaatattgatgtcctgctggaatcatcaatcaagtcaacgtcaaagctggttcttcatatacatatatgcttttgcagtaatctcgagcaataagtagttataattgcgagatggctacttactattcaagccctggtagcgaaagagactcgcagaccatgtactcaagagacccaggcagtgcatcctatcctatgtcatcagctctagggaacttgctctatctgaacaatccatcttctggaccttatacggagttcagcggcattctgcagcctcagcagaattgcatggagatgcctggccctgggcatgcgtcagcaatgtcacaagacccctcttcaagggagtccgacatgctttcttcgcaccagggtcaacgctctttcagccatgtcaaagatatgaaaaatgagatgttgatgcatatgatggatggagcacaaggtagtggctctgagctcatccatgatgatgcccacactggttcacagcttgagtttggtgttctgaataatcacaactcatcaagtgttccatcaatgcaaagccaagggctatctctgagcttgaacacacaaatcatggcgccttccttaccgtactggtctataaagccagacatgttaacgccgcagtcttaccatgacaaccttagaggggaagacatgcggatgaagaatttgcagtccgaagcttcacgcgcaatccggaactcaaggtatctcaaggcagcacaagaactgcttgatgaggtcgtgagtgtttggaagagcataaaacaaaaggctcagaaagagaaggttgaatcaggaaaagcagatggcaaagagactgatggagggccaaaaagtgagggtgtatcttctaatccacaagaatctggcgctaatgcagcacctgagctttccactgctgagaagcaagagcttcagaacaaaatggcaaaactgatggcaatgttggatgaggtggaccggaaatacaagcattattaccaccaaatgcaaaccgtggtttcatcgtttgatgtggtagctggaccaggatctgcgaagccttacacagcagttgctcttcagacaatctcacggcactttcggtgcctgaaggatgctatcaatgatcagatcaatgttatcaggaaaaagcttggcgaggaagagaactcatctggcaaggagggaaaattaacccgcctccggtacattgatcagcagctaaggcaacaacgtgctttccaacagtacggtatgattccacaaaacgcctggagaccacagaggggactgcctgaaaactctgttacaattcttcgcgcttggctgtttgaacacttcctccatccgtacccaaaagattccgagaagttaatgcttgctaggcagactggcctgactaggagtcagatttcgaattggttcataaatgcccgtgtccgcctttggaaaccaatgattgaagacatgtacaaagaagagattggtgatttagagcaagactccaactcttcctctgacaatgcaccaagaagtaaggataaaatggcatcttcagaagacaaggaggatctcaaaaactccagggcacggatttgcgaaacaagccaattgagcgagtcgagaaccagcattggagcaatgaatgttggcggagcgcctgttggcttccagaatgagcccaatcctgatgacagtttcatgaacctgatgctgaaggaccagcgatcgaacgaagtggatggcggcctccttctccacaacactgtcgcgcagcactcagacgagaacgcccggttcatggcctatcacttggcagagcttgggagatacggcaatggcaatgtgtcgctgacactgggcttgcagcactccagcagcaacctcgttcctaatgctcagccaggtttccctggtgttaatgaggatgacatctacaatgctactgctcctcttggtgtcaccgtcgcatcttcggactatgattcgatgaatcagatggatcaacggcaacggtttgagcattcacctcttctgcatgattttgtggcctgaagacagcagagaaacaatcaggaccatggacattaagagagagaattggggggcagcatttgtaacacctagtgggagaataacatgcctgaaagggcatgggatttgtagctttgtagttgccatttaatacagaagaggaggtatagcaggaaatgtaatataaggttagatggtgggggtgatagggtaaagaatcatatgtaaagataaaatccatcattactatatatatatacgtgtaaaagcttgtgatttgagcaccatattgtaaagtaatggttacttagggctgtcc

SEQ ID NO: 20136 - DNA, 1612 bp, Oryza sativa
  ref <308>: DATABASE ACCESSION NUMBER: AK070466
  ref <309>: DATABASE ENTRY DATE: 2001-12-06
gggagccgaacactcgctggcgggcgcgcgcgcgcgcagccggggaaccgggggggagacagggtggtggtggtgaggcgggggcgagcgcaatgcaggagccaaagcacaccgatccggcggccatgcgcggggcgcaccaccgccgggccagatctgaggtcgccttccgcctgcccgacgacctcgacctcggcggcggcggcgcgggggcgttcgacgagatcggctccgaggacgacctcttctccaccttcatggacatcgagaagatctcctccggccccgccgccgcggggggctccgaccgggaccgcgccgcggagacgtcctcgccgccgcgccccaagcaccgccacagcagctccgtcgacggctccgggttcttcgccgccgcgcggaaggacgccgccgcatcgctggcggaggtcatggaggctaagaaggccatgacccccgagcagctctccgagctcgccgccatcgaccccaagcgcgccaaaagaattctggcgaacagacaatctgcagctcggtcaaaagagagaaaagctcgttacataacagaacttgagcggaaggttcaaactcttcagactgaagccactactctctcagcacaactcacactatttcagagagacacaactgggctttctgcagaaaatgcagagctcaagatacggttgcaggccatggaacaacaggctcaactgcgagatgctctgaatgatgcactaaagcaggaactggagaggcttaagctcgctactggtgagatgacaaattccaatgagacatatagcatgggactgcaacatgtcccatacaacacccctttcttccctctcgcccagcataatgcagcccgccagaacggtggaacccagttgccaccacaattccaaccaccccgtcctaatgtgcccaatcacatgctatcccatccaaacggtttgcaagatatcatgcagcaagaccctcttggccggcttcagggtttggacatcagcaaagggcctctagttgtgaaatcagagagcagctcgatctctgcaagtgaaagcagcagcaccttctaaccaggcctacccaccgagcccacagttccattagattcgtttgttcatagcctgacatcctcgcgctgctccctgttctgtaagcttattatttattcaattcgttcgatttagttgaaattgttcgtaattgcagtggctgatctattcccttctgtggacatgattcctgtacccctcacatccatttgttttgggttcatctcctgtgtgctgtgtttgggattatcagggcaccaggactggctttctccgagaatactgtgttctttgtggtcgtgtggacttgttcaccatggattcaattcaaccttttgaaaagatgcatgtattctctgatttttttttctcagtcatgtacatgtcactgttatgctagtttgattgatgtgtactgtggaatttgtggataacaaaaggagttaagattgggattgctgtggaaccatctgtatcgtatattcgtatgtgactaatgttgggaaattgttctattcttgttcaccatatgcatgtggggtaacttttcc

SEQ ID NO: 20137 - DNA, 859 bp, Oryza sativa
  ref <308>: DATABASE ACCESSION NUMBER: AK070467
  ref <309>: DATABASE ENTRY DATE: 2001-12-06
gatctcaaagcaagcaagacgtccatgaagatgaagcgcaccatggctgctacttccatcctgttcttcttcctcgccggcctcgccgccgcccacggcagcacagcggacgacaccacgaccaccaccaccaacaccatacgcctcccgatcgacggagcagtggcggcgcgaaggaggacgaggccgtggaagtgctgcgacaacatcgtgaggctgccggagaggatcaacccgccgttctggcagtgcgacgacgagctggagcccgggcagtgcttccgccagtgcgaggcgtgccgggatccgccggggcggccgttccccggccggccgctcatctgcgacgacgtcttctggggcgacgacccgggcacctcgtgcgcgccgtcgtcggagtggccgtggggcccgtgctgcgacatcgccgtctgcaccaagtcgctccctcccatctgccactgctccgacgaggtggagtcgtgcgccgccgcgtgcgggcagtgcgagatggtggactcgtggtcgtggcgccctctcttcgtctgccgtgactccttcaccggggacccaggccccaggtgcacacctgaaatgcacaactaagaagagaactacttctctgtataacaagcagagaggctcatcgtacgtattctctgctagcttgaacatgtctctgtgttcatgtacgtgttggtatatgcatagcttgaacatgtctctttgtgttcatatacgtgttggtatgtatgcatagcttgaacatgtctctgtgttggtatgccaacatgcatcttgtctttgtgatgatgcataaataaatgaataaaagataaataagagatgagatctaccc

SEQ ID NO: 20138 - DNA, 1765 bp, Oryza sativa
  ref <308>: DATABASE ACCESSION NUMBER: AK099140
  ref <309>: DATABASE ENTRY DATE: 2002-08-28
cacctcacctcgcctcgcctcttctcgcggccaacgagagagggagagggagagctaggaccaccgccactgcctcgggaagtaggtggctcccctgctttccctcctctcctccgccgtcgccgaggcagccagccaagtcgtcccagcaggtggtaggctactagtccgggtggccggcagtgagcaggaggaatcatctctggcgttcttgtctccgaggaactttgattctttctgggaggggatttggtgtgctgctgctgctccagatgcttcccaccaacaggaacaggccccagcagaggcctgccagatcttggtatttcatctcagacatggacttctccgatccgaagcgcaagccgcggtacctcagtaagatcctcatggtggcgctcctcaccgccatgtgcgtcgtcatgctcacacagccgccctgccataggaggactcccagtgtgttctccatccatgaacccggagtcacgcatgttctagtgacgggcggcgctggatatatcggttcgcacgctgcgcttcggctgctgaaagattccttcagagtcaccatagtggataatctttcaagaggaaatatgggggcaatcaaggttcttcagaacttgttttcagagcctgggcggttgcagttcatctatgctgatttaggcgatccaaaagctgttaatagaatatttgcagaaaatgcttttgatgctgtcatgcactttgctgctgtcgcttatgttggtgagagcacacttgagcctttggggtactatcataacatcacctcaaacactttagttgtgctagaggctatggcagcacacaatgtgagaaccctgatctactctagcacatgtgccacctatggagaacccgagaagatgcctatcaccgaaggaactccccagtttccgatcaacccatatggtaaagccaagaagatggcagaggacatcatcttggatttttccaaatccaagaaggcagacatggctgtgatgattctaagatacttcaacgtcattggttctgaccctgaaggaaggcttggcgaggctccaaaacctgaattacgggagcatggccgtatatctggtgcatgctttgatgctgcactggggataattcctggtttgaaggttaaaggtactgactatgaaacacctgacggtacttgtgtaagagattacatcgatgtcactgacctcgttgacgcccatgtgaaggcgctcaacaaggcggaaaggggcaaagttggcatatacaatgttggcacaggcaaaggtaggtcagtgaaagaatttgtcgaagcttgcaagaaggcaacaggagttgacatcaaggtcgactacttccctcgtcgacccggtgactatgccgaagtgtacagcgatcccgcaaagatcaacagcgagctgaactggactgctcaacataccgatctcctggagagcctcagggttgcctggacatggcagaagaagcaccggagcggctacggaccccctcaggccatggttttgtgaagagaatttaccctgtagcatctattggctgaaaacttaaaaacttaggtggatatattcttaggaatgttcatcatcaagggctttcaattgctcactcacagaagttatatgtaatatagcgcttatggtcattcgttcaattcttgagattcatattatgggaggattttagaagattgtgatattgttgatgtattcagtatacaataaaaatccaacaagcc

SEQ ID NO: 20139 - DNA, 2146 bp, Oryza sativa
  ref <308>: DATABASE ACCESSION NUMBER: AK070468
  ref <309>: DATABASE ENTRY DATE: 2001-12-06
gatctccctccctccctccctcattattgattgattgattcgcagattcgccgctgccaccgcatcccgcccacccaccgcgcgccaccgcctccgccgccgacgagcccccgcggccaccgccaccgccacctcatcttctctcccaccaccgctccacagccgccctcccttacatggaagtcgacgtctccatcgccacgcccgcaccgcaggaatcttagctgattggtgctttggactgcaggtctggacacgttgtccgtttcctgcttgtgcagacgtaggtttggagtctttctgagtgttaaggtggctttcctttttgtccttccatggttgaaatttgtatgaacaaccttgactttctcgaagatctgtgttggtcgataagatgaatcgaagaagaacaatgctattgcttatctgtctctgtgcaacattttgcctcatgactcagttaggagctgcaaatgtagtgctgatggggacaaatctgactttgtcgtttgatgatgttgaggcaagttttgctccaggagtgaaaggttcaggttttgaaggcgttgtttatactgctgaacctttggacgcctgcagtccgttaacaagtaaagcagaaaagggtccaccatctccatttgcactgatcataagaggcgggtgcacatttgatgaaaaagtaaaaaatgcacaggatgctggattcaaagctgcaatagtatacgacaatgaaaatagcggggttctgatttcaatggctggaagctcaggtggtattcacatttatgcggtgttcatctcgaaggcctcaggggaggtgttgaagaaattttcaggccatactgatgtagaggtgtggatactacctgcgtttgagaactcagcctggtcaatcatggcaatttcattcatatctctgcttgccatgtctgcggttctagctacttgtttctttgtgagaagacatcatataaggcgggaccggcctagaattccagaagcccgagaattccatggaatgagcagtcaattagtcaaggcaatgccaagccttatcttcacgaaggtgcaagaggacaactgcacatcatcaatgtgtgccatttgcttggaagactacaatgtcggagaaaaattaagagtgttgccttgccgtcacaagttccatgcagcttgtgtggacctttggctcacaacttggagaactttttgccctgtatgcaaacgtgatgcaagtactggaataccagatcctccagcctcagagactacaccattgctttcttctgcagttcgtttgccttctcagtcatcttcgttccggtcaagcgtggcagcatcgcctccaagaccaataagtcgacgaccttcatcacagtccatatctcggatttatgctgcttctggtacccccaactctcctaaccccataaggtctttcacaaactcaactgccatgagcataagtagaagcaatgtggacttatcaaacatgtcttcccgccctcgcgcctcacacctcgcctccgcacattctttggttggcagtcacttgtctccaccaatcaatataagctactatctcggttcatccagccagcatcggtcatacctaaggcgctgtggggaatcagggcctagcttgtctaccatggcccctcagtcgccgcaacagtcccagttacgtcatggcggcgaatccgacttaaatctagcaggagcatcctcaggccagtctttccggcaatcctacctgagacactgtgctgattcagaggtaaatctagcaggagcatcctcaggccagtctttccggcaatcctatctgagacactgtgctgattcagatgcaagcttatctgccatggcatcagctcaatccttgccaggatgctgatttctctgggatcagatcagcttctgtctgtactaagacctggcgtgacttgtgtatacatttgaggcatgtactataggctattggttgagagaaaatggtcgtatttgtttgtgtttctcctgctgccctgcccttttggttgtagtgattgttagcgctctatttgtttcaccctagagtgtatagtacaattgtacagcaactttcttttaaactaagcaatatcatccgcgcgttgcccgt

SEQ ID NO: 20140 - DNA, 2233 bp, Oryza sativa
  ref <308>: DATABASE ACCESSION NUMBER: AK070469
  ref <309>: DATABASE ENTRY DATE: 2001-12-06
gataggtgggtgacagagagagagagatctctccattcttcccaacccagcagttctagctagctagctatctagttcatcatccccatccaccgagctcgatatccctggccatggccatctccatggcctctcccttgtcttcttggccttgggcattcttaggctcatacaagtatttgctgtacgggccggtggtggggaaggtggtgcaggagtggagggagcaagggaggttgccgctggggacgtcgtggtgcctccacctcatcctcctcctcgcgctccggtcgctcacctaccagctatggttctcctacggcaacatgctcttcttcacccgccgccgccgcgtcgtcgacgacggcgtcgacttccgccagatcgacaccgagtgggactgggataacatggtgatcatgcaaaccctaatcgcggcggtgctggtcaccagccgtgtcttccctgccacgtcggatctctcggcgtgggacctacgtgggtgggccatcgctgtggtgctgcacgtggccgtttcagagccggccttctactgggcccaccgggccctccatctgggcccactcttcagccggtaccactccttgcaccactccttccaagccacccaagctctcacagctgggttcgtgacgccattggagagcctgatcctgacgctggtggcgtgggccccacttgcaggggccttcatggcgggacacggcgccgtgagcctggtctatggacacatcctcctcttcgactacctccggtccatggggtacagcaacgtcgaggtcatctcacacaagaccttccaggattttccctttctcagatacctcatctacacaccatcgtatcttagcctacaccacagggagaaggactccaatttctgcctgttcatgcctctctttgatgccctgggagggaccctcaaccccaagtcttggcagcttcagaaggaggttgacctaggaaagaaccatcgggtgccggactttgtgttcctggtgcacgtggtggacgtggtgtcgtcgatgcacgtgccattcgcgttccgagcgtgcagctcgctgccgttcgcgacgcacctcgtccttctcccgctctggcccatcgccttcggcttcatgctcctccagtggttctgctccaagaccttcactgtcagcttctataagctccgcggcttcctccaccagacctggagcgtgccccgctacggcttccagtatttcatcccttcggcgaagaagggcatcaatgagatgatcgagctcgcgatcctgagggcggacaagatgggcgtcaaagtgctcagccttgctgcactcaacaagaatgaggcgctcaatgggggtggcacgctgttcgtccgcaagcatcccgacctgcgggtgagggtggtgcacggcaacaccctgacggcggcggtgatcctcaacgagatccccggcgacgtcgcggaggtgttcctcaccggtgcgacgtcgaagctcggcagagccatcgctctctacctctgtaggaagaagatcagagtcttgatgctgacactgtcaacggagaggttcatgaatattcagagggaggcccctgcggagttccagcagtatctggtccaggtcaccaagtaccaggctgcacagaattgcaagacgtggatcgtggggaagtggctgtcgccgagggagcagcggtgggcgccggcggggacgcacttccaccagttcgtggtgccgccgatcatcgggttccggcgggactgcacgtacgggaagctcgccgcgatgaggctgccggaggacgtggaggggctggggacgtgcgagtacaccatgggccgcggcgtcgtgcacgcgtgccacgccggcggcgtcgtccacttcctggaggggtgggaccaccacgaggtcggcgccatcgacgtcgaccggatcgacgccgtctggaacgccgcgctcaggcacggcctcacgccggcgtgaacgccggcgacggcgacggcggctagtagtaactacgtacagcacggggacgccgaataactttcgtgttgtgcgtgtgtgtcgatcgattgtacgttgcattgttcgctcgcccggctagcttaattaattatcgggcgtgcttgtgttgtgtgttgatagctagcgtcgtacgtaagaataccgcagaaatgacaagaaagaatggatgattcctcgtacactttgggtgattg

SEQ ID NO: 20141 - DNA, 4155 bp, Oryza sativa
  ref <308>: DATABASE ACCESSION NUMBER: AK070470
  ref <309>: DATABASE ENTRY DATE: 2001-12-06
ggtgggagttttttttttcctcgcgtgtaatttttggcggtgttggatcgggttatgggggatagctgggaggttagcgaggtttggggtgtgtggttgggatgggagattggttgatcccgtcgattaggggtgtcccgcggcgagatttggtcccgttgcgcatttctgtttttctttttttgaaatgacctgattaattcaatccagttcgtagggtgtagctctctgtctggatcagattaggctttagtttatccatgtgtgattgcttcctagatttgaactggtcgggagtgtaccatgtgaatactgctttcgtatgaactgtgcggttactaacttccattcctaattaatatgactaatttttagggaagaaatgacttggtacctatgctagtatttttttcccctcatggataatgcttgataacgactttgagaagggcaaataaattcctaaaaaatgtttagcgttgctgttttttttttctttagtgttttctcacagttcaatatttactcatctacaccattatttgatccaccttgcaggttaagtcagcatagctaataactccgtctactgttgtgacctctgtggtttgctttgtgtgtttggcttcccaatcatctgcataaaccaggaagtgggtttgctttggaaatatttggggtcaaactagtagttggcacattgtgatctgatcatgtttatgcacagtttgtactgctaagcacaattggagttctgactatacagatgctgtgcgcatgcttgctggcaatatgaacaacgataactatattgacttgagttcagacagtgatatagattttgacttcgactcagatgattcagttggtggtttggaccaggagctagcttcatcttcttctaggcctactgaaaatataaatggtcaatataggactctgccaccttcttttacaaatggtagacatgttgataacgctcgtcatgcgttaggttcaggtgacagagcttatccgcattcaagttcttatagggggtcaccaaatgattctgcaagggcaactcctgcttccaacagaactgatattgtagtcaagaagcacaatggttttgcatcggaagaaaatgataatggcaagaggattcttccctcatccttttcaaatggccgcacaacaaatgctatgcatccagtggttgcaagtgagacacgcaaattcccaccatcttttaccaatggaaattcacaaagattggctgaaaataggatgggaaaaaatgttgccaatggaattggggagccttcatcgtcaaggtttccgagccgaagttcttttggtactgacaacaagagggtcatcacagacagtgacaatgaggatgtctatgtatatggaagctccagttcacatagggttcttcctccatcttttggtcgcaatagttctgctaatcacagcgaatttgctaatggcattgatatgcaaggtcgtctgaacctggaaaataggattatagattctgacgagagagcggtgtaccaggaagcactacagaatattatccaggataaaagggaagatgatctgcctgagggtgttctgtcagtacctctgcttaggcaccagaaaatggcattggcttggatggtttcgaaggagaatagctctcattgtgcaggtggaattcttgcagatgatcagggtcttggcaaaacagtgtctacaattgcccttatacagaaacagaggatccagcagtctaagtttatgtctgttgattcagatcgtttaaaagctgaagcgctaaaccttgatgatgacgatgaggcagcgcctgttgcggataataagggggagcagactaagaatgatgaacccaggaaggatctaggagctggttcgtcatcaacagcagctggtactggtgacgttgaaacatgtgctagcctaatgaatactgctccagataagacggttgaaagaaatgttgaacgtaagaagaagagtaaggcaagcacatcatctactatgcaatccatgacaaggcctgctgcaggtactctagtggtgtgcccagctagtgttcttaagcaatgggcgaacgaattgactgacaaggttggtgaaagtgctaaattgtctgttttggtctatcatggtggctcaaggaccaaagatccaaatgagttggcaaaatatgatgttgttatcactacatacacaattgtggccaatgaagtgcctaaacagaatgccgatgatgacactgatcagaagaatggtgaagaatcttctgctggtaataagagaaaacaaccacccaaagcacagagcaagtcgaagaaaaagaaaaagaaacttaaggattcagacatttaccttgccagtggcccagttgcaagagtgcgatggtttagggttgtccttgatgaagctcagacaataaagaactttcgaactcaagtggctaaagcctgttgtggattacgtgcaaaaagaagatggtgcttatcaggaacacctatacaaaatgcaattgatgagctctacagctatttccatttcttgaaatacgatccatattctacttataattcattttgtacaatgataaagcacccgattgctagaaatgcagttcatgggtataagaaacttcagactgtgttgaggatagttctcctgcgccgcacaaaagaaactctgattgatggtgagccaatcataaagctacctccaaagacaattaatctggataaagtagattttacaaaagaggagcgagctttctatttgacactggaagaacgctcgcggcaacagttcaaggcatacgctgctgctggtacactcaaacagaactatgccaacattcttctaatgctgttgcgccttaggcaggcctgcgatcatcctcttcttgtgaaggggcatcagtcagagtataaaggcgatggttctatagaaatggcaaagcaacttcctaaagaaatgataataaatttgcttgcaaagctggaagttggagagttttgttctgtatgcagtgatgtacctgaggatgccgtcgtgacgatgtgtggccatgtcttctgctatcaatgtatatacgagcggataactactgatgagaatatgtgtcccttccctaattgtggaaacacattaagtaccgattcagtattttcgtcaggagcgttaaggatttgcatgtctggtgtatccagttctcatgcatcagggagttcatcattagatgacgagtcatcttctattagtcaaactagttacatatcctcaaagatacaggcggcaatcgatatactgaattcgatcattaacacctatgcccttaccgacagtgataccgtcgaatcaaatcctagccgagtggccccagtgaaagccattgtgttctcccagtggactggcatgctggatttgctggagctttcattgaatagcaatctcatacagtacaggagactagatggaacaatgtccctcaattcaagagataaagcagtgaaagattttaacacagacccagaggtcagggttatgatcatgtcactgaaagcaggtaatcttggtctcaatatggttgctgcttgccatgtaattctccttgatctttggtggaatccttatgctgaggaccaggcaattgatagagcacacagaattggtcagactcgtcctgttactgtctcccgtttaaccattaaagatacggtggaagatcgcattttagctctgcaggaggaaaagagagccatggttagctctgcttttggcgaagacaaatcgggtggccacgcgactcggctcaccgtggatgatctgaagtatctatttaggttttgattggaagcacccgtgatctctgcgatacaatgacattgtatagtagcctgtgatctttgcctagatgcaactccaacagctgtgtaccgctgctgagtattttggtgcgaggtactgcggatttgtgtccttccatggctcgcagcagctccagttttgtcatgctctgatttgctagacgaaatgtagtaggcttagtcgctagcctgtgttgaatatttgaccccagcttgtaggagaattctgccattgctccctgttttatcaagagatccatctggtggt

SEQ ID NO: 20142 - DNA, 1197 bp, Oryza sativa
  ref <308>: DATABASE ACCESSION NUMBER: AK070471
  ref <309>: DATABASE ENTRY DATE: 2001-12-06
gcgtattctggaagccaccaccatacacgcctcgcccgaggagataagttttttttttttttcaaaaaaattcctcctctgcggcctcccctcaccgccgtccccgtcccgaccaccggaggccggcccgctccggcgagctgccgatacgcatggccgtcctcctccgcaccaccacctccgctacgaccgccacgagcggcggctcctcctcggcgacggcgctcctcgccaccacgttccgacgcggcggcaggcgcctcctcctcctccccgcgacacgcggctcggcgccgcgccgcgcggccttactcacggctcgcgcctcggcggagccgctggaggtctgcgccaaggcctccctcaccgtccccgaccgcctcggcgactgtcctttcacacagagagtgttgttgacaatagaggagaagcatcttccgtatgatataaaactagttgatctcgctaacaaacctgattggtttctgaaaattagcccagaaggtaaggtgcctattgtcaagcttgaggaacaatgggttgctgattctgatgttattacacaagcgatagaagagaagtaccctgaaccatccttggcaactcctccagaaaaggcttcagtcgggtcaaaaatattttccacctttattggtttccttaaaagcaaagatccgaatgatggaacagaacaggcactgcttagtgagctgacttcattcgatagctatctaaaagacaatggtccatttattaacggtgaaacaatatctgctgctgatctctctcttgcccccaaactatatcacatggagatagctctaggtcactataagaattggtctgttccagattcactttcacatgtgaaaaaatatatgaagactatcttttcaatggattcatttgtcaagactatagctctgcaagaggatgtcattgctggatggcgcccaaaggtcatgggttaaattgtagctgtaaaagtaaggcactctgataaactataaactatacatcatactttcttcagtaaagctagaattataccacacacaaacaattttcgtatgattaccacttgttgctgctgaaatatctgggcatttcttttgttgctaatagtttatcggtgagtaagacattccagaaatgatgatgattatgataagatgtaaggttgatacttttctggtc

SEQ ID NO: 20143 - DNA, 2028 bp, Oryza sativa
  ref <308>: DATABASE ACCESSION NUMBER: AK070472
  ref <309>: DATABASE ENTRY DATE: 2001-12-06
ggccttgcctggcggttggcgcgtcgcatctacccctgctactagtagtaccacttctcgcggcgagaaaatgccgcaatatatttgcttccaccgaggcgcagagcggaggagagtgacgagctgacgcacgcggcgcggcggaccagctcaatttgcctgccgctcctcgtcttccggtggggcggaggagggggacgccgggcgggcgggcgctcgcattccggagcggggagcgcgagctcgatcgggcggggatatggcggtggggggagccgggagctccagatccgtggcgccgtgctgctgctgcgccgtgctgctcgcggcggcgctgctcttctccgcgccggccaccacagaggcttatgatgcgctggatccaaatggaaacatcacgataaaatgggacgttatgtcgtggactcctgatggctatgttgctgtggtcacgatgttcaactatcaacaattccggcacatccaggcacctgggtggcagctggggtggacatgggcaaagaaggaggtcatttggtcgatggttggagcacagaccactgagcagggcgattgctcaaagttcaagggtggcacgccccactgctgcaagaaggatcccacagttgttgatctgcttccgggcaccccatacaacatgcaaatcgctaattgctgcaaagctggagttataaatacatttaaccaggacccatcaaatgctgcttcttccttccagatcagtgtaggtcttgctgggactaccaacaagacagttaagttgcctaagaacttcactcttaaggccccaggtcctgggtacacgtgcgggcgtgctatgattgtcaggcctactaagtttttcaccggggatgggcgcagagcaacccaagctctaatgacatggaatgtgacctgcacatactcccaatttcttgctcagaagactccttcctgctgtgtatctctctcatcattttataatgacacaattgtgaactgcccaacatgctcttgtggctgccaaaacaatgggacaagtcctggaagctgtgtaaatgagaattcaccttatttacaatctgccattgatggccctggcaaatggaccggtcagcctcttgtccaatgtacttctcacatgtgcccgatcagaatccactggcatgtgaaactcaactataaggaatattggagagtgaagatcacgattacgaacttcaactaccgcatgaattacacacagtggaatttggtcgctcaacatcctaacttcaataatatcacccagctgtttagcttcaactacaagccacttactccatatggaagcaagataaatgatactgcgatgttctggggagttaagttctataacgatttgctcatgcaagctggtccacttggagatgcacagtcagaacttcttctgcgtaaggattccaaggacttcacctttgacaagggatgggccttcccacaccgcgtgtacttcaatggtgataattgtgtcatgccacctccggatgcatatccatggttgcctaatgcaagtcctctgacaaaacaaccattgacactctcggttttggtattttcgattgtgttggctactttgctggcttatgcatgatgagtgaaaccaagaaattcggtgagcttcaagttgtcaggttccatggtgtgcactgcaacagatcatttgttcattcagttccacggttgcatagaagagaagatgtcacgctgaggaaagctgatatgtgtgtgtgtgttgtatgttaaaagaaggccaaaatgtatttcttttttggtatatatactggccacagcattttggtgaacttagttactgcaaactagataattacagttgcaccttttgtatgttatagcaaccagaaattcaattgaattatatgacttcccttcttgtagtacatgtatagactccgtaataatgttctgtatgattttgtgaacagaaaggatgctgttgattgagatcatttagttttgtttcttgtt

SEQ ID NO: 20144 - DNA, 1827 bp, Oryza sativa
  ref <308>: DATABASE ACCESSION NUMBER: AK070473
  ref <309>: DATABASE ENTRY DATE: 2001-12-06
gagtcgccaccctcgcggcctcgccgcgtgctcctttactgctctctgctcgcgcaggagggcccacctttcagcctccgtcacgtcaccggctccgcctcccgccgattccttcctccccgtggaagcaacccgcagcggcggcgacggcagcggcgtcggcggcggggacgaggtggggagtcgagaggaagagatggagtacaggagagtgaaggaccaggagagctatgatgttgtatctcagaaagacatagaaagccctggtgagaggtctctttctagcacttcagcaacctccagtcttagcacagcaggagcttcaaagggcaagaatagttggaagttaaagtccattgttacacttgcattgacattactaacaagttctcaggcaatactaattgtgtggtcgaaaagagctggaaaatatgaatatagtgtcactacggcaaatttttcggtggaagctttaaaatgtctgttatctctcatagccctgtacagaacatggaacagtcagggtgttacagaagataataggttaagtacatcgtttgatgaagttagtgtttatcctattcctgccatactttacatggtaaagaatttactgcagtattacatctttgcatatgtggatgcaccagcttatcaaatcctgaagaacctgaacattattagcacgggtgtgttataccgcatcattctaaagaaaaagttaagtgaaattcagtgggctgcatttattcttttatgtgccggttgcactacagcccagctgaacccctcgtcagatcatgttctgcaaacccctattcaaggttgggtgatggcaattgtgatggctcttctaagtggttttgcgggggtatacacagaagcaatcatcaagaaacgtccttcaagaaacatcaatgtgcagaatttttggctgtacatttttggaatgctcttcaatttagttgcaatttgtgttcaggacttcgatgctgtcatgaataaaggtttttttcatggctactcattcattactgttttgatgattcttaatcatgcactcagtggcattgctgtatcaatggtgatgaaatatgctgacaatattgtcaaggtgtactcaacttcagttgccatgcttcttacagcagttgtatctgtctttttgtttggcttccatctatcccttgctttcttcctcggatctacggttgtttctgtctccgtatatctgcattcagttgggaaaccacaaccgcagaaatgagctttactttcatggcttcatcttttgaagtatcggcaagtggcagcatagaatgatttttgggtggcaccgttggtactactgcagaatgccggagaagagattcattcttgaccatctgactactcttgagtcttgagccaacttcttgatggatttcggactttacctccaagccgagccaaccagccgacgatcaatgcagatctactgaagttttgaccgcttgactgatgatttgaagctctcttttgcccgtccccagatgcttgccatttatttcttactcctaattcatttcagcctactatagcgaagagcgtatgtgctaccacgtagcaaacattttctgacaaacaagtatgtcatatcattatctgtagttctttggagcattatctgtagtttgtacaaatacgaaaggatgattcacccaacttgcggcagcttctctggccactgttcttgtcattatttgagcccaaaggggtgggattcagaaacatcatcacagtggtgtggaccggcccatagggtgaattcatctatattaatttttg

SEQ ID NO: 20145 - DNA, 1068 bp, Oryza sativa
  ref <308>: DATABASE ACCESSION NUMBER: AK070474
  ref <309>: DATABASE ENTRY DATE: 2001-12-06
ggctttgcattgctacgcttccgctcccgtgccgtgccatggcgccgctcgtgtcgctctcgctccccctcccgtgcgcggtgcccgcctcgtcgctccctccgcgcgcggagccagacgcctcgtcgtccttccacccgcccgcgtcgtcttcgtcgtcgccgcgcggcggccggcttgcgctggccgcggcgcaaccgggctccgggcgccgttgggtagggaggtggagggcgggcgtgtcgtccttctccttcctggcgccgttcttcgcggggaacaaggagaaggagaaccgcgagaaggcggagaggctcaaggaagagctcctcgccaccatcaggccgctcgaccgcggcgtcgacgccacggcggaggacaaggagcgcgtcgagaagattgttcagcaactggaggaggtgaaccaagtgaaggagccactcaagtctgatctcctcaacggcaaatgggagcttctctacaccacctcagaatccatactgcaaccacagaggccaaagtttctgaggccgtttgggacgatttaccaagcaatcaatactgacactttaagagcccaaaatatggagacgtggccctattttaatcaggttactgccaacttggtacctctcaattctagaagagtggcagttcggtttgattacttcaaaatatttaatttgatttcaatcaaagcacctggcagtggtaaaggtgaactagaaattacatatcttgatgaagagctcagggcctcaagaggcgataaggggaatttgttcatactgaaaatggttgacccaacatacagagttccattgtaataatttctaaatgctgatgtgcactacagctactatggcaattaggtcccagctgtcccaagtattctttttcagtcctgatgtattctaagacatgtaaatatgaatatttgagcatagttcttataggatacaatacatcaaaaactgaatcaactcgatatgtatagagcaatgggatggtcagttcattcatccaaattctataatgaatatctgcataactaggcatagcagaacc

SEQ ID NO: 20146 - DNA, 2745 bp, Oryza sativa
  ref <308>: DATABASE ACCESSION NUMBER: AK070475
  ref <309>: DATABASE ENTRY DATE: 2001-12-06
ggacgagaatacgagagacgagcccctccttctcgtgtccggcgaggacaccggaggcggaggagtaggcagccggacggagcggcggcggcggcggcggcggactcgagtttctccggaggcaatgacgcgcgagaaaagctcaccgtattgctattgactattgaaagcctttacgcaagcagagccggcaatgcgtcggcactacgccgtccttctccgccgcgccgcctccctgccgtctctccccctcgtggcgtccctccacgcggcggcgctccgccgaggcgccgtcctggccccgtccctcatccacgcctactccgcatgcggcgacctcgcctccgcgcgcaatctgttcgacgaattgcccccgcgggaccggacgctctccgcgcgcacggcgctggccagcgcgatgtccgctcacggccggtgccgggaggtcctcgacctcttcgccggccttgcggaggaggagatggacgacaaggcggtgaccgcggttctcgccgcgtgcgcgagggccgggatggtggacgaagggaggagggtgttcgcgacggtgaggaggaggccggctctgcagcactacacgtgcatggtggagatgctggggcgcgccggcgaggtcgaggaggcggagcgcctggtggcgcggatgggggcgcgcccggacagggtgatctgcgccgtgctcctcgccgcgtgccgggtgcacggccgcgtcgatgtggctgggagagtgcacgggttgatgcgccggtatggcattgcctgatttttgcacttgctgcttgaagctcacaaatcctgaaaagttgaagctgattggaaactgatgggaaggtggaaatgtttgttcttcaagtgcattattctgtaattctgcaatgcaatgcagcagaagccccaacggtgcaaccgtgcaatcattgtggtttgaggcttcttttttaatggaggagtttattttcagctcttccgggaattagatcattccttatgaaattcagaaggggctttgcatgatgggtggtgggcattgcatgaatggatgaaccctcgagatcaacttatgtctatgctctcactgaactgtttgatgcgaagagaaatggatggaaaggtggtaaccattgttctggcagtttagagggactgtgtgagtgccaagcaggtgaaaatgtggattctattgaaggctatgtcagtttcatactgtcatgtgtagcaggggcaacattatgacagtgtatgaaccaaatgagtgtcagtcatttccttgctggccttgtatggttgcatactttgacatctaccacactgaaatgccagtcagttttctcattttcagattgtgcctggtcggcttctttcacattgattaatggatccagcagtgcagcacacaaagcagtagctggtaagttgtcaagttaacaaactgaactgtcaaacttgagtaattgctgaagagcaggtttgtcaaaatttctgcaaaactgtcaaacttggatagcaaggcaggaaaagtctattaggactttgtcaagtatgatgtcgctttgctgaaatttattcagaatcaagttatgaatctccattgttctggcaaatctcacgttatgggattgtacctgctgctatgcaatgggtagttagttaattggagcttgcaatctcctgtgcctacagccttgtgaggggctaccatgagtgaattatgcgttcgcaaaaaaataccatgaatgaattatcagttgtgaacttgtgaatttgttttatctcgagttggtgtgaataacttgtctggcatttgattggagctcttgggatccttcagataacttggatatggctgtaaaagaataaagagttgggcctacgagttcaagactctgatagactgatgctggcaacctgattgtgcaaactggcaggaaaaagaggtaagacaaatacaggagtgccatctccatcttaaccttttcttgagtcttgatgaattgatgaagaaaaagagccataattttcacggctgccagagcaactctttcctgtgccagacattgctatgctgaattgctgatgctgacacttgtagatgactagagaaacatcagcaacacatggttggcggccaagaaaccctgcactgcaaagcagcttcctgcccaggaaatatactgaagatgaacttgactgcaatggcgctttctgccgaaaaatttgcaccgcgcatttttccttccacaggttacaggtacagtttctctcgagaatgtaccagattcagatcccccgtgtcacagtgagtggcgtttcctcaacggttgtttgccaagaacaaacacagccgttgctttcgatgttgtgatggatctggagtgaaagtctgcatgattccaaactgaagttgccgtgcagaagtatgttagtgttgcttgcagtcttgttttgtcattcgtgctaatctgaatgagtacttccagcaagtgtgtttctcgtgtctgtcttttgctgctaatggatatgtcttgtgttctgctaaccacacttgaattcagtttgtttgtttggcctggaggtcttcaaatttcagccagttttttcttctctggatcactatttcgcgttatatacagactgattaatttctttcagttgtaacttggtctctcttttttcccctgatgtaaagttagtgcatgatgagaaatgtgattaccttgtagttggacc

SEQ ID NO: 20147 - DNA, 2458 bp, Oryza sativa
  ref <308>: DATABASE ACCESSION NUMBER: AK070476
  ref <309>: DATABASE ENTRY DATE: 2001-12-06
gtcccgggctcccggcagcctggggtttctctccccgtttctgtttctcggtgaggtgaagttttccgtctcagcacactgccagttcttcttcttgttcttcctactcgtggcgccgcggcgtcctcacggatcgcaaggtcgggaattatctggggttctcggggtttgtggctcctttccggtgaaaggattcttttttagcgggagatcggttgagtcggtttcttctgtagatcttatcgttgagatttcgttgtttatgttaggcgagtcggggtgagacttatccgcgttcctccctgcgatgaaacacgcgattttggattgtcgttacgtttagggattgtggttttaaggctgttcttccgttgtaaatgttggttgcgccatcctataaaagaaagggactcctgtcgagaaacacaccatgcttcttctgtcctgaaggtttggaaaggcacattctgaggagatttttctgtcctacatcgtagcccttgaatgcaatggaagggggtgcaactctagctgataaggctgaatttaaggaatgtctgcggctgacctggagccagccttacattcttcagcttgttttctctgccggcatcggtggtcttcttttcggatatgatacaggtgtcatatctggagcacttctgtatattcgagatgattttactgcggtcgaaaagagcactgtacttagggaaacgatagtgagtatggctgtagctggagccatagttggagcaggatttggtggctggatgaacgacaagtttggaaggaagccttccatcttgatcgccgattccctgttcctcgcaggtgccttgatcatggcccttgccccaacaccgtttgtcatcattattgggaggatctttgttggtcttggggttggaatggcttccatgacagcacctttgtacatttctgaagcctctccagctagaatcagaggtgcacttgtgagcacaaatggacttcttattaccggagggcagttcatggcatacctcattaatctggccttcactaaggtaaagggaacatggaggtggatgcttggcattgcaggtcttcctgcttttattcagttcatattgatgtgtatgctacctgaatcaccaaggtggctatacagacaggataggaaagaggaggctgaagccatattaaggaagatttaccccgcggctgaggttgaagaagagatcgattcgatgcgccgatcaattgaacatgagaaacaactggagggctccatcggcgagcagagtctggttggcaagctgacgaaggcactgagcagcaaggtcgtccgccgtgggctcatggccggcgtcatcgcgcaggtcgcccagcagttcgtcggcatcaacaccgtcatgtactacagcccgacgatcgtccagctggccggcttcgcgtcgaacaacacggccatggcgctgtccctcatcacctcgggcctcaacgccatcgggtccatcgtcagcatgttcttcgtggacagggccggccgccgtcgcctgatgatcatcagcctcgtcggcatcgtcctgtggctcgccgtgctcggcggcacgttcctcggcgccgcgcaccacgcgccgccggtcagcgacctggagacgcgggtgttcgccaaccagacgtgcccggagtacagcccgagcgcccgctggaactgcatgaactgcctcaaggcccagtccacctgcggcttctgcgcccacggaggaaacaagctcctccccggcgcgtgcctggcggcgggcgaagcgtcgcggcggacgtgccacgcggggaaccgggagttctacacggaagggtgccccaacaacttcgggtggctggcgctggtggcgctcggcgcgtacatcgtctcctactccccgggcatgggcaccgtgccatggatcgtcaactcggagatctacccgctgcggttcaggggcgtctgcggcggcatcgcggcggtggccaactgggtgtccaacctcatcgtcacgcagacgttcctgagcctcaccaaggcgctgggcacgtcggccaccttcttcctcttctgcgccgtctccttcttcgcgctcgtcgtcgtcttcttcaccgtgccggagaccaagggactgcagttcgaggaggtggagaagatgctcggggagaaggactacaagccgtggaagagataccgtcccgacgtgtcgtccaaagggcgcgacatcggcctctctgttccatgaaaggaagaagaacagtgtttggtttcaagttatttgggttttaactagcaataatctgtactcagtttacatgtagagtggccgttgccaatagaaattaatcagttgtttcattgtgtgacacattttagagccttttcccctgtgcttagaacgtttgatgatttttatataagtaaattgcgtcttggtcacctttttcc

SEQ ID NO: 20148 - DNA, 1142 bp, Oryza sativa
  ref <308>: DATABASE ACCESSION NUMBER: AK070477
  ref <309>: DATABASE ENTRY DATE: 2001-12-06
gagacccgaagcgaagttcaatccatccccaaatgtcccggccaacccaacaccaccccaccgccgccgccaccgccgtcatcctcctcttacttgcagtatccccggcgcggatccggacgacgagcggtgcctgtcgagcctccagcaatctttgtccggcctccgcaactggagcaaggcctccttctccgccccctgcgagggcttcatctcccacctccagggcgtcacctgcaacaacggccgtgtctacaagctctccctcccgggcctctccctcgccggcaccatcccgccggacctctccaactgcaccaacctccagtcgctcgacctctcctccaacgcgctctccggcgccttccccccggagctctccggcctgctcaacctcgccgtgctcaacctctccgccaaccgcctctccggcgccatcccaagggacctcgcccgctgcgcatacctcaacgtcatagatctccacgccaaccagctcaccggcagcatccccgacgagctcggcctcctcgtccgcctctccaccttcgacgtctcctacaaccgcctctccggtcccatcccggtgctcctcgccaaccgctccgggacgacggggaggttcaatgccacctccttcgtcgggaacaaggacctgtacggctacccgctgccgcccatgcgggggcacgccctctccgtcctcgccatagtcggcatcggcctcggcagcggcctgctcagcctcgtcctcagcttctccgccgtctgcctctggctacgcgccaccgaccgcacggccaccatgcccggcgaggagggcaagatctcccacctcatgcccgactactgaacccaagatccgtgttggatttctggatccgatcgagcagtggagcgtagccgccatcttctttcttgcctcagatgctcatctaattgcagttaataattaattgctgcattcttatctcttttttagcgtgggctttcttcttttcttctctggtgttcaataactaattttttttttcttcttttactttggatttctagagagagtcatcagtgagaggagttaggcgtgatgacatcagcttttgtgtataggtactaccgaagaatttatgtcacttcaccgg

SEQ ID NO: 20149 - DNA, 2217 bp, Oryza sativa
  ref <308>: DATABASE ACCESSION NUMBER: AK070478
  ref <309>: DATABASE ENTRY DATE: 2001-12-06
ggtctctctctctcgctctgttacatcctgcatctttgctcttccaggtttcagcatccaaggagcagcagcttgcttgctcttccaaaaggaggaagagtcgaagagtgcgagaggcccgagcgcaagcctgaagcctcaaaggcaaatcctcccccacagactaccacaagctgaagctcgagcgagctgtacgaatccatatgcatcccttcaactccctcccctctcttccctttctcgattagtgttagatctgagcttacagagctatagctcaaatctgcggcatttgggttttagatgcgatcctggctttcgtgtctcttcttcccagttcgttgtattcctgcttcttttagtcgatttcggaccaatttaggtgcgtgcaagaagcagaagttttacctgttggcgtgtgattgggcgaagttcttggaatagatttgggcgcagaggcatcgcgcagctattccctgccaaatctttacccgtttcgttttttttttactgtgatttggatttataaatgaggtaaatataccaaacagtaggattttttttttcaggaagtcaggatgagatcatgggagaggcgaaaataatcaataatgtgccaaagtgggtatgaaacccgactactagtagttgacatcgttgattagtgattactatgaaacagcttcgtgctgttgcattttttgtgctacttggccacatatttcagagtttgtcgacttggaaattgcactatgagtatattgcgtgttatagaaagctaattgcctattttatggaagcacttggagacctcgaaaatcttttgttgtctcttcatcctacgtattctttttttgcaattccatggcctatgcaacttaactgggttatcgaaatctcacatccttcatttttttatgttaatttataaaatgaggcaagtttttttttttcattagttgcatcttgaccttatgaactttttgttgaactgaaaatttgttgggtaacaacttcattatcttttgcagttctaatgtctggatatgggtatggggacattcacaactgatgaaagcgacaaacatgaagagagctacctgtcgttgggtttgacagtatcacagtcaaagaaaaacaacactgaatacccaaggttctgttgcttctggcggcttatcttgatagatcagttcagaagaatgaagacttactagattccaataagataaaggattcaagcaccatctttcatggtcacagggctccagatcttagtataaagctttatgcagagcgcatcttcaagtactcagagtgcagcccatcttgctttgtgttggccctcatctacatggagagatatctacagcagccacatgtgtacatgacgtcccttagcgttcatcgcttgctaattacatctgtggtggttgctgccaaatttacagatgatgcgtaagaattcccttcatctgctattcagttacattatatatgcatctgctttgtagtacgctgtagcatgatctacgcctttgataaatcttagatattacatacattgcttcccaataactttctgaatacatttcttgcaggtttttcaacaatgcattctatgctagagttgggggaatcagcacagtagagatgaaccgacttgagctggatttgttgttcaatctggacttcaggctgaaagtggatttagagacgttcggaagctactgcttgcaattggaaaaagaaacaatggttcttgtaatagatagacctattcaacaagttcacggcgtcaatagcactaaagatttgagtcgcaacagtagcattgacgagtcttgcaagagcgagctgatgcggtacagcagtcaggctctccaaggatgtagctgaccaacttgattttacatcctacatttttcaccaagggttaggaccactagaaattctttcaagagtaaacaattgtgcttcagattgtgtttaactgttctggagcttttggatgatagggcccttctttttttattgtaccactgtaattcttttgaaccacgatgtttgaattttcaccagtttattgaaaggcaacaagtctgaacattattcaatctaaccaagctcaatactgtaacatcatgatttcagtgattatgttgaatactaacatcatgatttcagtactacacaagtaatatctatggattatct

SEQ ID NO: 20150 - DNA, 1141 bp, Oryza sativa
  ref <308>: DATABASE ACCESSION NUMBER: AK070479
  ref <309>: DATABASE ENTRY DATE: 2001-12-06
gattatactatatatatacttctgtatttgtgcacagtgttggtacaggtatctgcagacagccatatctatctttctagctaattggcaatatgcctgaagtccactgctcgtcctaagatttacttctccacccccccccctctcctttgcttcttcttcttcatcatcatcttcttcctcctcctgttaattaagttcttgatttctaagctagcaattgagcacacatcgatcgcgagagacgcagcggcgcccgtctaccgcggggctagaggaatgtcggcacagatcgtgccggcgccggagcatgtgtgctacgtgcactgcaacttctgcaacacaattttcgcggtcagtgttccaagcaatagcatgctaaacatcgtgaccgtccgttgtggccattgcactagcctgttgtcagtgaacttgcgaggattggtccaagcactcccagcagaagatcatttacaggacaatttgaagatgcacaatatgagcttccgcgaaaactactctgaatatggctcatcttccagatatggccgagtgccaatgatgttctcaaaaaatgacacagagcatatgctgcacgtgcgacctccagagaagaggcagcgggttccttcagcttataacagatttatcaaggaagagatccggaggataaaagcaaacaatcctgacataagccacagagaagccttcagtactgcagcaaagaattgggcgcatttcccgaacatccatttcgggttaggctcccatgagagcagcaagaagctcgatgaggccattggagctcctagtccccaaaaggttcaaaggctgtattgatcgagtacacatgatgatcgatggatcctacgtgcttgttgatctcatgttgtaagtaacttaattaagaaaaaaagtctacgcttatttatttcttaagtatcatcagttaaatttgtgagcgagtatatagatgagttgtcatgatcagtgagtgatcgtatgcatgcagtgctgagaattaaaggtgtatatgcatgagtaacgttacatgcagctagtgtcgacgcacgtatgacagactgaataaactcttcaccatgttgtttttttatgtttgaaatgaattaattaattgtcc

SEQ ID NO: 20151 - DNA, 2668 bp, Oryza sativa
  ref <308>: DATABASE ACCESSION NUMBER: AK070480
  ref <309>: DATABASE ENTRY DATE: 2001-12-06
ggtgggcttaagaagtcccctcatgaggtatttgatgctctcaagaatcaaacaatcgacctggtcctgacagcacatccaactcagtcagtcaggaggtcgctgctacaaaagcatggcaggataagaagttgtttaacaaaactttatgcaaaagacataactccagatgagaagcaggaactcgatgaagcacttaagagagagatccaagccgcctttagaacagatgaaattcggcgagcacctcctacaccacaggatgaaatgcgtgctggaatgagttattttcatgagacaatatggaagggtgtacccaagtttttacgtagggttgatactgcccttaagaacattggcataaacgagcgagtgccctataatgctcctcttattcaattttcttcttggatgggtggagaccgtgatggaaatccaagagtcacaccagaggttacaagggacgtatgcctgttagctagaatgatggctgctaacttatactatgcacagatagaggatctgatgtttgagctatctatgtggcgctgtagtgatgaactacgtgtaaaagctgatcagttacaccgttgcgcaaagaaaaacacaacaaagcactatatagagttctggaaacaagttcctccgagtgaaccctatcgtgtaatactgagcaatgtcagagataagttgtacaatacacgcgagcgagcacgccatttattagccagtggattttctgaaattcctgacgaagcaacattcactgatgttgagcagttcttggagcctcttgagctctgttacaggtctctctgtgcctgtggtgataattctattgcagatggcagtcttcttgactttctacggcaagtgtccacatttggactatcccttgttagacttgatattaggcaagaatctgaccgacatactgatgttatggatgccataactcaataccttggaattggatcctatcgtgaatggtcagaggagaaacgccaagaatggcttctgtcagaactcaatggaaagaggccattatttggtcctgaccttccccagacggatgaaattgctgatgccctagatacttttcatgtgatagcagaactaccctatgatagctttggtgcatatgtaatatccatggcaacagctccttcagatgttctagcagttgagcttctgcaacgtgaatgtcatgtgaagaagccactgagagttgtgccattgtttgaaaaactagcagatctggaagcagcaccagcagctcttgcccgacttttctctgttgactggtacagaaataggatcgacggaaagcaggaagtaatgattgggtattcagattctggaaaagatgctggccgtttctctgcagcttgggaactgtataaagctcaagaggagcttattaaagttgctaagcagtttggggttaagttgactatgtttcatgggcgaggtggaactgttggaagaggtgggggtcctacacaccttgctatactgtcacaacctccagataccattcatggatcacttcgtgtgactgttcaaggtgaagtcattgagcaatcttttggagaggagcatttgtgttttaggacacttcaacgttttacatctgctactcttgagcatggtatgcatccaccaatttcaccaaagccagaatggcgtgctttgatggatgaaatggccgctgttgctacaaaagaataccggtccattgtcttccaagaggcacgatttgttgaatatttccgccttgcaacaccagagttggaatatggtaggatgaatattggaagtaggccatcaaaacgaaagcctagtggaggcattgaatcacttcgtgcaattccttggatctttgcttggacacaaactcgattccacctaccagtgtggcttggttttggcgcagcgttcaagcatgtcttgcagaaggacatacgcaatcttcagatccttcaggagatgtacaacgaatggccatttttcagggttacaatagacttggttgagatggtgtttgctaagggtgatcctggtatagcagctctgtatgacaagttgctagtttctgaggatttgtggccatttggtgctcgtcttagagcaaactatgaagaaacaaagcaacttcttctacaggttgctggacacaaagaccttctggagggagatccttacttgaggcagagactgcgtatccgtgattcctacatcacagcgctgaatgtttgccaagcttgcacgctaaagcgtatcagggaccctggcttccatgtaagcccccgagctcacctctccaaggacataatggactcagggaagccagccgctgagcttgtgaagctgaacacaacaagcgagtacggcccaggcctcgaggacactctcatcctgaccatgaagggcatcgctgctggtatgcagaacactgggtgaagtagaactggttcgttctgatggtgtgttatggtgtcatgaattagtgtagtttgcacctctatgcaatcactatttgcagtttgcacctctgaactctatatgtaaataaggggatgctaagcaacgtataactaagactggttatatccatggatattacctgtttagcatgttatatatcgaactcttatgctgttcaccg

SEQ ID NO: 20152 - DNA, 1056 bp, Oryza sativa
  ref <308>: DATABASE ACCESSION NUMBER: AK070481
  ref <309>: DATABASE ENTRY DATE: 2001-12-06
gatctaccccactcccccctctctctctctaacaccaccaccacctttcctcttctctctcctctccactcatctcatctcactaagctcaaattaagcaaaggattacaagcaaaaccaaaccaaaccaaagcaaagactagtgtagagtagaagagaagagtccaccaagaaaccaagaagctagaagcatcatggggaaggattgcggcaagcacggcgacgacgacttccggcagggatgccggcgattcatcaccgtcctcgtcgtcctcgccatcctcgtcggcatcatcgccctcatcgtctacctcgtcctccgccccacccaccctcgcttctacctccaggacgccaccctccgccagctcgacctctccaactcctcctccaccgccggcggcgtcctctccaccaccatccaggtcaccgtcgcctcccgcaaccccaacgaccgcgtcggcgtatactacgaccgcctcgacgtctacgcctcctacaagtaccagcagatcaccgtcgccgcctcgctcccgccggtgtaccagggccacggcgacgtcgacgtctggtcgccggtgctcgccggccccagcgtccccttcgcgccctacctcgccgacgccatctcgcaggattgccaggcgggctacctcatcctccaggtcaagatcgacggccgcgtccggtggaaggtcggcagctggatctccggccactaccacctcttcgtcacctgcccggccttcctcgtcaccgccggcggcaatggctcccccggcgccagcggcttcaggttccagactaccacctactgccacgtcgaggtctagctaagctagttatgttatgatctactactgtgcccaccgccgccgccggaatctgctatctccggctagtcgccggcgaggtaggtttgatttcttggaggtggtggtgttcttgtgcgtccatagtgaaaaagagatgatggtggtaataatgaattattatgtgggttacaaaatgtaaaggaggtggagaggcaatttaagtaggattaatggtatggtt

SEQ ID NO: 20153 - DNA, 1518 bp, Oryza sativa
  ref <308>: DATABASE ACCESSION NUMBER: AK070482
  ref <309>: DATABASE ENTRY DATE: 2001-12-06
gaatataaaagttggagagaaacaggtgaagctgcaatatttcgccacatcttcttcttcttcttctccatgccgatcgcctccaagctcgtctacttccagcgccgccgcccatcgccggcgccgccggagccggagccggagcctcccgaccctcgccgcaggccctgccgagccggagccggagcctccgccgcacgccgccgcaagccggtccatttatatggaggtcaagtgacctcttggaagaatgaccgtggggatgaattactttttgtaagcagcaaggccactttcaagcctccaaaagcaatccgtggtggcatacccatttgcttcccccaatttggcactcatggaattcttgagaaacatggatttgcaaggaatcggttctgggctattgatgataatcctccaccttttccaacaagcactgctgctaaagcttttgttgatcttattctgaagacttctgaagaagatctcaagatatggcctcatagctttgaattccgattaagagttgctcttgggcctggaggagatttggctctcacttctcgaataaggaacaccaacactgatggaagaccattctcatttacatttgcataccacacgtacttctctgtatctgacataagtgaagtgcgcattgaaggcttggagacactggactacattgactgtctgaggggaaaagagcgatccacagagcaaggggacgctattgtgttcgaatcagaggttgacaaaatatatctagatgcaccagcaaaaattgcaatcattgatcatgagaagaaacggacatttgtcttaaggaaagacgggcttccagatgctgttttgtggaacccatgggacaagaggacaaaaaacatgcaagactttggggatgaagaatacaaacatatgttgtgtgttgaacctgcagccgttgagaagcccattaccttgaagcctggcgaagagtggaaaggaaaaatggatctctccgcagttccttccagttactgtagcgggcagttagatccaaataaggttcttcaaggctgagagttctaatttactacaccatgtacaggaacacttaatgtcacttatattatctggtgctgatgctgcatcttagcatctacttgccgtccacttcattatcttaccatttccacattttaatgcttatttctttctgtatgaagcagcagagagacactgaagtaacaaacgatcctaatcttgggaaaatctgccgtcagtgaactgaattaccgattagtagcaccactaaagtattgttttcttaccgatcagtagcaccactaaagtattgttttccgggtcatgtggataatgatgatgcattgatctgcatctcggatgtatctggctaattatatttgcaaactgttccctgtacctttcctttgttattatcattattactgcgagtatatctggttgattttattgttcctctattaaccaataatcatcagaattcagaagact

SEQ ID NO: 20154 - DNA, 1016 bp, Oryza sativa
  ref <308>: DATABASE ACCESSION NUMBER: AK070483
  ref <309>: DATABASE ENTRY DATE: 2001-12-06
gacccttcaccctttctctcgcggctcgtttggttgggggaattttccaaggatcccgtttccgtttcgaggtgcccatggcgctggcggcgcagctctacggatcggcggcggcggccgcgtaccggagacttccactctacggagttccttcgtcatgccggtggccgcggactcctctcgccgctctcccgaagctttccatctccaccggtggaatgggtatgaatccgtttggtgttggtgctaaagtttcaataaaatgtacaaatgggaccactcaggttgatgagttaaacttcagatcaaatcaaactgaggaattagtagaaggagatgcagatactgttacccagaagaggagtgcaaaaatccatgatttttgccttgggatcccttttggtggtcttctattctgtatggggcttctaggatacattttttcaagaagtaccataagccttgttttaggtgttgcaccagggctcaccacgctctttcttggtaccctcagtcttaaattctggaggagtggaaaatccagtttcatatttatcttgggccaagcagcaatttctgctgttctagcatggaagtattcccatgcctacatcttgacaaatagaatcctcccctgggccttctatgcatctctgagcactgccatggcttgtttctacgcttatgtgctgctctccggaggaaatccaccacctaagaagaagatggcagcaactccatcatcatagagcaggatccaggcattttcttagtgattaacgcgacaggatgatttggcctttgtgccttttaatgctttgtctgcaagtataacagaattttgagttatcatcccatttgtatattccctaatcttacattctctgtggattttggttgttgtagcgtgaagctttttgaacaaataattctgcaggatggcaatccatccttactgaacattttgctctttttttttccctccaagagcataaataaaggatatgtgtttattt

SEQ ID NO: 20155 - DNA, 1184 bp, Oryza sativa
  ref <308>: DATABASE ACCESSION NUMBER: AK070484
  ref <309>: DATABASE ENTRY DATE: 2001-12-06
gggtgttctttagtgcaggtgaagaggaggagaccggaggaggggaagagggggaggaggatgggatctgggattggagccgtgctggtgcttgttgcagcatggctaacatttgcgccgcctggtgctctggcttcttcgcgcaggtttgatctgagtattgcacaagaaaagttagtgaactccacaggtggttcaactgcttcaagctcacaccttgtttttgatccttcaaaatcaaagagactctcatggcatccaaggatcttcttgtatgaaggttttctttctgacatggagtgtgaccatttagtatctatgggacgtggtaatatggagtcatctttagcatttactgatggtgatagaaatagttcgtataacaacattgaggatatagttgtttccaagattgaggacaggatatcgctatggagctttcttccaaaagaaaatggagagagcattcaggtcttgaagtatggagtgaacagaagtggcagtatcaaggaggaacctaaatcaagcagtggtgcccataggcttgcgaccattttgatgtatctttctgatgtcaagcaaggtggtgaaactgttttccccagatctgagatgaaggatgctcaagctaaggagggggcaccatctcaatgttctggttatgcagtgcgaccagccaagggcaatgcaatactgctgttcaatttaaggcctgatggagaaacagataaggatagccaatatgaagaatgtcctgtcctcgaaggagagaaatggctagccataaaacatataaatttgagaaaatttgattatccaaaatcatcacttgcatccgaggatgagtgcacagatgaagatgataggtgtgtgagttgggctgctagtggtgagtgtgacaggaatccggtgtttatgataggaagctcagactactatggctcttgccgaaagagctgtcgagtgtgctgattattttgcaattttttgctagtagaaatattgatgtcataggcagagaatggtgtaacaaactgtatatgttgcccgtttttcttttatgatttactttgcgtttgttaggaaatttaatttggagttaatggattgaccactgttcccaaattatggaaaataattttgttccatcagatgataatgatatatgcacatcataattaatc

SEQ ID NO: 20156 - DNA, 2257 bp, Oryza sativa
  ref <308>: DATABASE ACCESSION NUMBER: AK070485
  ref <309>: DATABASE ENTRY DATE: 2001-12-06
ttgcttatgtttatgatgtggatgggaagttcagtagccgttgcaactatgagctagttgacttgtatgctgtagttgaagaggatgacatcacaacattgagaatgatgatacaacagcacagacttcatacacaaagtgatttggccagagatatactcttgaattttgatactctcctcccaaaatttataaaagtatatccaagggattacaagcgggttttggataaactaaaagaagagaaggctgctaaagaagcagagcaaaaggcaagagaagtggtggataagaagccagttgaagtaattcaagctccaaatggcatttcagtaaagacagagaaagtaatgaacgaagagccatcaagccgaccatcacgagtttcaaatgctgtaaagtaccgaggtttcataaaatatgagcgagagggtacttcttacagagatccaaatgagcgtgtaaaagattggaatgaagttgcaattgaattggttcctgggccactgctaaagacgcaatctgctcggtgcatggattgtggcactcctttctgtcatcaggagggttctggtgctggttgtcctcttggaaataagattcctgaattcaatgaattggttcatcagaatagatggcatgaagccttggatcggctacttgagacaaacaatttccctgagtttactggacgagtttgtcctgctccttgtgagggttcgtgcgtacttggcattatagacaatccagtatccataaaaagcatagagtgcgccatcatagacaaaggatttgaagagggatggatggtaccacggcctccacttcggagaacaggaaagagagttgctattgttggcagtggcccagctggtctagctgctgcagaccaactgaacaaaatgggccatttcgtgactgtctttgaacgtgctgaccgtattggaggactgatgatgtatggggttccaaatatgaaggctgacaaagagggcattgttcagcgacgtgtcgagttgatggctaaggagggggttcaattcattgtgaatgcccatgttggaagtgaccctttatactccgttgaaaagctccgctctgagaatgatgccattattttggcctgtggagctacaaagccaaaagatctccctattcctggacgggagttggcaggcatccatttcgctatggaatttcttcatgccaataccaaaagtttacttgacagcaacttggaggatggtaactacatatcagcccaagggagaaaggtggttgtcattggtggtggagacacaggcacagattgcattgggacatccattaggcatggttgcaccaaccttgtaaatcttgaacttttgccagagccaccaagaaagagggcacctgacaacccctggccccagtggcccaggatcttccgtgttgattatgggcaccaggaagcaactagcaagtttggaaaagatccaagaagttacaaagtcctgacgaagcgatttatcggagatgagaatggaaatgtgaaggcccttgaggtaatacgtgttgaatggggaaaggtgaacggaaggttccaattcaaggaagttgaaggatcagaagaaattattgaggccgatcttgtcctcttagctatgggattcctgggtcccgaagcgactgttgctaacaagctgggtctagaacaagacatgaggtcaaacttcaaagctcaatttggaaactttgcgaccaatgtggaaggtgtatttgctgctggagactgcagacgtgggcaatcactggttgtttgggccatcacagaggggcgccaagctgcagcagccgtagacaattacctgtcgaaggatgatgaaggtgaaaccaatggcacagaggacattgctgtctcaagtgaaggtctggtccaacccgtagttgcataggccgagagaacatttctgcaattttgatacagcattgatgatgcgaagatagtagggccatgcattttttagctataaaaaggtaaaataaagggcctgtaaataatttacaagaaaagggggcccttttgtttatataagtatgataaaagggaaattttgcgggcgcgcatattttttccctgtttcttcttgtgaagagatgcaaatcctgtgattataagagcaatgtctggtttttgttaaataaatgtgaggggattctgttaaaaacatctatttattatgtgtaagtacataatggatcttcgtgtttctcttcc

SEQ ID NO: 20157 - DNA, 1770 bp, Oryza sativa
  ref <308>: DATABASE ACCESSION NUMBER: AK070486
  ref <309>: DATABASE ENTRY DATE: 2001-12-06
ggggtactcggcgatgctgcggctgccggacaagatgccccgggaggacaagcgcgccctggtggagggcaccatcgtggagatgggcctccaggactgcgccgacaccgtcatcggcaactggcacctccgcggcgtcagcggcggcgagaagcgccgcgtcagcatcgccctcgagctcctcatgcgcccccgcctcctcttcctcgacgagcccaccagcggcctcgacagctcgtcggcgttcttcgtgacgcagacgctccgggggctggccagggacgggaggacggtgatcgcctccatccaccagcccagcagcgaggtgttcgagctcttcgacatgctcttcctcctctccagcggcaaaaccgtctacttcggccaagcatcgcaggcatgcgagttcttcgcccagaccggcttcccgtgcccgccactgagaaatccatcggatcatttcctgagatgcgtcaactccgacttcgacaaggtgaaggccaccctgaaaggttccatgaaggcaaggatcgagaggtcggacgatcctctggacaggatgaccacatctgaagccatcagaaagttggttgcatcctacagcaggtcccagtactactacgctgcaagggagagagttaatgacatctcacgactgaaaggaactgtgctggattcaggaggaagccaggctagcttcttgatgcaggcaggcacactgaccaagcgctccttcatcaacatgtcaagggacttcgggtattactggctgaggctcctcatctatctcctcgtgaccgtctgcattggcaccatctactatgacgtcggcaccaagtacacatccatcctggctagggctgcctgtaccgcattcgtcttcggattcgtcactttcatgtcaattggagggttcccttcatctgttgaagaaatgaaggttttccaaagggagcggctgaatgggcattacggtgtcgcggcttttgtcatcagcaacacaatctcggcgctgccattcttggtcctgatatgcttcttgtcagggaccatatgctacttcatggtgcgccttcacccaggtttctcccactacatcttcttcgttctcaacccctacgccagcgtcactgtggttgagagcttgatgatggccattgcaagtgtcatccctaatttcctcatggggatcattataggagctgggattcagggaatatttatgcttgtctctggatactttagacttccttacgacattccgaagcctgtttggagataccccatgcagtacatcagcttccattactgggcgctgcaggggcaatgccagaatgacatggatggtctcgtatttgacaaccagtacccagaccaaccgaagatccctggagacttcattctgaagtacatattccagatcaacgtgcaccggtcaaagtggattgatctctcagtaattttcagcatgatcttcatctaccgcattctgttcttcctcatgatcaaggtaaatgaggatgcactgccatggattcgggggtacattgcaaggaaaaggcttcaaaagaaggaacctcttggcaagacaccctccctcagaggctacgttgtggatccagagcttggtcctaacgaaagctagaatataaactgttagcagatataggcccatttcttgccggttcttggtggaatatgtatctaagatcagagaaactggtatttatacgttttgaaactgaagctcaagctgatcggaatacaggt

SEQ ID NO: 20158 - DNA, 1642 bp, Oryza sativa
  ref <308>: DATABASE ACCESSION NUMBER: AK070487
  ref <309>: DATABASE ENTRY DATE: 2001-12-06
gtctctacaccgcacaccatccctgctatccctctccagcactagcagcaaaagcttttgccacaaaagagaagtaagctagcagaaatggccatgaaccaccctctcttctcccaggagcaaccccagtcctggccatggggtgtggccatgtacgccaacttccactaccaccaccactacgagaaggagcacatgtttgagaagcccctgacgcccagtgacgtggggaagctgaaccggctggtgatccccaagcagcacgccgagaggtacttccccctcggcgccggcgacgccgccgacaagggcctgatcctgtcgttcgaggacgaggccggcgcgccgtggcggttcaggtactcctactggacgagcagccagagctacgtgctcaccaagggctggagccgctacgtcaaggagaagcgcctcgacgccggcgacgtcgtgcacttcgagagggtgcgcggctccttcggcgtcggcgaccgtctcttcatcggctgcaggcgccgcggcgacgccgccgccgcgcaaacacccgcaccgccgcccgccgtgcgcgtcgccccggctgcacagaacgccggcgagcagcagccgtggagcccaatgtgttacagcacgtcgggcggcggctcataccctaccagcccagccaactcctacgcctaccgccgcgcagcagatcatgatcacggggacatgcaccatgcagacgagtctccgcgcgacacggacagcccaagcttcagtgcaggctcggcgccatcgaggcggctcaggctgttcggcgtcaacctcgactgcgggccagagccggaggcagacaccacggcagcggcaacaatgtacggctacatgcaccagcagagctcctatgctgccatgtctgcagtacccagttactggggcaattcataagaagattgactatgagatctgatctgaggccatgcctgcatgatcataattcataagtcctagcaagcaacagtggaagaactagttgctactgctctgcattcagtgacaggtttaaattgtgacttgtggaaggacaaggaaggaagtgggggggaactcccttgtttcccgggcaaatgcatattccttccatccccatagtgccttttttctaggttattttcttcttcatcttggcttccagaaaccctacttactgtatgggcccctggcagcagacatggatggggaggtttcaggaaacatcaagttgaaaaggagaggggaattgaagagacaggcagagagctgtatgtatgtcagtatgtgtcatctgtctgtatagtgggtccaagaacaaaccctgaagctgatgtattcactcctgcctcctcaggaaacataactttatccccatttcacctcttctactgtgcttgacctgatgcaatcaattgttgatggaccagatgcaattatgcaatgcttccatttgttgcaatccaataggttcaccgattacactgtgtaagaaattaaggagtgcatgtgcaatttattccaactttttagaaatgacttacatggtaatttgtctgaataaatcactatgatgttaatagtatgactaaagaaaactcccgcaaacgacaagcagtaaagaaattacgtt

SEQ ID NO: 20159 - DNA, 3487 bp, Oryza sativa
  ref <308>: DATABASE ACCESSION NUMBER: AK070488
  ref <309>: DATABASE ENTRY DATE: 2001-12-06
gcgatccccaaatccgcgcgcgccctcgcattccggggaattcccaatttaggttagatctgcgcaccgcgccgcgctcggcggccgcctccgcctgcgccacccaataaggccggcatggaggagacgtcgacgccgccgcagccgcagccgcagccggcgcacccgtctccccagttcccggcggtcttcaccccgccgccgccgccgacgagcggattctcgtcgcggggcagccccagcccgggcacgggctccgccgcggcgcaggcgcagttcagcacgccgccgggcccgccggtcttctcctccccgctgcgccccgccgcggtgcccttccgcgccaccccggcgtcgccgcagcccgtgcccttcgcgtcccgcggcgggggctactcctcctcgtcctcctccgccgccgtctcgctcccgacctcctccggcccgcacttcctcaacggcgtcgccacgcccacatcccacctcccgtcctccgccgccgccccgccgcctcctccgcctccgccccccgaggagtccccctacgtcctcttctccgcacacaaggtgctgaagcagaagaaactgctgaatgctcctagcttagggttcggagctctagtgtctcctgggagggaagtggcgccagggccagagactgtggagcgtgatcctcggcgatgtctgaactgtggggcttatgttaatctttactgtgacgtgttgattggctctgggcaatggcagtgcgtgatttgcaagaagatgaatggcagcgaaggggaattcgttgtctccagcaagcatgatctgctccagtggcctgagcttgcgtcatcggccatcgattatgtgcaatcagggaataggaggccaagctttgtcccggtgcctgacacaagggtgtctggacccatttttatcctcatagatgagtgccttgatgaggcacatctacagcatctgcaaggttcattgcatgcttttgtggatacactccctcctacagctagaattgggatcatttcctatgggcgcactgtctcagtgtatgatttttcagagggggcagcggtgtcagcggatgtgctacctggaaacaagtcgcctacccatgagtctttgaaggctataatctatggaacaggtatatacctgtctcctgtacatgcttcactgcctgttgcacacacaatattctcatctttgagaccctaccaattgagtttaccggaagtgtcaagggaccgatgcattggtgcagcggtagaggttgcccttggtattatccaagggccagcagcggaggtgtcccgtggaataatcaagagatctggaggcaactacaggatcttggtttgtgcgggtggccctagcacatttggtccaggatcagtgcctcattctgttcaacacccaaattatgcctacctcgagaagacagctatgaagtggatggagcgtcttggtcatgaagcgcagaggcacagtactgttgttgatatcctttgtgctggaacatgtcctgtgagggttcctgtattgcagccactagcaaagtgttctggaggtgttcttttacttcatgatgattttggagaggcctttggggtcaacctgcaaagagcgtcaactagagcagctggttcccatggcttatttgagattagatgttctgatgacatgcttgttactcaagtcattggccctggtgaagaagcatctcctgattcccatgaaacattcaagcacgatacctcattttgtatccagatgcatagtgtcgaggaaacacagagtttttccgtgtctatggagtcaaagggtgatatcaagaatgattttgtttacttccagtttgctgtccattactctaatatgtatcaaacagaaataaccagagtaatcactatgaggctgcaaactgttgatggtttatctgcatatctggcaagtgtgcaggatgatgttgcttcggtcatcattggcaagagaactgtcttgcgtgccagaactgcctcagatgctattgacatgaggctcacaatcgatgaaagagttaaggacttagctctcaaatttggtactcaagttccaaaatcaaagctttaccggtttccaaaagagctggcatcactacctgggtgtttgtttcatttgagaaggggaccactcttaggtagcatagtaggacatgaagatgagcgatctgtccttaggaatttgttcttgaatgcctcatttgacctctcgttccgtatgttagcacctcgttgtataatgcaccgcgaaggtggtacctttgaggagctgccagcatatgatcttgccatgcaatctaatgctgtggtggtattggaccatggaactgatattttcatatggttgggtgctgaactagcagcccaagaaggacaaagtgctgcagctttagcagcatgccgtacactggctgaagaactcagcgagctccgttttccggctcccaggatactttcattcaaagtcagttttttgttctcactgaactattgttctggtttctaaccgccttcccttgtagtatgaactcttctgctcaacatttttttcctgtctaatataggccatgtccgttcgtagaaaaacaggtcactaacattatcgcatttatgaagcccaatttatacatataatttgctttgtagtctataatatatctttccataagattattgtggcataagaactttgcatccctcatacagagtgttcagttctttcaaacaatttagtctgtcacatgacatccaatttcattaactacattactagcatgtagtaccatttaagcggcactatatgctttgcttttctaattgaccgcactttcttgattttgttataggaagggagctctcaggctagatatttgtctcacgccttatcccagctcacaaggaccctacttatgagcaggagtcaagatttcctcagttacggacacttactcctgaacaaaggtctaggttgaagagcagcttcatccactttgatgaccatagtttctgcgagtggatgcgcagcctcaaattggttccacctgaaccaagctaataccaacaatcggatccctaaaggtggatagctgaagaacccaaggcttggtttctgatagagttgcgaaacgatagctgaaagttttgtgaagtaacattgtgcattgcgggacacatgccaatgccaaacacattttgtttggagtggtgggagttgtatgattttgcccgattctttcttctgacgccatagcatacagtttaaattgtcacttgtcttgcaggcgccaaatttacacaataaaatggtctcctcctgttggatagttcattaattggatgtttatatgatatatctggcctaactattttttggattccatttgtttgttcagggcagtgtcagactttgttcaccctaattaaatcgaggactgaagattacaacc

SEQ ID NO: 20160 - DNA, 1545 bp, Oryza sativa
  ref <308>: DATABASE ACCESSION NUMBER: AK070489
  ref <309>: DATABASE ENTRY DATE: 2001-12-06
gaatttgattggctcttgatcagcctccggatcgtgtagcgcagtggtggctagcacgtaggtagcaacaaagccatggacatggagcatgagctcaggggcggcggcgtcggggcggcggcgcatgggcatggctccatctgcttctccggcgggccggtgctcgtcgacgggcgacgcatccagcagctgctcctccactgcgccgccgcgctcgagtccaacgacgtgacgctggcgcagcaggccatgtgggtgctcaacaacatcgcctcctcgcagggggaccccagccagcggctcacgtcgtggctgctccgcgcgctcgtcgcccgcgcgtgccgtctctgcgcggcggcgccggcgggcgccgccgtggagtttctggagagaggccgggcaccgccgtgggggagggccatgtcggtgacggagctcgccgactacgtcgacctcaccccgtggcaccggttcggcttcacggcgtccaacgccgccatcctccgcgccgtggccggcgcatccgccgtgcacgtcgtcgacctcagcgtcacgcactgcatgcagtggccgacgctcatcgacgtgctgtccaagcggcccggtggcgcgccggcgatccggatcaccgtgccgtccgtgcgccccgccgtcccgccgcttctcgccgtgtcgagctcggagctcggagcccggctcgccatcttcgccaagtccaaaggcgtgcagctggagttcaacgtcgtcgagagcgcgacgacgacgtctccgaagaagacgtcgacgacgctgtgccaagaactcgcgtccgtgctgtccgacccgccgtcgctggggctaagggacggcgaggcggtcgtcgtgaactgccagagctggctccggcacgtcgcgccggacacgagggacctcttcctcgacacggtccgggcgctgaacccctgcctgctcaccgtcaccgacgaggacgccgacctgggctccccgagcctcgcgtcgcgcatggcgggctgcttcgacttccactggatcctgctcgacgcgctcgacatgtcggcgcccaaggacagcccgcggcggctggagcaggaggcggccgtcgggcggaagatcgagagcgtcatcggcgaggaagacggcgccgagcgctcggagcccggcgcgaggctcgccgagaggatgagccggaaagggttcgccggcgtcgtgttcgacgaggaggcggcggcggaggtgcgacgattgctgagcgagcacgccacggggtggggcgtgaagcgggaagacgacatgctggtgctgacgtggaaggggcacgccgccgtgttcaccggcgcttggacgcccaactagttgagcctagcttagcaatctacagtatacatcaagtgattaaagcttaagctggtgttagactgtctattagctcagaagtgacaacggagaatcaactgaggaggaatttctggttggatttagtggatcgttttaaacttctacttccatgacaagatatttcagttgaattcttgatgttttactccc

SEQ ID NO: 20161 - DNA, 1761 bp, Oryza sativa
  ref <308>: DATABASE ACCESSION NUMBER: AK070490
  ref <309>: DATABASE ENTRY DATE: 2001-12-06
gaacggctgtttcatcttctgacgagatcacatccatgcaaacgcaagcaattaattaatcccctaatcccccaaatcctcatctccaaatccctcctcgtctcgtcctccaccgtaataatctctgaccaaatcgccaaatcatccgcccagaaagccgccgatcgatctcgtcggagagggcgcgcgaccaatctcgaccgatcgatcgatgatgcctccgaagccggctgcgaaggacgtcgccgacgagcagccggagccgccggacgaggaccccgacgtcgccgaggccgaccccaccggccgctaccttcggtacagggagatcatcggatcaggatcctccaagacagtctacaaggcatttgatgcggtggatggcatcgaggtggcatggggcaaggtggagataaacgagagaatcatgggttcatccaaggaattgcagcggcttcgcacggagatccagctgctgaaatcgctgcagcacaagcacatcctcaagctctacgcatcctgggtcgacactaacagaaggacggttaacattgtcactgagctgttcacatctggtaatttgagagagtaccgtacaaagcacaaaaaggttgacatgaaagcaatgagacgatgggcaaagcaaatactgacagggttggaatatctacacagtcagaagccaccaatcatacatagggacttgaagtgtgacaacattttcattaacgggaaccatgggaaagtgaagattggagactttggtttagcaatggtgatgcagcaaaggaaaacacggagtatacaaggcaccatagaattcatggcaccagagctttttggtgaaaattacaatgagctggtcgatatatattcttttggaatgtgcatgctggagatggtgacttgtgaatgcccatacagtgaatgcaagggctttattcagatatacaagaagattactgaaggtgtaaagccagctgctctctccaaagtcaaagacgcagaagtgagaggcttcattgagagctgtctagcttcagtatctgacaggttgcctgcaagtgagctcttgaagagcccttttcttcagagtgatgatgccaatcacagaagctccaattcagttcaagaaccagtaaaattccctgaaaacaattttactaaagatgaaccaatttttgtctctctggcgccgaataatgggacagtcaatgggaaggagcaatctttcatcttggtgcttcagaagagtgattttttgttggaagggaacatgagcaccaccaaccctgtcatgctgtttctgcgattccctggtcctgatggtaagttcaagaatgttcagttcccctttgacatggagaaagataccagcctgtcggtgtccactgaaatggttgagcagcttgagctgcctgaatggaacaaccctgtcttggccgagttgatagacgccttcttactacacattttgcccagttggaaaccctgtgttaaagttggaaagatgttgccaagttcttcctagggagtgagttgtccagttttccccatttcggtggcatgcagaatatggttcattctccttggtgcatgctcaaatctcagcgccgtggttttcactgacgattgagaaaatttgtacagaattactgctagggaagagttcttaatagagtcgatgaattcttgattttagctgttgtagcctgtatgtgaattcctgcataggataacggtgctgccaatgctgtatcc

SEQ ID NO: 20162 - DNA, 1231 bp, Oryza sativa
  ref <308>: DATABASE ACCESSION NUMBER: AK070491
  ref <309>: DATABASE ENTRY DATE: 2001-12-06
gctcctcttcttccaatattattttttcgccttttctgttcgtgtgttcgtggtggagttcatctcgccttcccctcttccggtcctcccaccgctcctcgccaccacaaaccgccgccgcctcctcctctcctatctgtgcggaggaggtataccacacctttggattttggggaagcagtacgttgattggaagaaatgtcaggaggtaggcaatcatactggtgctaccaatgtagacagcgggtgaggccccgcggccaggatatggagtgtccctattgtgattccggttttgtgtctgaaatggatgatgttgatgctctcatgcgccactttgttgggatggatcctgatttccatcgtgatccaagattcggtatcatggaggcaatctctgctgtgatgaggcatggcatggcgggaacgaaccgggaagttgatgtgagaggaaggccaaacatattttctgacctggagatggagtttggctcagggccatggttgctcttccgtggccagcttcctggtcatctctcagaagacaatggttttgatgtattcatcaatggacgccgtggtgttggcatgcgcagagcaaacattgcagactactttgttggacctggactggatgatctgattgagcaattaactcagaatgatcgacgagggccgccacctgccactcaatcatcgattgatgctatgcctactgtgaagattacacagaggcatctcagtggagactcacattgccctgtctgcaaggacaagtttgagctgggatcagaagcaagggagatgccatgcaagcatttataccactctgattgcatagttccttggctggaacagcacaattcctgccctgtttgccgatatgagttgccaccacagagctctactggtgctagctgctcgcgcacaagatcaaccaaccaaagtcagagttcaagtagcaatgggagaaccaatggacgtcaaaggagaaggaatccgttctcgttcctatggcctttccgatcatcaagctctagctctcgttagattagcctggtaatctggttggagtcctcaagactgtttaatcgaagatgctcataaaatgggtgttatgcatggcatcttatcgtccaatctgtaatgtatggcttgttatgatcaccacggaatgcttttccttgcaagtatatccttccacagcttcatatcagatacttcttttacc

SEQ ID NO: 20163 - DNA, 2092 bp, Oryza sativa
  ref <308>: DATABASE ACCESSION NUMBER: AK070492
  ref <309>: DATABASE ENTRY DATE: 2001-12-06
gattcgctcgtctcctcgggggagtccaaaccctaggctcttcctccccagcgatgcacccggcgggggcggtggtggcgccggcggcgggcgcgcccgctcgggcggcgccgcgggtggagaaggcgacaagccacctgctcatggggcccgactgggccgtcaacctcgaaatctgcgacatcatcaacgccgacgtctggcaaacaaaggatgtggtaaaggcagtgaagaagcgactacagaacaaagacccaaaagttcagttctatgctttgacgctcttggagactatgatgaagaattgtggtgaatatgttcaacttgaagttgctgagcaacatgttctgcaagaaatggtgaaaatcatccagaagaagaatgatatgttagtaagggataaaatattattacttttggactcctggcaagaagcatttggtggacctggaagtagatacccacaatatcactttgcgtatcttgaagtaaagaggataggtgccgtgttcccaaggcgtcctatagatgcaccaccgatatttacacccccggcgacacatacttctcaaagctatggttcacccagatatgaggcaggaagtctgaatgagataatgtcttccgatgttgagacactaagtttgggtgacctgaataacattcgaaatgtgacagaactactatgtgatatggtgcatgctttgaatccatctgatcacatggctgtcaaagatgaaattatcacagatcttgtgagccaatgtcgctcaaaccaacaaaagctcatgcagtttgtcagctcaacagggaatgaacagttactgaagcaaggtttggagataaatgatcggctacaaaatattatttcaaaatatgacattatggcctccagtactcatttagcagttgaagcacctccggcagacaatgttgaggctcctaaagaggatccagcagaaaagccatctgcacctcctatcagcactcttgaggaggaggaggaggaggaggatgagttcactcgactagcacaaagaaaaaataagtctgtgatgactagtgatgattcattatctagcactggagaccttgcccttgtacccattgatatggaaagttcagaatcttcatcttctgttgcaagcaatgctttagttcctgttgacccagctcttgtcagtagcagtcctcaaacaaaagagcaggatatgatcgaccttttaagcctcaccttgtgcagtcctacacatgaagcttctacagattcttcaacgcagggtcctaatggacctcagcagcctgcagttactgatgggcagcacaacccatcgggtgtgccacagtatccttcaaaccaccagtcgcatccaataaatcaggaatatattcgacagaacagaaactatgttgcaccttgggcacaaagtggtcaatattatccagcaccaccatgggctgcacctccaagtgtcaattctaatcctttccagtcagctacttaccaagaacaacccccacctgttggttctgtttcctcaacctattcagctccctcagcatcatatacttccccttcaatggcatatgtgccaccttcagcctcattgccgatatggaatggttctactacaagtaatggactaagtgcaacacaagctcaaatgaatgggaatcaacaaccgccaggttcttcagcggcagcaagcaaaccttattacatacctgacaatttattcagtgatttgattgacttgaagggtctcagtggtggaaataagatgggcgtacccactagcatgggtagtgcaaatggtggtcaacctacgattggtggaaagaagtaggtttctctaattggttggtggtgccgtggtgaacgttaggaattctgatcactcagtttggtgtacatttcatgtatatctcccttgccccatttacatgtttggttacattggttcatttcatggctgctgactgttcagtcgagtagagatggtataccattattactgtacataaatgatgagttgcgcattgccttgtttttacttcgcgactcatattttgatatgtttggcttctcatt

SEQ ID NO: 20164 - DNA, 1129 bp, Oryza sativa
  ref <308>: DATABASE ACCESSION NUMBER: AK070493
  ref <309>: DATABASE ENTRY DATE: 2001-12-06
ggcgatgatgagtgaagcctcgatgctatcctccccggcggcaacctactctggcctctggctgtcctcgccctcgtcggtagctgagaaggcgcggaaggagaggaactcttttggtaaggaggatgttgccgatgtcgccgttgcgccgaacacggatgcagatctgagggagccggatgtggtgaagcttagagggagcacgctgccgaaggtccgagggagctagcccccgacgcagtggagttggcggtcatgcgttgaggatattgactcgtagctctaggctctgaaggtgagggtttcttgatcgcctctcctagtctcagcctgcatgtagctgtttgaactgattggatctctcgtgtggatgtctcatggatattggattttgtcccaatttagtagctgatgtttaggaaaatggcaaaatgtttggacaccaaacacaccgtgactaaattttttgcaagtgctgaactcatcagtaaccaattacatattggattttgtcccaatttagttgttgatgtttaggaaaatggcaaaatgtttggacaccaagcacactgtgactaaaatttctacaagtgctcaattttggggagctgaagtgctgaactcttccttgaccaattacaggggatgctttcagaatatgataggcataaaatggatctttgttggtttcttggattagttaagtaaatgtttcactagttttttaacttaaccttgctagtatcacacaatttttcaggcttccctgtatgtttttctaaccttgctaccaaatcagtatttttacttccttggatgtcacattttcagactaccaagctgagaggagagcaacatgcaacagacagtaatcctgtgggtctagggttcagcacttcaaaactgacgaccattgtgagaatacataggaggtgctaactaagatgatgattgaaggtgacaatctagagaaggtgctgcaggaattggaggagatgaagaacttcatcaagacaatgcatagcacttatcatgctattaggatttaaaaagaaaattcatataagagttagtttgtaatcaatttgtctatatactgaaatgacaatattacaagcaaacacaatgt

SEQ ID NO: 20165 - DNA, 1305 bp, Oryza sativa
  ref <308>: DATABASE ACCESSION NUMBER: AK070494
  ref <309>: DATABASE ENTRY DATE: 2001-12-06
gacatcattctctcttttctctatccctctctatcctctccctccttcttatctcgctctccaagccggtggagcggcatgggcggcggccgaagcgggcgacggcgaggtggagcggcagccggagcgggcaacggcggggcggatccgaggggcgaagtgggtcgggcggcggctgatcctcgctgacacctcggtcagcatggcaggagagtggaggcggccgttccgcgatccgccggaaccagcctggcggcggtgacggcgccaccacgaagccgagagcggagggcgatgccaagggggaggacgatgccggagggaacgacgatgaggaggacatcgccggcgccgcgcggtccccctgacccgcgctggcccccgccgcacggaggatgggggcgtcggcggcggcggtgatggaggacggaggcaactggatcgagtgggcggaggaggacaaggagaaggtgtgggcgcgggagtcggcgcccgtcacagagatgcgccccaccggcgacgagcgaagccggcaggcgagaggagaaggaggtgggacggtgacggttgcaaggtcgacggtttggtcgccgttgacgaagacgacgggcagcatggccttgggccgcggtggcagtgggggggaggcacgtggacgcgcccgtgcaaaccttcgcctccgaggacgcaaggacgcaagcggccgtgactagcagcgccgacgcgggagcagggcggcggcggcgctcgggtctacacggcgctagctctagcggcggcggcatcgaggagggtgtcggcggcgcgcggggccccagggcgcaagcggaggatgccgtcgcccccgtctctgtcttctccgctggcacccccaactcgccaccggggcagcctcgccccctcgaactcgtcggcagtgtccgcatctgaccctaccccgtcctggtgggagacggcgaggtcccacatcctcgcgctctccaacatcctcccgccgccggccgattccgacgtcgcggcgctcgccgactccgactgcccggcgcacgcgcttcttcggtcacccgcgcgcctacgccgcgctgtccacggcgctccggtcggggggtagcaccgaccacgctcgccgcagccgccggagctcgcctgctccgccgcccacacacaccgtccgctgcccagaaggagagagagaggggaaagggaagagaagagagaatggagagggaaggaaagagaagtgaggctgacatgtggggcccacatgggccccaccattttaaaattattttttgtgtgcagctc

SEQ ID NO: 20166 - DNA, 962 bp, Oryza sativa
  ref <308>: DATABASE ACCESSION NUMBER: AK070495
  ref <309>: DATABASE ENTRY DATE: 2001-12-06
tggatcgcgggagggagggagggagggagggagggcgtgtagcgtagttggtgtgctcgtgtggagagacagggagggagcggcgacggcgatgccgaagctgccgatggaccagcgaccgcggctgactctcgaggactacatcctcttcttcaccacccgctccggccacggcctcaccatggaccacctcaaccagatcgtcttcatgcacgggttcatcaagttccaccgccagaacaagccggtgatcgtggacgcgctcaacaagttcgacctcatgcgcccgcgccgctccaccgtcggcatcaacgcggccgcgccaccgcgcggcgccgccaagccgtcggacgcgctgctcaccatggacgaggccagggacgacatcgaggacctcggctggcgcgagtgccccgtcggctccctcctctccatccgcgccggcggcggcgacgcggcgccctccgccgcccacatgccggtcgcggccatccgccctggctccaccgccgtggagcgcgtctccccgccgagcatactcagcgcctgctcgcccgcgccccccggggcggtggtgatccggaagcggtgcaagaagggccaggggaaggcggccatgagggggaggaagcggcgcgtcgtgcagttgctcacgctcccgtccgtcgagaacttggcggccaccgcctgacggagcccggggctcctccatctgcagggcggcgacgccatggcctctccttggttcttactagtagtactaatcaccgccagtactaagttgcattagtgtttgttttgggttgtgctcagcttagctctggtgtttaaagttcagttgacgtcctacattttgctttaccgctggtctgtaaattttaccggcttagatgaatccatccgtgttaaaggatcaaacctaacatgcttactcaattaaagctgtttgctgtttcgtgggt

SEQ ID NO: 20167 - DNA, 1986 bp, Oryza sativa
  ref <308>: DATABASE ACCESSION NUMBER: AK070496
  ref <309>: DATABASE ENTRY DATE: 2001-12-06
gatcctcttccacttctgacttctcgccaagggaggttgcttcgctttgcttgctcgcgtcggaaacgcatcgtctcctctccgccgccgcagcggaagcggaagcgcgcgcgagagagagatggcgtccagcgccgtcggcgccgcagtcgccgccgtggcggtgctcctgctgctggctcccggggcggagccgatcgggctgtggctgccgcctcccaccggtggcggggggcgcctcggcggcgccgccgcaccaggcaggtacctgacgcaggaggagcggtggatggaccagaccctcgaccacttcaaccccaccgaccatcggcaattcaagcagcgttactatgaattccttgattactaccgagctccaaaagggccaattttcttatatatctgtggagaatcttcgtgcaacgggattcctaacagctacttagctgtgatggcaaagaagtttggtgcggcagtggtctcccctgagcatcggtactacggaaagagttccccttttgagagtttgacaacggaaaatctaaggttcttgtcatcaaaacaggccttgtttgatctggctgttttccgccaatattatcaggaaactttgaatgctaagtataatcgctcaggagcagacagttcttggtttgtttttggagggtcgtacgctggagcacttagtgcttggttcagattgaagttccctcacttgacatgtggaagtcttgcgagttcaggagttgttctttctgtttacaactatactgactttgacaaacagattggtgagtcagctggccctgaatgcaaagcagcactacaagaaacaacaaaacttgttgacggacaacttcagtctggtcgcaatgcagttaaacaactctttggagcatcaacgttagcaaatgatggtgacttcctctttctactggcggatgcagcagctattgcgttccaatacggtaatcctgatgctttgtgctccccaatagttgaagcaaagaagaatggcacagatttggtggaaacatttgctcgctatgtgaaagattattacataggaacatttggagcatcagttgcatcatatgatcaagaatatttgaagaacacaactccacctcctgctgaatctgcatataggttatggtggtaccaagtttgcagtgaagttgcatatttccaagtggctccaaaaaatgatagtgtccgttctgcaaagattgacacaaggtaccatttggacttgtgcagaaatgtttttggggaaggagtttaccctgatgtattcatgacaaatttatactatggaggcacaagaattgcaggttcgaaaattgtttttgcaaacggctctcaagatccatggcgccatgcttctaagcagaaatcatcaaaagaattgccgtcatacttaattgagtgcagcaattgcggacattgcagtgatctatctggatgccctcaagctccttcacatattgaaggtgactcgtctaattgttcatctccagaagctgtgaacaaagtaagaaagcagatcgtcgatcacattgatttatggttatcagaatgtcaagagcaaggacacgacaatgagccattgctgggcagtagatggagcatagctacttactgattacctgctcgagctaccaaccatatgttcaaaaggccatgagtacaagacaatgcagctgtcatttagactagtatgattcactcaaataatacggacagttggttgttccaagcattctcatggtaccaagcattatcctcaggactgcggtaacaattgctcaaacactactatggtgacgacctctgtcatttgtcaataaccttacaggttgctctcaggctcccccattctgcagaagattaccatgatatgtaaaatgttactgaattatgtacaagataaactttgtttattcatgagactaagatattagataaccgggtacatcctactcc

SEQ ID NO: 20168 - DNA, 3396 bp, Oryza sativa
  ref <308>: DATABASE ACCESSION NUMBER: AK070497
  ref <309>: DATABASE ENTRY DATE: 2001-12-06
ggaatcctgattctatctctcgagcgggctctcctcctcgtcggcgttcctccgcctccgccgtcttctccgccatctcctctctcgagctcgctccctccccgatccgctccgctccggcgccccctgccgccgctccgttccgccggcgcgcccgtggtcctgtgtgtccccccacatcttctggcgcaaccggcaaccctagccgcggatggcggcgcagccttcttcgtcggcgtcgacgggcgctaccaagtttgatgcatcgcagtatgctttctttgggaacaacgcggtggaagaggttgagctaggtggattggaggatgatgatggtgtcgatgctggttttgttggccctggtgatgaagaatacccttctgcttatggaagggatatgtttgaggatgaaggtggaggttcatttactggtgttgatgatcttgctggagcattctcaaagttgaccagaagcatcaatgaaccaacacaatcgggcataattagtcatgggggttcaatttctagacaaagttctactccggattgggcacaagattcatattggcctacgcagcctatatttggagctgaacaagggctggataatgaaagccggtggtctcaaccaccccatttagcccgctttgctgattctagactgcacagaacatcctcatcgccgcagcaagatgctcaatacaatcctaatgaacatattcttggagcaatgccatatctgttgcatagaacttcatcatacccacaacaagagcctcaatacaatcacacagaaccaattccggtacctaaatcatcattcatttcgtaccctccatctggtgcagtatcccattcttcaccaggtcaaccacatcacatgaacatgccatctcctcccacttcattccaaatgcctgtatctgcacaaaatgagttacaccatccccagtttcctcgtggtggtatgcctccagggccacttggtcggaacatggctcatttggattcagcaggtttatcaactaataatttgcaacagaatgctctaaacagtgggccaattcgtccaaatggtgccatgcttacaccaggtttggtgcagcacaatctgcagcgtccaaatggattggtcccacctcaaatgctgtcacgccgtccacaacatggaatggccccaattcaacactctccgccacaattctcacagttccatgctcagatgcttggtcctcggcatcctccaccacaaggtcgtcagatgtacaatcctcagcattcatcacaaatgatgagtggatttgatgcaaatttggcaatgcctgacttgagtgatccgagagcaagagcaatgctgcaccatggagtgcatggccagcattatctcccccaaggttttgagcttgccagtatgaggatggataatgggtggccgcggttcagatccaagtacatgtccacggctgaaattgagaacattgcaaggatgcagcaagctgctactcagatcaatgatccgtacattgatgattactatcatcaagcctgtttagctaaaaagtcagcaggaggtcaactcaagcaccacttctgtccgaccttgattagagatccatcatcctgtgcacggagtaaagatgagccacatgcatatctccaggttgatgctcttggaaggttaccattttcttccatccgcaggcctcgtccgctcctcgatgttgaacaaacctctgaatcaagtgatgacgttactgaaaaatctgcttcaaaaacacttgaccaagaaccaatgctggctgctaggatcacaattgaagatggcctttgcctactgcttgatgtagatgatattgatcgcttgctgcaatttagtcagcagcaagatggtggcttgcaactgagaaacaggagacaggccctccttgagcagctggcagaatcgctgcaactagttgatccacttacacctagtaacaatggacctctctcaccaaatgatgatctggtgtttctccgaatagtctctcttccgaagggccgcaagctactttctcgttaccttgaacttgttagttctggcagtgagcttgctagaattgcttgcatggcagtcttccggcatctaagattcatatttggaaatttgccatctgatagtagtgctgttgagacaacgacaaaacttgctactgctgtatcaacctgtgttgttcggttggagttgagtggactaagtgcttgccttgcagctattgtgtgttcttcgttgcaaccccctctgcgaccccttggacatgctgcaggtgatggggcttctttcatcataaagtctgtactggacagagcaacagagcttctcactgatcagcatgtggcctctacctacagcatgcaaaacagagctctatggcaagcatcatttgatgccttctttgggctgcttacagagtattgcatgagtaaattcgatagtgtgattcatgcattgcaaacacaacctgctgtggcagcagttataagcagggaaatgccagttgaattgttgcgtgccagccttcctcacacaaatgagtatcagcgaaaacagttgctcagtttttctcagcgcacggtgcctgttaacaaccatagttctcatgggtccaataatggacctatgacatcagaatctatcccaagttcagaaagccggaaaatataagttaaatcatagtgtttttgcttctttgggtaatcagtatacttgatacaatggctctttaagatggagactctttccccaatttcctagtaaagaaaagtctatatgaatccaggaaacaagatcgagagggttggagcatcgataaacagcggtaatataaggcaccgagtttactatcgtcgcgacatgtctggtttattatgtactgtagggatgcagtctgttttgcatgcattatgcagatggatgtgtttttgttactgggaagtttcttcctgagttttgttgctcatgaaacctgcctggtatctatctctggctgtagaaggtgcttcttgaagatgctgtttgattgttcttcaagacaagtgtcctggaatcatcaaggtggaatttcaatcaggccgcctttttttcccattttgttttgttcaagggttgaaatgtaactgtcgatcatgccctcatattgaaaaaaatcctagctgtactgaatgttgagcattggtttatggtactatgttttgttattattatttattaatttgtctcttttctgacttctttttttctattctagcggaaggtataattcgggattttagctgagtagagaatgacaatgtagtagtagaaacttgggtggctgtaatgatgtttgcaagtttaaatgcaacaagttagaagcg

SEQ ID NO: 20169 - DNA, 591 bp, Oryza sativa
  ref <308>: DATABASE ACCESSION NUMBER: AK070498
  ref <309>: DATABASE ENTRY DATE: 2001-12-06
gattcgcgattcagaagaagagttctcctagttccagcttccaagtcaagggcaaggcgagcagccagccatcccgcgaaggcgactcgatccggcgacatggtttgcctcgcgtgcttgcttcccctcttcttgatccccgtcgtcaacgccctccccttgctcttccacctcatcctcagcaagatttatcgactatttggatgggaatacaggaggcctgaaagagccccgcctgcttgcccgtttaagcctgcggcaaagaacaatgaaggtgcaagtgaatcaaaacctctagttgaaccccaaagcgctagtactactactaccacagcagaagataagaaagaggattaatgttgtcgagcagcggcgaacgtttcaaacaacagtgttaatgtttgtgaccgtagctattaagaaataattgttatatgaatgaatatactccccacatatgtttgggcagtgattgttgattcccccttccatcatgtaccaaaacgttggtggtagtgggcacactgctaactgcatgctagcaatcgtaaactgctacacctttccattactctgatgctgtgaatgctc

SEQ ID NO: 20170 - DNA, 1906 bp, Oryza sativa
  ref <308>: DATABASE ACCESSION NUMBER: AK070499
  ref <309>: DATABASE ENTRY DATE: 2001-12-06
gatagctgcagccattgccgtcgtctacctctccctactgctgctgctgctgcatggcgcggcgccggcagttcttggctacacgcgaggggatttcccggaggatttcgtcttcggatccgccacctcgtcgtaccagtatgagggtggttttgatgaggatggtaggagcccaagcaactgggacatcttcactcatcaagggaaaatgccgggcagaagcacagctgatgtcgccgccgacgggtaccacaagtacaaagatgatttgaagctgatggttgacaccaacctagaggcttatagattatccatctcctggtcgaggattattccaaatgggaggggtgatgtcaatccaaaagggctacaatactacaatgacatcatagatgggctagtgaaaaatgggattcaagtccatatcatgctttatcagttggacctacctcaggttctggaagacgagtacgatggatggttgagtccgagaattttggaggatttcaaagcatatgcagatgtgtgcttcaaggagtttggagacagggttgcacactggattacaattgatgaacctaatgttgcttcaattgggtcttatgattccggacaattggcccctgggcgttgctctgatccttttggaataagaaaatgtacagtagggaactcatctgtggagccatatatagcagttcataacatgttactggcacatgcatcagtcacaaaactgtacagagaaaaataccaagtcgcaggaaaaggaattatcggcataagtgtttacacattttgggcttatccattaacaaattctactgtcgatttagaagcaacaaaaagatgtcaggactttattgtccactgggtactaagacccttggtattcggtgattacccacaagtaatgaagaacattgtcggttctcgccttccatccttcacaaaagcccaatctgaagatgtcaagggttctctagatttcattggaatgaatcactactactctctctatgtgaatgatcgtcctttgggtaagggcacacgcgactttgtagcggatatatcaatttactacagaggttccaagacagatccaccacctggtaaggccgctccaacatctattggacctgacccacaaggattgagattgatggtgcagtacctacaagaaacctatgggaaccttcccatttatatcctcgagaatggttatggatcaagcaatgacactgtccatgacaatgacagggttggttacctgaagagctatatagggagtatcctgactgcactaaggaatggcgccaacgtgaaaggctacttcgtgtggtcattcgtggacgtgttcgagtacctgacggggtacggccaatcgtacggcctctaccgcgtcgacttcgccgacgagtcgcggccgcggcaggcgaggctctccgctcgctggtactccggcttcctcaagaacagggagatggatgttgatcagagtgagctcgccatggcagcagcagagtcacgagctcagcaatgagttgcatacacctgatttggcagtaacattatagcaagagttaaaattcttgaaagacattgtagcaagagttaagcagagaggaagtcacctggtctggctctctgtcacacatatatttactcaggacttgctcctgcacacgaaatacagattatgtggtataaaacaatgtcatcaaatattatgagatttttttcgtaaccatcgtttggtatctatactctatagtacaattttaatagattccaatggtggtggtgagtgatgaattagccacccacaaccaccaactccctgataagtggggtccttgttgtcagggtgtatgtgacttccaaattaacatatgaaagtgatgcc

SEQ ID NO: 20171 - DNA, 2266 bp, Oryza sativa
  ref <308>: DATABASE ACCESSION NUMBER: AK070500
  ref <309>: DATABASE ENTRY DATE: 2001-12-06
gcccgctgatggcgccgcctcccgccggcgtggaggccgtctgcgccgccgtcatcaaatccacgctaacccaaccccacaaccaccaccacctgctcgcggcctcgccctccctcctcgccgccgtcctccaccgcctctccccgctcccctccaccgcgctcgccttcttccgctccctgcctctcccccacccgctcgacgcctccctcgccctcctccgcctcctcgccccccacccgcgccaccaccccaccgcccgctccctcctccgcgacctctccctccgccacccgctctcctccccgctcctcctcccttccctcctcgccgacccccacctccccagctggctcctcctcctcctctcccagtccgcccgcccgcacgacgccctccgcgtcttcgaccacatgcgcgcgcgcgaggtcgtccccgacgcgcatgcctcctccgcgctcctcaccgcgctcgcgaagtcccggatgacggccaccgcgcgcaaggtgttcgaccaaatgacgcgggccggggttgccatgaacacccacgtgtacaacgccatgctgcacgtctgcttgaaggccggggacgccgcgctcgctgagtctctgatgacgcggatggacgccgccggtgtgccgctcgataggttctccttcaacaccgtcatcgcgctctactgcaggaagggcatgcagtacgaggccatgtgcgtacgggagcggatggagaatcagggtgtcaaggctgacgtcgtcacatggaactcattgatccatggcttgtgtaaggagcgcagggtgaaggaggcgagtcagctgctgagagagatggcgatggcaggggtggcaccggaccatgtcacatacaccacgcttgttgatgggtactgtcgagcaggcgacttggaggaggcggtcaagctgcgaggggagatggaggcaatggggatgctaccaggtgtcgcgacatacaatgcgattctcaggaagctctgtgaagatggcaagatgaaggaggtcaatgtgttacttaatgagatggatgagaggaaggtgcaggctgatcatgtaacgtgcaacacgctgatcaacgcatactgcaagagaggggacatgacctcagcgctcaaggtgaaaagaaggatgatggagtcagggctacagttggatcagttcacttacaaggctctcgtccatggtttctgtaaggccaaggagctggatgaagccaaggaagccttgtttgagatgatgggtgcaggattttcacccaattatagtgtgttgtcatggattgtcgatggtttatgcaacaagaataatgcagttgcagttctagccattcctgatgaacttatgaaaagaggatttccaccagataaagcagtatataggtctctgatccgaaggctatgcaagaaagggtttattgatcttgctgggaatgtgttcaatgaaatgcaaggcaaaggtctagaagctgactgtcttgtgtatgctacacttgcgtgtgcatatctgactgctgggaagccagttgctgctttggatatcttgaatgagatggcgaagaagcagttgtacataacaccccagatttacaactgtatgtgtacctcttatgctgatgagaagggatcgcttaatatgctctgggttcatgccattgagagaggcctaatcacaaagagcgtatacaaagtgatgcaccaagcaagaatgaaatcttcaaatcctgcagtctagaatgcgaggaggggaatgctcatatttcagggatgaacttttcagagactgtgaattgagagtgggctatagaaatagtcttgcactttggtcttttgatgtcgatgatgctcgtgagtcacttaattggttccctctgttggctggcacttaatttactaaatcatagcaattagttagcacaagcagtttctttcttgtaccttccacatgtccctttgcatcattgatttctgctgtctgcaagaggtggcaccttgtgttctctggcttggtaaattcccatctctattccctttcatcctgcccggaacagagtggaggcgtgatgtttgtgatatgtaggtagggcagattgctagtgcttacatttcaatggcctgcctgccatttcttttagttttattggaaggaactctatctttctttatcaccttaattatcaatgcttgcattgcatgtacgcctgtatacatattagttcagttttctatgtctgattgattcttcagccc

SEQ ID NO: 20172 - DNA, 2555 bp, Oryza sativa
  ref <308>: DATABASE ACCESSION NUMBER: AK070501
  ref <309>: DATABASE ENTRY DATE: 2001-12-06
tggtggtaacattcggtgtggtagtgggtatactcgtcctcctcttcgtgctcgtcctcgtcgtcaccatcgagggcgtctgcaagcgccgctcctcctcctgattccgccgcggtcgctagccctaatgcgcgggggcctcctcgtcctgctcctcctcaccgcggccgtcgccggcggcggcggccacgagggctcctcctcctgccccttccacgcccacgacaagccccacgatgatcaccaccacggccacggccacggccacggccacagctgcggcggcggcggggacgactcccaccacgtgcaccatcatcaccatgggcatgggcatggccatgacggcgggatccagcggcggcttctccccgaggagctcgcggaggaggcggatctcgagctcgactccttcggcgatcaccaccaccaccaccaccatcaccatgaacaccaccaccacgaccaccaccatggccacggcgacttccaggccgagttatcacccttgggtatgtggctgagtgccatgggatgctcgcttctggtcagcatggcgtcgctcgtctgcctcgtcctgctcccagtaatcttcttccaggggaagccgtccaagaccatggtggattgccttgccatcttcggggcaggtgcgatgcttggggattcatttcttcatcaactgccacatgcctttggtggagggcattctcatacacatgatcatcagaatcataatcattctcatgagcattcacatgcacactctctggaagatctttctattggtttgtctgttctatttggcattgtgtttttctttattgttgagaagattgtgaggtatgtggaagacaattctcagaaaggggctcatggcatgggccaccatcatcaccatcataaacgacacgataggagcgacaaggccaagttgaatcacgcagaaaaggatcatgaggataaaggcgtaaatcaagcagaaaaggaaccttcgcatgatggtgcaattgagaaaacagatggtgtaactcgtgctgattcaaaatctgcaatccgtaagaggggcttatcttctggttccaattccgctgatagagagcctgtcaattctgaaagtgaccctgcccctaacaaagcattatcaagtgaagattcctctgtttccaattcgaatatggtgttcggctacctcaaccttttctcagatggtgttcataactttactgatgggatggccctagggagtgcttttctgctacatggttctgttggaggatggtcgagaactctatttctgcttgcacatgaacttcctcaagaggtcggagattttggtatcctggtgcgctcaggattcactgtaactaaagccctatttttcaattttctctctgcgttggttgctcttgctggaacagcactggcattgtctttgggaaaagatccagggcattcttctttgattgagggattcactgctggtggctttatttatattgctgttgctggagtcctcccagagatgaatgatcagaaaacaaccgtcaaaagctcgatgattcagttggtttccctgacaatgggaatgctggttgccctcggcatatctctagtagaatgatgacggaatttctggttgcagctttagggcctattgtacttaagccaagcggggaagatgattatatcttcggtttctgctccacggatgcactcagccacagagtaagttcgaatgatggcaagaataacaagcatcactactcactagtagatatgagtacctcttacaataaaacacatccctgttggcatcaacggtagatgtgagtatgtgacccatgacagaattagtggtaagcactgaatggaaccatggaagtgctgcgttcatgggcgtctcaggctctgagtctgccatcttgattccagacatcgcctttctagtttttctagtttctgcactgctccaatagtaacttcccacatggaactgatcactgatgaagcagaccgttcggtaaatcgacggtggtcacccaccggcgtcaccggcaggctcgaccgggagatatgccgatggtcctcctcccccaccggttgatctacctcaggtacagtgctgtctcccaacacataaatgttgtgcaggggtagagagcccatggcagagaacggatatgaaggatctccaataattgcgtgtgtcgtcaggggggaggggggcaacagcaacatggtggtcacgttctcgtggatccaaaactcaaatataggtatagacgccaaaagaacaatgaaatgtgtccttcaaccttactctattttagcctcacttttttttaagtgcttagagcatctttaagagagttatcaaaattggctctcatatattcatataaagatcagtctctccataatactctctccatctctttcttcacactccaactgactccatcccactctccatgttctaatggacatatttataagggttatgatttaatccaaataagttgtaacagtaatggattgtagatgctttgatg

SEQ ID NO: 20173 - DNA, 2601 bp, Oryza sativa; identical to SEQ ID NO: 14706
  ref <308>: DATABASE ACCESSION NUMBER: AK070502
  ref <309>: DATABASE ENTRY DATE: 2001-12-06

SEQ ID NO: 20174 - DNA, 1420 bp, Oryza sativa
  ref <308>: DATABASE ACCESSION NUMBER: AK070503
  ref <309>: DATABASE ENTRY DATE: 2001-12-06
gtccaatccacacgacatgagcgcggcggcggaggcggaggcggcggcggtggagtcgttaccggacgacgtggtcgccgagatcctcctctgcctcccgcctcacccttccttcgtctccggcgcctccctcgtctgcaagcgctggctccacctcatccgcagccccagcttcctccgccgcgtgtgcgcattccatcgaacaccccccgtgctcggcttcttccacaactaccgggacctccccagcttcgtccccgccgagggcgtccccggccgcaaccgcatggacggagtcgacgacggcggcgacgcgcggatgttcatcgactgccgccacggccgcgccctcctccgccgatacgactgggccgacctggtcgtgtgggaccccatgaccggggagcgccgccgcatcgccggccccaaccagaagatgcagggcggcggcgccggcacctcccgccgcagcgccgcgttgttctgcagctgcgatgtttccggaggcggcggcgaccaagactgccactctagccccttccatgtcgtcgtcgtgttcaccggtggctgccgcgcgttcgcctgcgtgtactcttcgctgaccgacgcgtggggcgacctgatctcaacgccggcgccattgccatgtgagctctgtgacacgccccctgccctggttggggaagcctcgtattggctttcttatgggggactcatacttgagttccaatttggcagccaaagtttaactctgatgaaacggccattggagatgcttgccgatgtacgtcttgtgaggttggaagaagatgggcttggtcttgccttcatcaaggattccaccttgcacttgtgggcgcgggaggttgccgatgatggtgcgccgaaatggaaatggataccgcgcagggccattgagcttgacaagttcctgccgatgccaagggtgctcaccggaaaatggtgtggtgaaatgtttgtttcgattagtgggttctctgaggatggaaatgtggtgtttatacggacccttgccggcgttttccttgtttggcttgaagcattgaagttcaagaagatgtctgaccccttatacatgatgactgttcacccatattcaagcttttatgtcccaaatggtatgggaagttctctctctttctttatcctctgctgtttagtattgtttttagctaatgaaaagatttccagtgtctttcttttggtgctgaacccagtattatgtgtctcattgtggtttaggagtgaaagcaaatagagtatacaatagaccaaacttttccaagtcactttcattttatggcttgttgagctgatgttcaatagtcagcattaccactatggttggaagtggattgattctacttgcgccaatttcaataatatatcatttatgatt

SEQ ID NO: 20175 - DNA, 2607 bp, Oryza sativa
  ref <308>: DATABASE ACCESSION NUMBER: AK070504
  ref <309>: DATABASE ENTRY DATE: 2001-12-06
gggcgctaccgtcttctcgaggaggaagaagaagaagaagaagaagaagagagagagagaggagaacacctgaaaccctaaccctagcgaggcaagaggggaggggatggcgaagaagctcgggaagaaggcgcgcaagttcgcgcgcaagcacctccagtccgccgccaagcgtaaccgcaagcagcgctcgcagttcgcccgccgccctcgcagaggtgggagcggtcgcgggaacgagcgcgatggcgatggcgatgacgagatgccgcagcgagcaatcgataacgtcatgaacaacggtgatgctgcagctttggttaatggcctagagttcccggaagatgaatgtgaattaaacagtgatctgtctgatagtgatggttatctttcagaggactctgaatgtctatattattctgacagtgaggatggcaatgctgtcaatgattgttttgtccaagatggtttagatggcgagaatgataagatgaatacagagataaaaaaacaaaagaagaagttgaacaagttgatggacaaggaccctgagtttgtaaactaccttgaaaaatggcaatcagagttgaagagtgatggaagtaaagaggattctgatgaagatgagatggactctgtggataatgatgctgactccagtgatgaaaatctttcaaatgataagatactgacaaggaagactataagtgaatggtgccagttagttgcaaaggaacctaaagcaccttctctacgcagcctattaaatgcttaccgggatgcttgtcgatttggtgtttccaagagcccttctgtgcagagaattcaaagtactgaagtgtttcatcagataataacatttgtcctttccgaagcagacaacattttccatgctctcttagaaatttcggatgatgtaaacaaagggaaaattatgaatctgagaagtgcaaagaaatggaaaactattgaaccactcgtaaagtcttacttgcagaattctcttgatctgcttagtcaacttactgacaaccaaatacttgcatttgtcttgactcgactgagagcatccgcagttcttttttctgcatatccatcaacatcaaggaggctcctcaagatcttaattcgtttgtgggccagtggagatcataacttgtctctgtcctcatttcttatgatacgggaagtggcttcgctgttaccagaatgtttggatctctgcttaaataaatcttataatacataccttgctagttccaagcttgtgaatgaaggaaatataaagcacattgattttttaatggactgtctagtggagctctattctcttgatgttcagaaatcatgtgagagggcaactacctctataggacaactgaattctattctcaggcaggcttgtaaaacaaaagaaaaggaagacctcaggaaggtagataactggcaatatattaactgtgtaaacctatgggttaggtttctttgttgtaactacaaggactacaatatgcatccattactttcttcagttgttcaaataataagaggagtggctcacttattcccaggcacacgttacttaccattgagactgaggcttgtgcagatgctgaatgagctttctagttgcagtcagatgttctttccaattccatctttgttatttgattgcctagaatttagagatacctctcagaaagaacaaggaaaaaaagcaaaggtcaacttttcatcactattgaaggtgccaaagaatatgctgaagtcaagagacttccacgaggagtgcattctttcagctattgatgttctgtctgcacattttgcccaatggtgctatcatgtctcttttccagaagtagccaccattccactgatcctcctgaaaagattacatgagcagacaacaattgaatcacttcgtcgtcctattaaacgactgatagaccaggtagacgagaacaagaacattgtagaaaggaagagagacggggtctcattttcacctaatgatacaacatcagttgagagcttcgttcaggaccttcaggcagagaagagcggtgcaaaaatttcacagttttacaaaattgtaccaaaaaaactaaggtagaaaaagaagtgctatgaaatgcgaacacacttttttggctaccggattatcggaagaaggatgctgggagcatgaatgtcgcacgccatatcggtcaactcatttttctctgggagatatttatgaatctgagttgatcacctcttatgacatcaacaatggcattgctcgagttgttgaaaccggtgaagtgaatgagcctcttgctgagcaaagttttgagcgtgaatgttaccgtttattgatgcattgggcaatgagcctcttgcttagcaaagttttgagcgtgaatgttactatttgttgatgcattactgtggaggttgagactgttcttcctgacgaaaggattttgtgatctacttttgcacatgacttatgatttgccagacaattattcgattagcatttcactgtttccttaggcagatcgattaggatattgaaatcatattattgtctatttgaagggactggctgtaatccctact

SEQ ID NO: 20176 - DNA, 1088 bp, Oryza sativa
  ref <308>: DATABASE ACCESSION NUMBER: AK070505
  ref <309>: DATABASE ENTRY DATE: 2001-12-06
gggaaatctaatcccccgcagctactaattactactaaccgttaaaagtagccgccggttaatattcgatcgatcgatcatgtggtgtacgtgggcgttggggcgggtggtgttggcggtggtgttcctggttgcgttggctgccggcgatgcagcgccgcccaaggttcaccggaaccacggcaagttcacggcggggccatggaagcaggcgcacgcgacgttctacggcgggcgcgacgggtccggcacgctggacggcgcgtgcgggtacaaggacacgtccaaggaaggctacggcgtgcagacggtggcggtgagcacgccgctgttcggcgccggcgccggctgcggcgcctgctacgaggtcaagtgcgtggacagccccgacggttgcaaggtcggcgccgcccccttggtcgtcaccgccaccaacctctgcccccccaaccccggccagtccaacgacaacggcggctggtgcaacccgccgcgcgagcactttgacctctccatgccggcctttctgcagatcgcgcaggagaaggccggcatcgtgcccatatcgtacagacgggtgccgtgtgtgaaggtgggtgggatcaggtacacgataaccgggaacccgtacttcaacctggtgatggtgtcgaacgtgggcggggcgggtgacgtggcagggctatcggtgaaggggaacaagagggtgaagtggactccgctgaagcgcaactgggggcaggagtggcagacgtcggaggtcctcaccggagagtcgctgacgttcagggtgatgaccggcgaccaccgcaaggccacctcctggcacgtcctcccccccgactggcagttcggcgtcacctaccaggctaccaagaacttcaactaattcttatcaatcatgccaacccaacccaacccaacagcaaaatatgaaggctctcttacatgcatgaatgctgactactgcaaatctggatcgaaccgatgatgatcatactagctacaaatgtatatatgtgttaacgaggtgaaaggaaagcgaagaaatttaatttgtgcatgaaaataaaaaggatctgtttcat

SEQ ID NO: 20177 - DNA, 1588 bp, Oryza sativa
  ref <308>: DATABASE ACCESSION NUMBER: AK070506
  ref <309>: DATABASE ENTRY DATE: 2001-12-06
gactcaagccaagaaatcgagctgctgctttgtttgatcgcaatggcaatggagcctcctcccctgttcctgtgccccatctcgatggagctaatggaggaccccgtcacggtggccaccggcgtcacctacgaccgccggagcatcgagcggtggttcttcaagtacggcaagacgacgtgcccggccaccatgcagcggcttgcttccttcgacttcactcccaaccacaccctcaagcgcgtcatctcgtcgtggctggaccgcgcctcctcgtcgtcgtcgccgagcacggccggctcgccggcgacgacgtcgtcgtcgtcgtcgtcaaacgcgatggagagggagaggttgccgtcggtgctcgctggcattgaggagacgccgttcaaggcgaccgcgctcaagaacctcaagtcctgcatggccggcgacgaggcggcgcgggaggatttcgtggcgtgcggcggcatccaggtgctcggccgggtcatgacgcaggcgctggaggagagctccgccgggggggacttctcggcgttccggacgtgcgaggaggccgccgccgtcctcgccacgctgccgctctcggacgacgcgtcggtggagctcctgctcaagccggagtgcataaggcccgtgtccgtgctggtccagcgcggcagcgccgaggcgaggctgcacgcaatgtccatgatctccaagatctccagggccagcgtccgcgactggaccgcggaggtcgacgtcgacgacatggtcaaggccctcctcgagctcctctccgacggcgcctccgcgaagctgagctcccgcgcgctcgacgtgctcctcgacgtcacggcgcggtactcccgcggcgcgcggcgcgccaaggccgtggagctgggcgccgtgcgcgtcctcgccgagctcctcctcgacgccgaccgccacgtcgccgagcggtcgctcctcctcctgaagcgcatgtgcaagtgccccgaggggcggctggccttcgccgagcacgggctggcggtggccgccgtggcgcgcgccgtgctccgggtgtccgggctcgccacgaggctcgccgtcaacgtgctgtggctggtggcgtgcgccccggcccccgccgagagggtgctggaggacatggtggtgggcggcgccgtggcgaagctgctggcgctgatgcaagtggagagctcgccgtcgaccaaggacaaggcggtgaagatgctgcgagcgcacggcgcgttctggaggcagtacccttgcttccccacggacctcaaggactacctcaaatctctcaactgatcatctttcagagtgatcagtaaagtgatttgtaaattgtaaattaagagaaattggatgtgtattgttttgtaggaatacaggagattaaagcaggacattcagcatggtatatgcatctgtgtttgtgtgtgggctgtctaaaatcgcatgaattctgcgtgattttcatagaaatttgaaattaaacaattcaagtgcattaggagataggaaaaaaaatctaggtggtgttttttttctaaagatgaagattaagattaagattaagctttttacg

SEQ ID NO: 20178 - DNA, 1260 bp, Oryza sativa
  ref <308>: DATABASE ACCESSION NUMBER: AK070507
  ref <309>: DATABASE ENTRY DATE: 2001-12-06
gatctgccaattctgccatggcgaccgcaggaatatctttttccccggttggtcccgtcccgttcgaggacgtcgacggcgagctgccggcctccgagcggccggcgccggaagggattgacgacggcgacgaccacctcgccgacatggtctcgtctctcccgagcaagatggaggtcaacctgccgctcaagctacgcctctaccggggcttctggctggcggagatccacgtcccggcggccgtggccctgcggcggcgcttcgttccccgccccgacgacgtcatcgtggccagcctccccaagtgcggcaccacgtggctcatcgccctcacgttcgccaccatggcacgccacgtgcaccaccctcccacctccgcccccgcctccgcctccagccacccgctccaccgcctcaacccgcaccagtgcctccctttcctcgagggcctcttcgcccctgtggtgaagaggccaaactcgacgcactcccctctccgcgcctcatcaacacgcatatgccactcgctatactaccgagcgccacgccagccactaccacagctaactcctctggcaacagaggaggctacaaaattatctacatctgtcgggaacccaaggacatgatcgtgtccatgtggcactacacccggcagctgatgcccgacgtgtcattcgccgaaaccctcgagtcctaccgcgacgacgacggtggtgccaagatatacgggccgttctgggatcacatcctcggctactggcacgcgagcaccgaggtgccggacaacgtgctcttcctgcggtacgaggagttgctgcgtgaccctaccgggaacgtccggaagatggcgcggttcgtcgggctgccgttctccgaggcggaggaggaagccggcacggttgaagccatcgtggagctctgcagcctcgaccgtatgaggggattcgaggcgaacagaacgggttacgttgatgcgcagcgaaagattccacgtgagacccttttccggaagggcgtggtcggtgactgggtgaaccacatgacgccggagatggcgcgccgtgtggatgacatcgtcgctgacaagtttagtggcacaggactcacgtttaaatgagatttacagctatgtgcaaacatagataggtcagtgaagttgcttgtgaatagaatgtatctcgcaaatacaactattttctcgccgttcacccgattgtattaattaatttaggataaaaatctgaatacttgggc

SEQ ID NO: 20179 - DNA, 1519 bp, Oryza sativa
  ref <308>: DATABASE ACCESSION NUMBER: AK070508
  ref <309>: DATABASE ENTRY DATE: 2001-12-06
gatgctgctctggaactacaagagaggtagcagcaatggcggctgaggtggaggaggggaggacgggtatcccgtctctgctctcctccgccgtgggggaggagaccatcgcctccaacatcgcccagctgataggctggacgccactgattgagatgaagaacatccccaagaaagaaggcatccaaactcgtttgatcgggaagatggaaacataccaacccctgttctcggtcaaggacagaactgctctcagtatgattgaagatgcagaggagaaaggcctcattactcccggtgttacgacactgattgaaccaaccagtggcaatcttggtatcggtttggtattggttgctattcagaaaggctacaggtttattgctgttatgcccgctagatattcacctgacaagcagatgctattgaggtttttgggtgctgaactgatattaacagatcctgcaggtgggtacaagggtgcgatggacaaagtggaagatctcatgaagatcatgcctaattatcattgttttaatcaagcaaccaacccagcaaatccagaggcacatttcaaatggactggacctgaaatttggaaggacacagccggcaaagttgatttctttgtaaccgcagctggaacaggaggcacattgtcaggtgtaggaaggtacctgaagatcaaaaatccatctataaatatagtgtgcgtggaaccttcagaaagtgctgtaatttcaggtggttcaccaggatcacacaagattcaaggcactgggccaggtttcataccgaaaactttggacaggtccatcatcgatgaagttgtgaccgtaagctcagaggaatccatggcaatggcaagaaggcttgcaaaggaagaggggcttcttgttggcatatcttctggtgcaaatgtagctgcttgcatcaagattgcagctagagaggagaacaagggtaagatgattgttacgatgttcccgagtggtggtgaaagatacatgagctctgatctctttgcagatgtaagggaggaatgtgctaatatgaccttctaatgtcttggtgcagctctcctttgctgtactgcaaagagatttgcttcagaattcagaccacacgctccattttgctatgtttttcttctcctttcctgttttgagaacaaaaaaaatgccatattatttcagaaatcgatcccgtagattatgaaattggaagctcaagagtgctaatgcatccaggatcttgatgttgggcgagaacatcattcctgtgattttgggcaccgaatagtacaagaaagccatagtgtcttttggagatccaatactcctgcagtattgctgggctgggcaaagctttacaattctaagcttgatgcattgttgttttagttatctctgaattattggtatgttgccagtcggcatgttcattattttgggcttcaatcacttttgcaattttcttgataagagttaattgactttttcattatttattatagagg

SEQ ID NO: 20180 - DNA, 1870 bp, Oryza sativa
  ref <308>: DATABASE ACCESSION NUMBER: AK070509
  ref <309>: DATABASE ENTRY DATE: 2001-12-06
ttgtcggcggccggctcacctctctccgccgcccggcccgctcgctgatgctgccgccgccggcttcacgcgggaagaagtctcagaaaccctaggcgaaagccgccacacatttcctgagtcctctttcccgcggtgcggcggccggccggggcggcgctccatacacccatcgatcgttctgaaccagcaggcatggcgggctccgtcgtgacgaggagcccactgtgctccatcctcttctacgtcctcgccacggccgccgcggcgacggcgacggcgacgcttgtgggcaacatcaccgccgacgaggagtactgggccaagcgctccgaggtggcgcgctcgttcaaccgcgccgcctacgtcagcgaccccgtcgccgtgctgaacaggttcaacgaggacgtgctgaataccacgacggcgacggcggcggcggcgcggcggtcgctgatgaggaggtaccggcgtcgtggcccgtgcacggtgacgaacccgatcgacctgtgctggcgctgccgcaagaactgggcgagccgtcgcaagcggctggccaagtgcgccatggggttcggccacaaggccaccggcgggctcgccggcaagatctacatcgtgacggacgccggcgacgagcacctcgtcatccctcggcggggcacgctccggcacgccgtgatccaggagcggccgctgtggatcgtcttcgcgcggagcatggtgatcaggctcgccaaggagctcatcgtcaccagcgacaagaccatcgacggccgcggcgcgcaggtgcacgtcaccggcgcgcagatcacggtgcaggcggtgagcaacgtcatcatccacaacctccacatccacaactccgtgccgcgctccggcggcctcatccgcgactccatgcaccacttcggcatccgcggcgagagcgacggcgacggcatctccgtcatgggctccagcaacatctggatcgaccacgtctccatgtccaactgctccgacggcctcatcgacatcaccgacggctccaccgccatcaccatctccaactcccacttcaccaagcacgatcacgtgatgctgttcggtgcacgcgacgactcgccgaaggacaagatcatgcaggtaacgctggcattcaaccactttggcaaggggctcgtgcagaggatgccgaggtgcaggtttggattcttccacatggtgaacaacgactacacgcactggctcatgtacgccatcggcggcaacatgaacccgacgatcatcagccaggggaacaggttcagggcaagcgacgacatgaagctcaaggaggtgaccaagagggagtacacgagctacgacgagtacaaggagtgggtgtggaagtcgcaggacgacctcttcctcaacggcgccttcttcaacgagtccggcggccggaacgagcgccggtacaaccggctcgacctcatccaggccaggaacggccgctacgtcggccggatgaccaggttcgccggcacgctgccatgccgtgtcggcaagaaatgctaggcatgcatatgcttgctactcaccgtgtgcgtgccaaggacatcatcatgatgatgcagatgcagagaggagaggaattttccatgacgatcgcatggatatttatatgtatgaattatatttcatatatataatatggttcggcagtaatgcaatcatttgcaaaattgcataagccttagagaacagggttcgaaattttggaccaaaattttggtcatttcggtcctctccgatacgatattacttcgccgaaatttttcattttttcaattttttcatgaattttggtaatatttgttcaaattgaactaaattttgtgatatc

SEQ ID NO: 20181 - DNA, 1195 bp, Oryza sativa
  ref <308>: DATABASE ACCESSION NUMBER: AK099141
  ref <309>: DATABASE ENTRY DATE: 2002-08-28
gattcttagtgaccaccccccatatcacatcctctccttcctcttcctctgctcactcagctctcccccgcgcgcgccaccgtcgtcgccatgtcgggcaacatcgccttcggccgcttcgatgactccttcagcgcggcctccctcaaggcctacgtcgccgagttcatctccaccctcgtcttcgtcttcgccggcgtcggctccgccatcgcctacaccaagttgaccggcggcgcgccgcttgacccggccgggctggtcgccgtggcggtgtgccacgggttcgggctgttcgtggcggtggccatcggcgccaacatctccggcggccacgtcaacccggccgtcaccttcggcctcgccctcggcggccagatcaccatcctcaccggcgtcttctactggatcgcccagctcctcggcgccatcgtcggcgccgtcctcgtccagttctgcaccggcgtggcgacaccgacgcacgggctgtccggcgtgggcgcgttcgagggcgtggtgatggagatcatcgtcaccttcgggctggtgtacaccgtgtacgccaccgccgccgaccccaagaaggggtcgctcggcaccatcgcgcccatcgccatcggcttcatcgtcggcgccaacatcctcgtcgccggccccttctccggcggctccatgaacccggcgcgctccttcggccccgccgtcgccagcggcgactacaccaacatctggatctactgggtcggccccctcgtcggcggcggcctcgccggcctcgtctaccggtacgtctacatgtgcggcgaccacgcccccgttgccagcagcgagttctaattacccatttcgccatcggcaacacgcataaaaatggtggtcactccatcgtcagaatcttgtgaggatgtgttgtgaaggactgatttggttcagatggggaagaaggcttttgttgcgaggatgtgacacttgggtgatgatcgatccatgtttagtttcttcttgattaatttgtaatgtgatcagtgtggagcaagttggatgagatgcatgtttaagatcgaacacttctgttgagtttcattgtgagatttcatttgattcgggccatgtcatttcagtttgtttgtagcctccaaaataagcttgtgtcttctcctcgcaaataggaaatcagaaataaaattgttccggg

SEQ ID NO: 20182 - DNA, 1517 bp, Oryza sativa
  ref <308>: DATABASE ACCESSION NUMBER: AK070510
  ref <309>: DATABASE ENTRY DATE: 2001-12-06
gacacatgcagttgtagtagcacttaagccttcctctctagctagcatctcttgtgtcaggaagttggaagggatttctggctagtttctagctggtgtctcctctcctcttcctaaccttctcactgattaacaccttagagttagttaataaccttcatcaccagtagcaatggcaggaggtttcttgtccatggctaacccggcggtcaccctctccggtgttgcaggaaacatcatctccttcctggtgttccttgcaccagtggcgacgttcttgcaggtgtacaagaagaagtcgacgggagggtacagctcggtgccgtacgtggtggcgctcttcagctcggtgctgtggatcttctacgcgctggtgaagaccaactcgaggccgctgctgaccatcaacgccttcggctgcggcgtcgaggccgcctacatcgtcctctacctcgtctacgcgccgcgccgcgccaggctccgcaccctcgccttcttcctcctcctcgacgtcgccgccttcgccctcatcgtcgtcaccaccctctacctcgtccccaagccccaccaggtcaagttcctcggcagcgtctgcctcgccttctccatggccgtcttcgtcgtccctctctccatcatcttcaaggtgatcaagaccaagagcgtcgagttcatgccgatcgggctctccgtctgcctcacgctcagcgccgtcgcgtggttctgctacggcctcttcaccaaggacccctacgtcatgtacccgaacgtgggcggcttcttcttcagctgcgtgcagatggggctctacttctggtaccggaagccgaggaacacggccgtgctgccgacgacgtccgactccatgtccccgatctccgccgccgccgccgccacgcagagggtgatcgagctccccgccggcacgcacgccttcaccatcctgtccgtgagccccatcccgatcctcggcgtgcacaaggtcgaggtggtggccgccgagcaggcggccgacggcgtcgccgccgccgccgccgccgacaaggagctgctgcagaacaagccggaggtgatcgagatcaccgccgccgtgtgacgacgactgatctcgacgacgacagattctcgctactgatgaagaagacgacgacgatggccggatcgatgacggacagaatttagcagtgtggattactaccgaactttaattagttggttaattattggattacaatgtggtaagagtgtgtcattagcagctagttaacttacttaaattaattatcttgttcagtcagtcagtcagtcagtcagtcagtcagctttgagtgagtgagtgagtgatctcgacgtagtttgctggttggtgtaataagaaaaaggcgatctactagtagtctactagctagtacgcatgcatgtgtgtgtgctctacttaccgtgttgcaatctcatctctttgtacttacaactcagaaatcaatggaagattgtgacaggtattattagtagttact

SEQ ID NO: 20183 - DNA, 3134 bp, Oryza sativa
  ref <308>: DATABASE ACCESSION NUMBER: AK070511
  ref <309>: DATABASE ENTRY DATE: 2001-12-06
ggtacgcatcccagcgaaacctcctcagaatcgcacgcgatttctcgcttccttccaccgaggcgagcatcgtccgccggctcctctgcatctcggcgaatcctcctcggaatcacgcacctccgcgcttccttccgccggtgcgagcgttgcccccagtttttcctccgcatcctagcgaatcctcctcggaatcgcgcgcctccgtgcgcgattcctcggttcatttcaccgttgcacacgccgtctgtcgatttcctctacaactcagcgattcctcggttgattctgccggcacacatgccgtctgcgatttcctctacaatccagcaatttcagttgatttcgtcagctcctttgctcctacctcctcaattgattctgctacaagtgtgatgtgagctcaacatcagcctgcgtttcaacgccgactaccctgtggagaataaaaaagagtgatgcccccccgagtgaatcccctttgtgtacacgttctgctagtgtgtttgtggctagtgagtcagttgtgacaacaaatagtagatgtatagagaagcgctgaattatttcctcaataattcaggcggtaaaaagaagtcagaaacaagtgttgaagctagtggtacagagatgcaatagactacaggtaaattattgataagttatccatgaaatgcttctatagacagtataaaacttatagttgataccctaggaggatcatgatcttcctctgtatcatgtccggtatcattaggtttccacagttgataccctaggaggatcatgtgataagtatcattatgtgtgatatctgtgtagtatcgcatgatcttacttaggtaacatgtctggtaacatgatccttgtgggtttcacagatgatactttagtaggttcgtgtgatacctgtgaagtatcacatgatcctacccaggtattatgatacatgatcctcaaagtatcattatgtgtgatacttgtgaagtatcacatgatcttatccagtatcatatctagtacagtggtttcctgtgggtttcacagatgatacttgagtaggatcttgtgaaacctgggaggtatcataatcctccttaatatcatgtccggtatcatcaggtttcataggtgatactttgggaggatcatgtgatacctgggaggtatcatgatcctcctctgtatcatgtctggtatcataaggtttcagagatgataccctaggaggatcatcctcctcaaagtatcattatgtgtgatacctgtgtagtatcgcattatcctgcttaggtatcatgtctggtaacatgatccctatgagtttcacagatgatactttagtagattcgtgtgatacctgtgaagtatcacatgatcctacccaggtatcatgatatatgatcctcaaagtatcattatatgtgatacttgtgaagtatcacatgatcatgtctagtatcatgtctggtacagtagtttcctgtggatttcacagatgatacttgagtaggatcttatgaaatcggggaggtatcatgatcctctttagtatcatgtccggtatcatcaggtttcataggtgatactttaggagatgtacagtggtttcctgcaggtttcattggctaaatcaactgattttgttaattggagatgtaacaagagattattgaaaaggtgaaagaataaagaaaatatcattttaatgatgaatattagatcagttgaaccaaagaatcacatcatttcaaagcaaagatccaaatgattttaacattttgctgcaagtatcatatgatttagcatatatacacacacatcctcgcctctgttgcaaacaccccatgtgaatgaacaaatacacacaaaaatggggagttttagattacttcgatttcaattttggatgagatatgaggagtcgcatccacaggttagggattcaacgaaacctagaaatcgcaaaaatggagaaaggaaaatcaaaattaggaaatcgatgtatatgtgtaacatcccggcctagggcttaataggattaatagaatactcatatcaacaagttgcaacttcttttccggaagccaatctccaaagaactccagggttaaacgtgcttgatctggagcaatttgggatgggtgaccgaccgggaaattcttcccgggtcccgggtgcatacgagtgaggacaaagtgtgcagaaaagacatgtgttggtctgtgagggcagtctatgatctatgaaagctaccagatgtaagtgggcccggcctgggggaggcgggacgttacaaaatggtatcaaaggtatcagagccgactctcgcggtttcacgggcgctggcactggacacatggacgtggccaagagaggacgttcctggcctagggttgatcgacgggggcgtcgatctctcttaagggggtgagggtgtaacatcccggcctagggcttaataggattaatagaatactcatatcaataagttgcaactttttttccggaagccaatctccaaaaaactccagggttaagcgtgcttggcctggagcaatttgggatgggaagcgtgcttggcctggagcaatttgggatgggtgaccgaccgggaaattcttcccgggtgcatacgagtgagcacaaagtgtgcagaaaagacatgtgttacaatatggcatggatgaaaaaaaggaatgagagaaatggggacgtgaagaatctgttgttggtggagactacgagtgaggacaaagtgtacagaaaagacatgtgttggtctacgagggcagtctatgacctatgaaagctatcagatgtaagtgggcccggcctggggatgtactcagatacctggtgctatgatatctggtgatccctgaaagaacatgtcccgtctcgaccgagtccaacgggataccggtatttagcatttccgttttttaattgctaaggacatatatatatatatatataaatacccttaaattatcttttattgctgattaagttattttacagcttattagctgtaaaccaaacgatcaaactgcacaaacccagaacgttttattaatgtggaaccgagggagtatattgcatttcctaatccaaccagcactcccagttcc

SEQ ID NO: 20184 - DNA, 2023 bp, Oryza sativa
  ref <308>: DATABASE ACCESSION NUMBER: AK070512
  ref <309>: DATABASE ENTRY DATE: 2001-12-06
gaacgcctcgtctgaacacaaaaccccgtaaaaatctccgcctccgccaccgccaccgccgccgacgccgccatggccgccaccgccgccgcggcccacaccctcctccacctcgcggccccgaggaagccctccgcggggcccccactcccgcccgccacccaaccccaacgggatcctcgtcgcatatcgatgttgacgtggcgacggaggccgacctgagggagaacgggttccggagcacgcggcgcaccaagctcgtctgcaccgtggggcccgcctcctgcggcgccgacgagctggaggcgctcgccgtcggcgggatgaacgtcgcgcgcgtcaacatgtgccacggggaccgggagtggcaccggggcgtcatccgcgcggtgcggaggctcaacgaggagaaggggttcgccgtcgccgtcatgatggacaccgaggggagcgagatccacatgggggacctcggcggcgccgccgccgccaaggcggaggatggagaaatatggacatttagcgtaagatcctttgaggcacctcccccagaacgaactattcatgtgaactacgaaggcttcgctgaagatgtgagagttggtgatgagcttcttgttgatggtggcatggctcggtttgaggtggttgagaaattaggaccagatgtcaagtgccgttgcacagatcctggtttgttgctgccacgtgccaatcttacattttggcgggatggtagtattgtccgtgagaggaacgctatgctacctaccatttcatcaaaggattggcttgacatagactttggaatttctgaaggcgtagattttattgcagtttcgtttgtcaaatctgcagaagtaattaaccatctgaaaagctatatagctgcaaggagccgtggcagcgatatagcagtcattgccaagatcgagagcattgactctttgaagaacttggaggagataatccgtgcttcagatggtgccatggtagcccgaggggatatgggtgcacaaattcccttggagcaagtcccctcagtacaacaaaagatagttaaactgtgcaggcagctcaacaagccagtcattgttgcgtcgcagcttcttgaatcgatgattgagtatcctacgcccaccagggccgaggttgctgatgtttctgaagcagttcgtcagcgtgcagatgcgcttatgctttcaggtgagtcagcaatggggagatatccagagaaagctcttagtgtcctccggagtgttagcctaaggattgagaagtggtggagagaggagaagcgccatgaggaactggaacttaaagatgtttcatcttccttctctgacaaaatatcagaagaaatctgcatttcggccgctaaaatggccaacaaattggaggtagatgccgttttcgtctacacaaacactggccacatggcctcactgctctcgcggtgccgtcctgactgcccgatcttcgccttcacgacctcgacatctgtgaggagacgattgaacctccaatggggcctcatccccttccgcctcagcttctcggacgacatggagagcaacctgaaccgtaccttctcgctgctcaaggccaggggcatgatccagtccggcgaccttgtcatcgcgctctccgacatgctgcagtccatccaggtcatgaacgtaccttgagaatcatcatgctcccctctcgtgtttgtttgttctgcccaaaacggaacacggctttagttgacatcatcttaggggcggttttctggtttgaaatttattcgtttgttctccattgtgttagacgacagaaccagagaatgttacaacaataatgctgcaacttccagcgcgttgtaaactctatgctatttagcctgatgtataaggccatgaactgttttgtcgcttactatgataggctatgtatttaccaataaacccttctatttaagctatgtaagaattttcctcatcagaaattactccttgctagagcccagtaaagattcttt

SEQ ID NO: 20185 - DNA, 2099 bp, Oryza sativa
  ref <308>: DATABASE ACCESSION NUMBER: AK070513
  ref <309>: DATABASE ENTRY DATE: 2001-12-06
gactggtaggggacgacgcatcgatcgatcccgacgcctttgcgcgcgcgcgcaaaatcgatcatttgatacatatctcgcgtgaatcgtcgactggtggttgcattgtgttgcaatgagcaaaggcgcgatcatcggcgcgtcgaccgtgctggtggtggcggtggtggcggcggtgtgcgtggtgtcgttcaagaacgggtcgagcaatgccaaggaggacggcgagctgtcgacgtcggtgaagtcgatcaagtcgttctgccagccggtggactaccgggagacgtgcgagaccacgctggagcagacggcgggcaacgcgacgaacccgacggacctcgccaaggccatcttcaaggcgacgtcggagcggatcgagaaggcggtgagggagtccgccgtgctcaacgacctcaagaacgacccgcgcacgtccgacgcgctcaaggactgcgaggagctgctcgactacgccatcgacgacctcaagacgacgttcgacaagctcggcgggttccagacgagcaacttcaagcgcgccgtggacgacgtcaagacgtggctcagctcggcgctgacgtaccaggagacgtgcctcgacgggttcgagaactctacgtcgacggaggcgtcggagaagatgcgcaaggcgctcaagagctcgcaggagctgacggagaacttcctcgccatcgtggaccagttcgccgacacgctggcgaacctggacatcaccggattcagccgccggctgctcggcgacgacggcgtgcccgtgtggatgtccaacgcgaagcgccggctgctggaggcgaccccgggctccaaggagttcaagccggacgtgacggtggcggcggacggcagcggcgacttcaagaccatcaatgaggcgctggccaaggtgccggtcaagagcacggggacgtacgtgatgtacgtgaaggccgggacgtacaaggagtacgtgtcggtggcgcgcaacgtgacgaacctggtgatgatcggcgacggcgccaccaagaccatcatcacggggaacaagagcttcatgctcaacatcaccaccaaggacacggccaccatggaggcgatcggcaacgggttcttcatgcgcggcatcggcgtggagaacacggccgggtccaagaaccaccaggcggtggcgctccgcgtgcagagcgaccagtcggcgttctacgagtgccagttcgacgggcaccaggacacgctctacacccacaccagcaggcagtactaccgcgactgcaccatcaccggcaccatcgacttcatcttcggcaacgcgcaggtggtgctccagaactgccggatccaggtgcgccggtgcatggacaaccagcagaacatcgtgacggcgcaggggcgcaaggagaagcactccgcgggcggcacggtgatccacaactgcaccatcgagccgcacgaggacttcaaggccgacgccgccaagttcaagacgttcctcggccgcccgtggaaggagtactcgcggacgctctacatccagtccgacatcggcgggttcatcgacccgcaggggtggctgccgtggctcggcgacttcggcctcaacacctgctactacgccgaggtggagaaccgcggcgacggcgccgacatgagcaagcgcgccaagtggagaggggtcaagacggtcacgtaccagcaggcgcagcagaagtacaccgtcgagaggttcatccagggacagacgtggctcccaaagttcggcgtgccgttcatccccggcctgttgccgcaggagcagtcagggaggatacactgatccatcgtgcgtcgtctcgtcggcctatatatatgctagcgggtaattgtttgcatcatgttgctgtcgtcgtcaactcctgtgatctctatagcgttctctgctgtactctaatccatagaaatgcattcttttctccatagaatttgcgtacgcgtagtacattgcatatactagtactacttaattatatttacgtgttgtacgggttgttacgaatcgattattgtttttactgatcgacaaatggtgaaactaatagataaggtttgacagagttttactt

SEQ ID NO: 20186 - DNA, 1064 bp, Oryza sativa
  ref <308>: DATABASE ACCESSION NUMBER: AK099142
  ref <309>: DATABASE ENTRY DATE: 2002-08-28
gtcagtccgcacccgcgcgaggcttccgctccgctcccctccgatccgtggcctcctcatcgcccctattaaacgggaacccagcccggcgtccccttctcggcttcctcctccaccatccatccatccgcgcgcggtgcgtagtagcgagaagagaagggggggagggcaaagcgatggctccgatgaagctgtacgggtcgacgctgtcgtggaacgtgacgaggtgcgtggcggtgctggaggaggccggcgccgagtacgagatcgtgccgctcgatttctccaaaggcgagcacaaggcccccgaccacctcgccaggaacccctttggtcaggtgccggctttgcaagatggtgacttgttcctctgggaatcacgtgcaatttgcaagtatgtatgccgcaagaacaaaccagagctgttgaaggatggcgacctcaaggagtcagcaatggtggatgtgtggcttgaagtggagtccaaccagtacactcctgcactgaaccccattctttttcagtgcctaatccgtccgatgatgtttggggcaccccccgacgagaaagttgttgaggagaaccttgagaagctgaagaaggtgttggaggtgtacgaggcgcgcctgacgaagtgcaagtacctggctggagactacatcagtgtcgcggacctaagccatgtggctggcactgtatgcttgggggctactccccacgcatccgtgttggacgcatacccgcatgtgaaggcctggtggactgacctgatggcaaggccgtcttcccagaaggtggcttcactgatgaagcctcctgcttaaggtagttgttctaggcacaggtttgtcgtccatggtccacagaataagctgaggtgtgcccagttggttgctcgtttaaggatttgtgttattatgtgtgtcctggatgttgaatgttcaagcaatcaggattgtgttgttatgctgcatatgatccaacctaagtcttgtactgctatgagcattcttgtgctctggccttcgctcttgagaaccttataataaattctgcttttagtc

SEQ ID NO: 20187 - DNA, 2120 bp, Oryza sativa
  ref <308>: DATABASE ACCESSION NUMBER: AK070514
  ref <309>: DATABASE ENTRY DATE: 2001-12-06
gattccgatcgccaccccgcggttctgctctcgccggccgaacaacgcgtgctcacgctcgccgccgccggtcgccgcctccaaatcgtcgccagagaatccgcgtcctccccagatgacgctgcgcacgggagaagcaacgccgcctccccaggcgcatgccgaggaggagccggggcgggggaagcgccggcgcgtcgtcgcccgtgagacgaggctgcagcaggaggaggaggaggaggagggcgcctcatccgagccggagaccagaccgcgccctccccccgccacccccgccactgcagaggagcccgccgccaccgccgctggggcggaggccagggctcagctggccataaacattcgccgtatgcttgctgtcgaggcagagagaaggggccgaatcgctgaacgaattggagttcaggctgagggtccaattctcactctggaggatacattttgtgatattgatgatggtagtgctaaaagccaagttgctcgaaaggttgctttgggtgtttcacagtcaattgtcagtttatcttcctttgcaggtcgaaaaaggatacgggtttgctcaggatttgtgatacggtggaacgatagtaccagcattggtacaatattaacctcagcagcacttgttagacctccatgcggagatgatgtcagggtggaggtctttctacctagtggggatatatctatttgccagatttccatggtagatttccatcataacatagccttagttgaagtcacatccaatttcaagcttcaagaggctgttatccttaaatatattatcgacaagggagatgttttagcccttggccgttcttatgaaggtgggcttctgatgtgctcaaggggagaaataagcaacagagccagcatatttgagtgttcagaactgttagtatcaagttgcgagataacaatggctggcaccgggggaccccttgtaaattataatggccatgttgtaggtattaacttctttgaagagaaccaaacgccatttctttcgatggcaattgttttcaaatgcttggaacatcaccagatatttggaagaataattcgaccttggattggattctggttcacctctattcaaatggttccgcttagtcatctagagcacatatacagaaaattctcggatgttgataatggcctatatatttcaaatgtggctgagggatcacccgctgatattgctggaatatgtcagggtgatattctcatgaaatgtggtgggaaattcctctctactgcccctgagttcggtgcaatgttgatggataaatgcaaggaaactatggaagagtatgaccaagaaaccaatggtgatttttcagcgaaaaggataacagttgagattgttataaagcgagaaaatgatggaagcactatagagaaaactatatctgctggtttgatagaagagtttaactataacaggtggcctacaccgatccctagctataaggtcagacgagatactattggaaggtgttaagagccttagaggtgcagttcatctacgtgcatgcatgttataattaggtctgacccacacaatttgtccggcccggtgacctgtgttacatccctctgcattttgcacatcccgttccaaaaaaaaaaaaacacgacatcatacaacagcgggtcgcccaaattattgatgaccgacgtcatcgctgaaacaaggaagttccatggcgccaccgctaattattgacctctccattacttgaactgctgttgatctttataggtgacttgaaccgctgctggtgttgtttatctgatcttgctcagttctgtttcaggatgtggccaggttgtggtcttgtgtgatgtctgtgtggctcgtgatctgtattgcaaaagtttgtggctgctaaatcctgggtgatgcagccaagttttggcggcatgatacttgtgttgtgcttgtgcgtctgtgatcgatcatttcccaaatttcatagattactttcaaatacatgtctgtgctctgctctcttcgcagagaaaaagggatgattcccaagtttgtagagtactaaggctgtgtttagatataaagtttggatccaaacttc

SEQ ID NO: 20188 - DNA, 1391 bp, Oryza sativa
  ref <308>: DATABASE ACCESSION NUMBER: AK070515
  ref <309>: DATABASE ENTRY DATE: 2001-12-06
ggcgtgccacgcctccgcctccacgcacgggtagtcccccccacccccgcccgccggagcacacgccgccgacggcgtacgttgcgcttcttatctctctgtcgtctcgcaggcggaggcggccgacggagtcccgcacgtacgcctcgccgaccgcccgcgcgcgctcgcggatcggagaggtataggttcataggttctcattccagaaggcatggtaacatctatagacaatgtgagagggttgaccctggccatatcatcaagtgcatttatcggatcaagctttattatcaagaaaattgggctcaagaaggctggggattctggggttctggaggtttctcatacttgtatgagccattatggtggttggggatgataactatgattctgggcgaggtagcaaactttgcagcatatgcatttgctcccgctgtacttgttactcctctaggagctcttagcattatatttagtgcagtgctcgcacacttcgtcttgaaagaaaaactccatatgtttggtgttgttggctgtatcttgtgtgttgttggctctgttggtatagttttgcatgccccaaaggagagagagattgattcaatagatgaaatatggcatcttgctactgagccaggttttattgtttattcatgtgtggctgtggtgtctgttctatttttgattttctgggttgctgaacgttctggacacaggaagatgcttgtttatattgcaatctgttcaacaatgggatctctcacggttatcagtgtaaaggcagttgccattgccttgaagctgtcatttggtggatcaaatcagttcatctacatccaaacatggttcttcatagtagttgttatagtttgttgtttggtgcagttgaactacttaaataaggcactggactcatttaatacagctgtggtctctcctgtgtactacgtgatgttcaccatacttactatttttgctaacatgattatgtacaaggattcattctcacggaatgcaacacagattgcaacacagttatgtggttttgtgaccatcgttgcaggaacttttctcctgcacaagactagggatatggggaatgaaccgccgctaccagatgatgaaatttgtctcgatggaggaagtgtgcgcccagatcgtctgtcacagtctagtagctagcatgtagtaccgaaaacttttggcttatcgatgtaaaaaatgctagtggatgctgaataaacttgacttgaaaagtcctacaccgattgatacgcagacaggcacaatcttgtgctgtttggcaatcttgttcagaactttgttttctcgtagaatttgaaaattttagggactatgatgaaactcggcattaggcgtttccgccc

SEQ ID NO: 20189 - DNA, 1376 bp, Oryza sativa
  ref <308>: DATABASE ACCESSION NUMBER: AK070516
  ref <309>: DATABASE ENTRY DATE: 2001-12-06
gccgagcagccggagagtgaggcgaggcgaagcgaagggaagagcgcgaggcagagtaagcagacgagaagaacagcgcgcggcgcggtagctgaggagagtggtgcggagatggatcacgaggcggacgcgtaccggacggacctgatgacgatcacgcggtacgtgctgaacgagcagagccgcaacccggaggcacgcggcgacctcaccatcctcctctcccacatcgtgcttggctgcaagttcgtcgcctccgccgtcaacaaggccgggctcgccaagctcatcgggctggccggcgagaccaacgttcagggagaggagcagaagaagctggacgtgctgtccaacgaggtgttcgtcaaggctctcgtcagcagcggccgcacctgcgttcttgtctccgaggaggacgaggaagcgacgttcgtggaccctgcgctgcgtgggaagtattgcgtgtgctttgatccactcgacggctcctccaacatcgactgtggcgtctccatcggaacgatctttgggatctacatgatcaaagataaggagaatgtgactcttgaggacgtgttacagcctggaaaaaacatggttgctgctggatactgcatgtacggcagttcctgcacgcttgttctgagtactggaaatggtgtcaatggcttcacacttgatccatctctcggggagttcatattaactcatccagacatcaagataccaaagaaagggaagatttattcagtgaatgaagggaatgcgaaaaattgggacgagcctaccgcaaagtttgtggagaagtgcaagttccctaaggatggttcatcacctaaatccttgagatacattggaagtatggttgctgatgtccaccgtacgttgctatatggaggagtatttttgtaccctgcagacaagaagagcccaaatggaaaactccgtgttctgtatgaagttttccccatgtcattcctgatggagcaggctggaggccagtctttcacaggcaaagaacgggctcttgacctcgttcctaccaagattcacgagagatccccaatatttcttggaagcttcgaagatgtggaggagatcaaagggttgtacgctgcacaggcgaagtaagctcggtttgatcgatctggcaccatcaaggcgtgcgaatggactccctggccttactgtaacatgcatgattcgtcaggcacttcttttattcgtcttactgtacgtttgtaaaattcagtgtaatagtgttgaggcctggaacagcttcatgagcaactaaggccttttctactattatttacaaaatacatacaccgtgcatctctagcagctaaagcactaatacaacaagtcactaaggc

SEQ ID NO: 20190 - DNA, 1131 bp, Oryza sativa
  ref <308>: DATABASE ACCESSION NUMBER: AK070517
  ref <309>: DATABASE ENTRY DATE: 2001-12-06
gactttgagcatttttgttttgttctccttgcagttacagctgaagcagcaagcagaagattaaccctcttggctaagattcaggttaacctgcagcgagaggttagctcagctcagcttagcttagcttaagctttgctcgagcttgccgtgcactccactgtctcttttccggtggtataatttggtgcggcggtgagctgccggccatgtcgaccgtctcctccgcgctgtcgtcgttcctctactgctgcttctcccccaccggcggccaccggcacggccaccgcgccggcgcgtactactacagcagccacccgacgagcaccaacacctactactacgagggtggcctcgccggacgcaggatgggcaggagcaggccactgtcactgcagacagtggagctcaaggttcggatgtgctgctcaggctgcgagagggtcgtgaagcatgctctcatgaagctcagaggggttgattcggtggaggtggagttggagatggagaaggtgacggtgacggggtacgtggagaggcagcgggtgctgaaggaggtgaggcgggcggggaagaaggcggagttctggccaaacccagacctgccgctctacttcacgtcggccaaggactacttccacgacgaggagtccttccgccccagctacaactactaccgccacggctacaacggcgacaagcacggccacctcccggagccccaccgcggcgccgaccccgtcagcaacctcttcaacgacgacgacgtcaacgcctgctccatcatgtaaaaaaattcccatgcccgcctcgcattgcacgcgtactactactactactagtagcagtgagatcgatcgagtgtgtgtgatcatcattgtgtgttctctcttgtgctcggcgccgtggtgacaggtcaggtagtgtgctgtgtgtccatggagtagtagtagtagcagatgctaaagtcagtcagtcagtgtggcaatatcgaatgagtagtggcgccctttacgggttacacaatggaaagccaggctctgtgtacgtacgtactctctgtcgatctgcaaattgtcaatgggcccgaaactaaagccaattgatcgaatatcgttttttaaaagtagt

SEQ ID NO: 20191 - DNA, 1777 bp, Oryza sativa
  ref <308>: DATABASE ACCESSION NUMBER: AK070518
  ref <309>: DATABASE ENTRY DATE: 2001-12-06
gtcctccaaccaccgcagctcgcactcgcagctaggcctctcccctctgctgcttcttcttcttctggagcatcgagagagagagagagagagagggggagagaggtggcagggcagcaatcttcttcctcctctctcgtcttctagatcgttagaacgtcagcaatggagaacatgagatctgagaactttaaccaaggtgtttcaatggagggcgtcaagcatgcgcccgagatggcaaacaccaacaggagggctctgcgggacatcaagaacatcatcggagcacctcaccagcacatggctgtgagcaagaggggtttgctagataaacctgccgctaagaaccaagctggacaccgtcctatgacgaggaaatttgctgcaacactggcaaaccaaccctccagtgctcccctggcacccattggaagtgagaggcaaaaaaggacagcagattctgcatttcatggtccagcagatatggagtgcaccaagatcacatctgatgatttgccattgccaatgatgtctgagatggacgaagtgatgggttctgaactgaaagaaattgagatggaagacattgaggaggcagcacctgatattgacagctgtgatgcaaataactcccttgcagtagttgaatatgttgatgaaatttacagcttctacaggaggagtgagggtttgagctgtgtctctcctaattacatgttgagccaaaatgacataaatgagaagatgcgcggcattctcatcgattggctgatagaggtgcattacaagttagagctattggatgagaccctcttccttactgtgaatatcatagaccgattcttggctcgcgaaaatgtggtgcgaaagaagcttcagttggttggcgtgactgccatgctgctcgcctgcaagtatgaagaagtgagcgttcctgtagtggaggatcttatcctaatctgcgaccgcgcctacacaagaacagatattctcgaaatggagaggatgattgtaaacactcttcagtttgatatgtcagttccaactccatactgtttcatgagaaggttcctcaaggctgcacaatctgacaagaagcttgagctcatgtctttcttcataattgagctgagccttgtcgagtatgagatgctcaaattccagccgtcaatgctggcggctgctgccatctacactgctcagtgcaccattaatgggttcaagtcctggaacaaatgctgtgagctgcatacaaaatactctgaagaacagctgatggagtgctccaagatgatggttgagctccaccaaaaagcaggacatgggaagcttactggagttcatagaaagtacagcacatttaggtatggttgcgccgcaaaatcggagcccgccgtcttcttgctcaagagcgtggcactgtaactgattggctcactatacacactctaactacttccatggaaagagggaatgaggggtgtatatatagaggccggctgctttgatgaaattacagagaagagatctgcatatatgcaacagctgttgcaaaggattatttgatgggtgggttgggttggtgcaatgtgtgcctttacttccaataacttaacatcgtcgagacattgatctgcgtttggatgttttaggttgcttccaattaaatctgttggaacttgatttcatgttgtatttaagagaattattcttcatttgttctgtggcacatgcaatttgccaataaacattaattgaattgcctgttcaatcatcg

SEQ ID NO: 20192 - DNA, 2549 bp, Oryza sativa
  ref <308>: DATABASE ACCESSION NUMBER: AK070519
  ref <309>: DATABASE ENTRY DATE: 2001-12-06
gctctttttggcgcctaatcggctaatcccctccagcttccacttctccccggttcatccgctctcaaactcttcaatcctcgattccccattcgaaatttcgagtccctgagatccccacgtttccagatgcttctgctccatccgcgtccgctccccgctccagctccggcgaggcgattcgagcccgccgtccgggtcccaccgcctcgccgtcgtcgtcgtcgtcggcggcctcctcttcctccgctcgcctccgcctccgcctccgccgcgatctacagcgttggtagctccgacgaggacgcgttcaccaggtgctccgggtacctcttcgaggagggcgcggcgaccgagggggagctccccacggcttacgatctcgccggcatcggcgccgtctaccgccgcaggccgctcctcgtggtccggcgggcactgcagattggcacctccttcggccgatggtttacgctgcgatacctcgaccgcgtcaacgagcgctccgacgacatgttcgagatcagggctgctcaactcaggcgaatactattggaacttggcccgacatttgtgaagattgcacaggcagtttcatcgcgaccggatgtgattccacctgcgtaccttgacgaactttcactacttcaagaccgtatagcaccattttcaactgaggttgcttttaacattatagaaacagagcttgggttgccactggacatgattttctcagagatatcaccagagcctgttgctgctgcatctcttgggcaggtttatcaggccaggcttcgttccaacaggaaggttgttgctgtcaaagtacaaagacctggagttcaagcagcaatttccttggatatctacatcttgagattccttgctggtgtcgctaggaaggctggcaagctgaacacagatcttcaggctgtactagatgaatgggcatcaagtttatttagggagatggattacagagcagaagcaagaagtgggcttaaattcagggaattatatgggaaatttagagatgtactagttccagaaatgtatctggaacaaacaagaagacgagtccttatcatggaatgggttgagggggaaaaactgtcagaagtcagagaccaatatttggttgaggtcggagtatactgctcactttctcagcttttggaatatggattttaccatgcagatccacatcctggaaatcttttgcgtacagttgatgggaagctagcgtatttagatttcggaatgatgggagaattccgacaagaacttcgtgatggatttattgaagcctgtcttcaccttgttaaccgtgattttgatggtttagcaaaagattttgttactctcggtttacttcctccaactgctcagaaagatgaagtgacaaaagcattgacaggtgtatttcaaaatgctgttgacagaggggtgcaaaatataagctttggagatctgtcagggaatcttggtcgaactatgtataaattcaagttccagataccttcttacttctctcttgtaattcgaagccttgctgtcttggaaggcattgcaatcagcttcaatcccaactacaaagtcttgggcagttcatacccatggattgcaagaaaagttctcacagacagctcaccaaagctccgatcaactttgcagacgcttctttataaggatggcactttccagattgaccgtttggagtctttgctaactgagtcgcttcgagcaagaacagagcagtccctgaccagggatcaacaagaggaaactgatagttccaaatttgcaattaaacaagtcttgtcatttactcttactgaacagggtgccttcgtgaaggatttacttcttcaggagattgctaagggattagatgcacttggagctgctacattgagttctgcaacatctgctgcagcctccagattgccgtttgctgttccatccccatcaccctcactagacaatgaggatgccactaacttgagaaatttacatcgccttctcctacttttgtccaaggtccctcagaaggaggattcatctccaattccaggatacaatagcactgaggagaacgaaggtgatagtacagatgagatttctcttgtgttatatgaaatgagatctctaccagagttgttgccagtactttctgtcattcctgagcttccaccagagtcccaacagcagtttctcctcctgccagcagatttaactaatcgtcttctgtctcgcgctgttgcaagaaccatcagaagaatattcatatgaagatagagcataaaggtacacatttccaatctctgctacatgaaatatttttatttaattttttttgagaaagcgctaaatgttcatagaaattttcccccaaatagtaccactgccttctaagctagaaatccaggatccgtcttattattcaccatgactaattttgagttgtagttagttcaaaaaaaaatgaattgtaattcttcatgtgacaatacagttcttttcgggaatcatgtattacatatattttt

SEQ ID NO: 20193 - DNA, 1806 bp, Oryza sativa
  ref <308>: DATABASE ACCESSION NUMBER: AK070520
  ref <309>: DATABASE ENTRY DATE: 2001-12-06
gagaaggacctgcagcgcaaggagtccgtcgagtgggtcaacatggtgctcggcaagctctggaaggtctaccgccctggcatcgagaactggatcgtcggcttgctccagcccgtcatcgacaacctccacaagcccgattacgtcaaccgcgtcgagatcaggcagttctacctcggcgaggagcccctctccgttaggaacgtcgagcgccgcacctcacgccgggccaacgacctccagtaccaaattggcctccgttatactggtggtgcacgcatggcattggccctctccttaaagtttagtgccgtacctgtcgttgtgccagtctgggttcgagatttcgatatcgatggggaattgtgggttaaactaaggcttataccgacagaaccttgggtgggagctgtatcttgggcatttgtatcgctcccaaagattaaatttgagctgtctctgttccggcttttcaatcttatggcaattcctgttctgtcaatgtttctcacgaaacttctaacagaagatttgccacgtctctttgtgcggcccaagaagattgtccttgattttcagcagggaagatctatgggacctgttgcaggagatgttgcaagtgacgtaatccaaaatgttgcaagtggcatacttcaagatgttgcaagtgatgtaattcaagatgggaataaggacttcgttggagaactatcagtgacattagttgatgccaggaagcttagctttgtcttattcgggaagactgatccatatgttgtcatgattcttggtgatcaagaaataaagagcaagaagaatagtcaaacaactgtaattgggcaaccaggcgaaccaatctggaatcaagactttcatatgctagttgcaaaccctcgcaaacagaagttgtgcattcaagtaaaggattcagttggtctaaccgatgtcactattggcactggagaggttgagttaggatcacttaaagacacagtacctacagacaaaattgtaactttatatggaggatggggcttacttgggaaacggtcaaaaggggaagtactccttcgcctcacatacaaagcatatgtcgaggacgaggaagatgaaggggtaaaaaatgagtttgctgcgggctatgtttcagacgaggatgtgctagattatgtccaagacagtacaagtaagcaaagtgacatggatggtaaagagagagagaccttcatggatctgctggccgcgctgcttgtcagcgaggaatttcaaggcattgtgtcgtcgtctgaacccggaagcttgagagatagtgagcaggctgctaaatccagagatggtgaaaatgctgcagcagctgctgatacagggactgtatccaatagctccacagatactgctctagtgtggcttgctgccataacaagtgtgatggtgctggtctcatccaaccttggtggttcaggctatttcaacccttgaagagttgatgcatgaagaatctgatctgactggagtatttggacgatccatctgtctgaatctgatcatccgcagctagtagcagaggtcgttttgttttgattttttttaactttatttttgccgacaagtgtatattccattcccatgtatctaatgttgcagaggaatcaaagaatggcttggcttttggcggctgtctctcctccctttttctatttcatacgattgacatgatgtagcatatcctttttgtgcaaccatccacgcacatgatttaatttgtgtgaatgggaaatttggagttgcgttcatctctcctcttgg

SEQ ID NO: 20194 - DNA, 1619 bp, Oryza sativa
  ref <308>: DATABASE ACCESSION NUMBER: AK070521
  ref <309>: DATABASE ENTRY DATE: 2001-12-06
gatctgcgcctatttattgcggcctcttcttcctcctctcctcgcctcgcctcgctcttccactgttcatctgcgccacgacacgacacgacacgacacgagacgagagaggagtcggcaatggcggaggggtcgcggtcgccgctgaggtcgttcgtggaggtggcgccggggtcgcacttccccatccagaacctccccttcggggtcttccgtcgcaggggctcgccggagccggagccgccgcgcccggccgtcgccatcggggacttcgcgctcgacctcgccgccgtctccgacgcgggcctcttccacgggcccctcctctccgcctccccctgcttccgccaggaaacgctcaacatgttcctggggatggggcgtccggcctggaaggaggcgcgcgccacgctgcagaagatcctctcagctgatgagccggttttgcgtgacaacgaggccttgaagaagaagtgccttgttcccatgagcgacacagagatgcttctgccaatcacggtaggagactacaccgacttcttttgttctgtgcaccatgcaaggaattgtgggttcatcttccgtgggccacagaccccagtcaacccaaattggtttcagcttccagtaggttatcatggtcgtgcatcctctgtgattgtatctggaacagacatcattcgacccaaagggcaaggccatccaacaggagattctcgaccttattttggtccttctaagaagcttgattttgaacttgagatggcagccattgttggaccagggaatgaattgggaaaacctatcgatattaatgatgctgaagaacatatctttggcctaatgataatgaatgattggagtgccagagatatccaagcttgggaaactatacctcttggacctttccttgggaaaagtttcagtaccacagtatcaccctggatcgttactatggatgccctaaagcctttcacctgtgaagctcctaagcaggaacctgaacctttgccttacttagctgaaaagaaccacgtaaactacgatattcctcttgaggtctggattaagcccaaggagcaaagtgaaccatcaatggttgcaaagagtaacttcaagcatctgtattggactttaacacagcaactagcacaccacactgttaatggatgcaatctgagaccaggggatatgtttgcaactggcacactaagcggacctgagacagaatctttgggatgtttgctggagctaacatggaatgggcagaaggagatatcagttggaaactcgacccgcaagttcctagaagatggggatgaggtcatcttgacagcttgttgcaagggtgaaggctacaatgtcggattcggaacctgcactgggaaggttctgcctgcacttccatgatccaacatatagaggatagcctgctttcatctcatcagtgtgtcaataatctctgaagaaagcatgcaatgaggcaatgtatctagctagttacatctatattttagtgcttagtgatggtaaaaatactaataaggtatgcttccctgagctttacagaagggatgtaattaatgttctccagttacaataagaacttatttgaagtc

SEQ ID NO: 20195 - DNA, 1429 bp, Oryza sativa
  ref <308>: DATABASE ACCESSION NUMBER: AK070522
  ref <309>: DATABASE ENTRY DATE: 2001-12-06
ggattggagtccggagcgagcgctgctcggatcggattgggtccgtggaggcgagcgcacaatttctcgtttgagcaagcatggttagcacaataaaggtccacaatgtctcacttgaagcatcagaacaagatatcagggagttcttttccttttccggtgtcatcgtacatgttgaaatgcaaagtggtgacgagcggtctcagtttgcctacatcaccttcgaagatgacgaaggagcagagagggctatgcttctcacgggtgcgactatagtggatatgtctgtcatcataacaccggccactaattatcagctgccggcagccgttttagctgatattgagtctaagaacgctggtggcatggaatctgcacttcggaaggcggaggatgctgttgtttccatgttggccaaaggatttgtccttgggaaggatgcccttgaaagggccaagtcttttgatgaaaagcatcagctcacatccaccgcaactgcgaaagttacctcgcttgataggaagatgggtctaagccagaagttcagcactggtaccttagtggtaaatgagaagatgaaagaaatggatcagaaataccaggttgcagagaagaccaaatcagcattagcagctgcagaacagacagtctctactgctggctctgcaatcatgagtaacagatacatccttacaggggcagcatgggtaaccgatgcctatagcaaggttgcaaccactgcaactgatgctggagcaaaatcaaaggaaatggtggtggctgagcaggatgacaagcatcaagatgataaaccggcaaaggactattctcctataagctctaaagagtttgtacaagagggcaagcatcaggaaggtgaacgaccaaagaagaacatgccagaaaaacctgaaatgggtaaacgggagctggaaaatcaggaggccgcaatcccaacagcccatgcgcaagaaaatgcccaaataaccgggaaggagcataagcatcaggaggctgatttacctaaggccgatatacctggaagtttcacgatggccgcgaaaagtgaaaagcacaggaacccgtacagcgaattgtcgaaaacccatatcccaggaagccctgcaacgattcctgtctgcacggccactactgatgtgaacagtaccaaaactccaaagaagccagagaatgccgagggattcatctgatgatgtgttcgattcaaagaatgtaaatatggatgtgggatgccggtgatgtttttgattcagcttataatgtggaacttgccatctttcagatatcgttcacaattgtttccagattttaagattgtaatgatcaccttttcgttactgtttttgtgcagttttggtccacatttgtattctaggtcccttttttatgcactactttcttatatgtg

SEQ ID NO: 20196 - DNA, 1547 bp, Oryza sativa
  ref <308>: DATABASE ACCESSION NUMBER: AK070523
  ref <309>: DATABASE ENTRY DATE: 2001-12-06
gacctccgatcccctctcctcactccgtctcggcggcggcggcggcggcgaggcgtctccgacgaaaaccctagcatccctccccccacctcgcgtctgtctacgaagccatggagaggcgagatcgcggcggcggaagcagcagcaggaatcctcatggagctccggtggaagaggaggaggagctggaggatgattttgatgagttccggctgcccatgagccaccgccccacggagaacctcgagacggaggggctggagcaggcgtccgttgacacgcagctcacctcctccaacgtcggattcaggctgctccagaagatggggtggaagggcaaggggctcggcaagaacgagcaaggtataacagagccaataaaagctggtatcagagatgcaaaattgggtgtggggaagcaagagcaagatgacttcttcacatcagaagataatgtgcaaaggaggaaattaaacatagagcttgaggagactgaagaacatataaagaagcgcgaggtgtgcaatcgaacactgattccttaatattctatttcttcagggttgatgcttgcactttgaaatcttatatctagctgttggcattacatattgatatttgtatcttattcatgcaagagttgctagcatcagccctcatgatccttgagcattttgggcattttttatttggtggttctttttcctgcttggtgcaaatcatgacaatccaggtcatagcagaacgcgagcagaaaatacgtagtgaggtcaaggagatacagaaggtgttcttttgcagtctctgtaacaagcagtacaaattggcgcatgaatttgagtctcatttgagctcatacgaccacaatcataggaagaggttcaaggaaatgaaagaaatgcaaagcagcagcagcagcagccgtgatgacaggcagaaacgtgagcagcaacgagaagagaaggagctggcaaaatttgctcaacttgctgatgctcatagaaagcagcagcagcagaagcaagaaccatcagagagctcatcagagagaattacaatgaagaacttgcctaacccttcaaatcaggatcagcgtaaaaccttgaagtttggcttctccaaaatggctccttccaaggctccagttggcaatgtaagcaagaaacctaaggttgctacaaaaatgtcatcggtttttggcaatgaaagtgacgaagaatcatgatctttgcccgcccaagggtgattgcactgaaggaaatggtcctgtagaagagaattaattttgggaacatgccatgccatgatcttgtcacgctctttaatcctgatgtggatggtggcatctcctgcgttctcatatgaacatgaaatgttgaaatgttaattgtatggagtcgagggtacattggaacagtaactcagtttcccctacacatgctggatatggaacttttgattcgtacattctgtcttaagggctcagacaaagcccatgggacacctttgtattattgtgttggcttttatttagtacctttcaatcc

SEQ ID NO: 20197 - DNA, 4109 bp, Oryza sativa
  ref <308>: DATABASE ACCESSION NUMBER: AK070524
  ref <309>: DATABASE ENTRY DATE: 2001-12-06
gtcacgattctctcagagagagagagagagagagagaggggactcagcgagcggtgggcgagagggggagatcgaaaccctagctagggtttgcgcgcggcggcggcggggatgtcgacgccggcgaggaagcggctgatgcgggacttcaagcggctgcagcaggacccccccgcggggatcagcggcgcgccgcacgacaacaacatcatgctctggaacgccgtcatcttcgggccggatgatacgccgtgggacggaggcacgttcaagcttaccttgcagtttacagaagattatcccaacaagccgccgactgttcggtttgtttctaggatgttccacccaaatatttatgcagatggaagcatctgcttggatattctacagaaccagtggagccctatatatgatgttgctgccatattgacttcaattcagtctttgctgtgtgatccaaaccccaactctccagcaaactcagaagctgccagactgtttagtgagaacaagcgagagtacaaccgcaaggttcgtgagatcgtggagcagagctggacagctgactagggcatgcagcagggcaacgggtggtatccaccatgccagaaagatgcaataagcaaccgtgaaaaacctgtgcgtttctggctctccagatttgctgtcatcttaaaacattataagatctccagtgattgcttgtagtccgttgatgtttttgtgttcccatgtcccagttactcttggctgcttttatgtagtggtgttgacctctcatgcactagggcattctgctcatgtaaaaaggggattatcatcataatatgtgaatggaagcgaaatgggtcatgagatttgagtctgcttgcacaatgcagtttgtctgcatgatccttttgccatgtagtttggctgttggtgctgtcctatgcacatgcttaatattctctgccgtttggattttttgcaacattttgtatttttgtaggaacagaaaaaaaaattcccgtgatacttctcatgatacaaatggtaccaaactgaaatttatcgttcctcgagtgatgctttcgtatggtataaagaagggtttttaggcccctttgaattggaggattgtgaattttggaggatttaatgtcctaaggattttttcctatgaaacctttgattcataggaaagtataggaaattttctttaggattgcattcctatagcccaatttcataggaaaataagtaagaggtttaacctcttggaaactatcctttgctttgtttgttttctatggtgatattttctgtgttttccattcctgtagaattaggaaaacatgccacatcaattcctacgtcgggtttttaggcccctttgaattggaggatttaatgtcctaaggattctttcctatgaaacctttgattcataggaaagtataggaaattttctttaggattgcattcctatagcccaatttcataggaaaataagtaagaggtttaacctcttggaaactatcctttgctttgtttgtttcctatggtgatattttctgtgttttccattcctgtagaattaggaaaacatgccacatcaattcctacgtttttcctattcctttgtttgtttcctatggtgatattttctgtgttttccattcctgtagaattaggaaaacatgccacatcaattcctacgtttttactattcctgtgttttttctattctgcgtttcaaaggggccctaggtaaagtagtgctcttgattggtgtcgggggcctggggatatctccttttacttgtccatgtaaaggtctaaaacaacaaatgcgatacatggtattgacaccattgacacaatgataaccgaagtgcccctacagaggacatgccataaacgaggtactgaaccatgattacatttagacctagattcgtagtgagacatttatagtcctagattcaaagtgggaaaaattacaaaattacagttgtgcttagcttcttacatattcaaaagaaacatatagaaaaggcggtaaaaaaaaagaagataaaaaaaatgtgaagaaagtaaaagagcccactgacttctactggtctacaccaagaaggccctatacacatcttatcttatagggtagtagtacaccatatgccagttccagtctagcttcagctgcagctgccatctgaattgttctctcatgttcggttcttgaaagatcacactgcaaaatgtttgcttcatgtaatgtttcccgctgaattgccgttgctgttcttgcctcaacctagaaatccaagaaaacacaagaaaatatcatctcagatcatagctgaatgcataacatttccctcaactatcagccatggatgatcagagcatgatagttcagatgctcaaagtgcaaggtttggtttgtttggtgatagatacctgcaggctatgatggagtatcatctacagatctactggtcgtcttctaagtctctggggatctgcgacggcgacagcggcgactcctcgctgctccgggagtcccctctccagtcatcctgcacctgcgcggcgaactgcaggttccacagcacgtcctccaccgacggcctctgcaccgcctccttggccaggcacctcaggcagatctccatcaccgtcttcaccgactcgtcggagcaccccttgctcaccgccgggtccacaaagctcctcctcttcgccgtcccctccgccgtcagcgccgattgcagctgcagaaagaacacaggtgagtttctttttttctttttcagaactttcagaagtggacagtgtgatggtagtatctgaagtctcatgaaaaattcagttcagtttcagtctttggagggagtttgtgttgcacctgttctttcattatctccacctcgtagatggatgtgatgggcctgcctgagataacctcgagtagtatcacgccgaaatcgaagatgtcgagcttatcaccgttcggtacactgcgagaagaaatttgcaacagaaaagttcttaagaaaaccagttgcttttagtataatatacatagattctgctgtaaggtgatttgtcaagtacctatcagatggatacttgttgccagatcctccctgaattcatccacaaaagatgatataaaacaacaatgttagttcagggttcagacagtgccaactcaaaattcagcggtaagtttacatgatcagagtttcctgaatcatacctcggatttcatggtttcagataggatggggatattgtagctgcctattttggcaacaagattctggtctagaagaatgttggtgatcttcagattattcgcaaataggccaggtatgatccctccatgcaagaattgaattcctttggcaacaccaatggctgttgatatcctctgcacccaggtgagctttctcccttctgttccttctgaagtcaaaagtatcaacaagttcagtgacattcagctaaccgagtaactgattattggagaccgatttcaggagaagatggtaaacttacgtgaaattctgcctctcaggttgccattctgaacgtattcgaagacgagatacaattgcgtgatggtggaatcgtcgagattgtattcgaagcagtgtccaagtgcactgaccaagtgcctgtgcctgagcttggagatcatctcaatgtggtgattgaagctctgggaagtctggctcctcttcaccttcagagacctgattgtcaccggagttccattgcttagccttcctcggtacatctgacagtaaaaaagagcaaaccattttagacatggagcacaacaattttagttgcaaacttgctatgttacaacttgcacatgcctcaaaagaaaaggtgattcttgaatagattgaaaaatatgtatggaaagatggctttggtactctggcaagaaaaaagagagaaagcttgtaataactataaaaactgttctctttaatctttataccccaattgtaatctagcagtagtatttaactcattagaataatcagaaaagtgaatgggggcataaagcatactgtcaattaacaagaacatgaaaaattaggttc

SEQ ID NO: 20198 - DNA, 3482 bp, Oryza sativa
  ref <308>: DATABASE ACCESSION NUMBER: AK070525
  ref <309>: DATABASE ENTRY DATE: 2001-12-06
gaagtagaaagaaacacaagaagaagaagaagggttaccggcgggcggcggcggccatggccatgcaatggagcatcgacctcgacagggctctccgctcccgccaccccaccccggtcagtactggtcaacgcggcattgtttgcggctggctgtttttaggctatcagtggatttctcttacattacacttgaagcacttccaaggttggaaagcagatcgttctgggcacgttggaagataatttcaaagctgacatgctcttgtcactctcaagattggcatccaagtcagttcttctgtttggcgatcaggtggaattgctgttattgttcctggagcatgaatcttctcattgcatgaagaccgtgtcattgaaatgtttatgttttatgtttcacggaagcatctgccattttcctgttttaaggactgtttttggaacgttattacagctaattgatgatgatgatttcccacttgattgtaagagagatgcatttacggttcttcaaaagatagtctgtggcaaagctccaattgttcattttgtcgatacttctgagctatctaagcttgttctggctgctgagagttctttgcattcttcttcctgggagatgcaaggaaggttcatcattgacttacaatgggtgtcaagggattaccagcaacttcctgtcaactcatgtagaaaatgatgaggacaaattcgtgcataagattgtaacatcaatggtgaatcataatatatctctggtcaatcaaataataagcactggaaacaaggaagcaacaaggagacatacttatatgtcctctgaattcaagatgtacagatctatgttaagcagtatgctaaaacttcttgtgtgctaccccttctgctgctgctgttgctcttgataaactaagaggcctgataaaagaactagcccgactagatgacagtgattgctccaaagtttctgttgccaatgttgaatcatttcaaacatattctgcccgtgaagtacttggcacttcaaatgatattaagccagagactgctagtgtgatggcttctcacatgggagcagattttgataagttaaaattcgacccaactgaatttagtagcaagaaggaagtatttatagtgcgtaatataattctttcgacactcaagtttgcaaatacttgtcataatatgctttctaaaactcctggtgctagctgcaatctttatgatagaatcaaggagctgattgagtgtgtgcagcagaatgcttctcagtattgtagcacatacgaatttttccatctgataatgtgtgcttgtatttcatggtatgcttgtaaaactagagatggcaatcaagaatcaggtgatccaacagaacagcctgacatattctctagtccttctatttggttaactcaggagctctgtgcgattcggataacaaaaatgcttttcagaaagcagaggtattgggatgcctatatgtctgctatgtactgttgtcgtgaaggcctctggtttgtggtgtcgtttgtctttagaaaacttgcagatgattttgggtcaggctctttcagtttttggttcaaatcattgctgcttatttcagctggagaaattgagatgaagctactgcttttcccttcagcaatcattaagttggtcagtgagcttaaaacagattgcgatcttcatgagagtttttactgtgttgaaacaaatgttgacagtagtcttgctggctcttcagagttgcatggttcccaagcaaagattactgatatttgcagcaaaacattcttagctactgatcacctcttatcgaatacctcttcaagtcatgagctgtttttccagaggtggtttattagtctcagggcatcgtttcttgagatcctagcagattttcttggtatccttactgcacatttaactgatcagagagatgaatctcatcatgatgctattggagaccattccagtgtacctagagagcataataacagccaattacttgctttggtgaattgttcattacgattaagtgaactggcacatagttatgatctacttgctgtatcccatggggacatggatcgccaaagtttttctagcatagccaggcttgctttcatgtgctcacttctggcattttgtattgcattttctgtggatttctcaaaggtacatagtagtgtggagtcttgcaggcttccagagaggttttctcacgcttcagttgtacaagatttacatgaaagagtggataggactgatagccaaattgtttcacaactgcaacaattaatgcccatttgttgtgataaagtgcactccatacagattgtcacaagaatgaattgtgaattgttcaggtattctggaaaaggattcttatcgtctttgcaaatttgctgtggcatatttcctccgcttacgtggggacaccaaaggaatagcgactggagaggacagtgtatctcctttgcatggagggatgcaatttctgtccagcattttacagagggttatggaattgccatttgttctacccaaatacttcttcagagtaaggtaacgtatgcgtgttgttctcttaaaattagttgttgtggatgagaagttcaccatgctggatcacttaatttttttttcacaagccacatgtgcctatttaatacatagatgatcgcagagttttattttatgtatatctcactattcctctctgaaatttgtgtttcagtaatgcatcgctcgaatagatatctgtaataatggttagcttgtttactatatatcttgcaggccttgctttggtgctgaacttcatatatatgattcaaatccagaaaacagagacgggatatcagtaccaagtggcctccagctttccctaaccctttgcttgcagtggaaatgtgtgttaggagtaacattgatatctcgaagctactcgaagctatactgcgttttagctgcaagctcagcatcctgctgcttagatgcaacaggaacaagaagcaaagagtttgagatacacaagaaaactgctggaatggttggtcttaataccaagctgatgcagtacatagaggatgatttgagaaagaagagggagaagaagaggaaaaaggtccgtgtggaggagaaggaaatggtgacagcatttgcgcgtttcgaagcaagtgacagtgggatgggattctctagctacctgctggatgtgtctgaatttcctcaaggttcatacaagatgaagtggcatgcgtgctgcatcgacaaagatggcgcctattatagcttgctgcctctcaacgacggcgcagccttctccgttcgcaagtcttgacagccttagacatctcttgttaacttataatcgtcgcaactagattactagactagtgtttttgtatttagagacaaacaaattgcattacaacaagacttgttagtagcatatgtttcatgctg

SEQ ID NO: 20199 - DNA, 1271 bp, Oryza sativa
  ref <308>: DATABASE ACCESSION NUMBER: AK070526
  ref <309>: DATABASE ENTRY DATE: 2001-12-06
gagtgggctgcggaattttgttttgttttttttttctccccatcccatcccggccctgacgccgccgcacgacggccggccgcggccgccgccggggaggtcgccgccgatgagccccaccgcgccgtcgcgtacgggtcgtgctctcgcccttctccctgtcctggtgctgctgctcctcgtctgctcgccagccgcgtcagctggagaacagaaaggtgtatgtgtttcgcctggtggacgattccctgccttctcatctgaaggtaagcgtcctggaagagcagctaaggggcgcagagatctggcactatgtagagtattccggcagaacacgtgttgcgatgtgtcccagacattttctgccctgctctcagtgagaaagcttgcatcgactggtgaaggtagtcaagaatgccttcatctgtgggaactgctcgagtgttcgatttgtgatccacgggtgggtgttaggcctggacctccagttatatgtgcatcattctgtgacatggttttcaaagcttgctcagaggcgtacttcgctatcgatgtgaaaacacaggcattgtctccatgtggtttaggtgacatcctttgtggcaaagcacataaatgggtctctaatggcacagagctatgtcgctctgctggtttctctgtgcaagctttggagaccacctcgggtggagtggatgacactttctgctatggtgggaaagcaagttttgatgccatctctagttcatggacatcttcaaaagagcgtccagtattaagtgatgtggcctcttggaatcttgaagattttcgcagatgggcaagagaaatgcctgctagtgaaagagtttcatgggcaattggaggaatggttcttacagcaggccttatatttatcagtaaacggaagagctacattcctggccaaaagcaagctgctatcgcccgcaatgtgagaaagctggaatcaagagttaacccacagcagcttaggcgaaattaggaatgcgtaggtagcatggattcctatttccaccactttgtgattcttatatttgaatctgcaatgaatttactgttgaagatgtcctctacactggtggtcagatagatggatggcgtcactggttacaacctcctttgtcatccttgcgtagaagagcagaagagatctattaattcttgttcaggttatttctgtctgcaggatttatagatttgcttgaacatatgtatatagttttggaatggaatcttcagagattttcttc

SEQ ID NO: 20200 - DNA, 1950 bp, Oryza sativa
  ref <308>: DATABASE ACCESSION NUMBER: AK070527
  ref <309>: DATABASE ENTRY DATE: 2001-12-06
gcttcgccaccattacaccattccattccagtggtagaagatccgagatcgaggaggaggtgaggagaggagcaagaagaagaagaagaagaagaagaagaagatgggcatggagagcggagatgcccaactgccgctgctccaccaccaggcttccgcatccaatcagcactataccaagccccccttcaactggaaggctcctgctcttatcttggcctttgaattcttggagagcattgcctatgctggcatctccctcaacttggtcgtttatcttggaaccgtcctccatggaactaccgcctctaacgcagccaatgttgatacatggaacggaaccacttttcttacaccggtgcttggagccttcttggctgatacatactggggaaagtacaagaccattgccatctctacagttttctatcttattgggttgcttgtaattaccgcctctgctgtcatcccatcactacaacctgctccatgcaatgggagctcatgtcctcctgcaacagggtttcagtattttgtcttcttcaccgcgctctaccttatttcggttggcaccgggggtgtcaaatcagcattactcccctttggagctgaccagtacaacgattcaaacctcgaagagagtaaaaagaagcaatctttctttagcttgttcttcattgctatcaaccttggagtgttcatttcgggcactgtcgtcgtttggatacagcaaaatgttgcttggtctctcggattcggcatctcctcaatatgccttgttgttgccacagttgcctttttggcaggaacaccagtgtacaaggtccagcttcccagtggaagcccactcaagagtgttgtaatggtttttgttgcctcttttaagaagagaaaactggaggttcctgccgataacgcactcctgtatgaaggggatgatgctgatttaagcaatggacaatcagtcaaactagcacatactgatggtttcaggtggttagataaggcggcagtggtttttgaggaggtggaagagataaataaggatgagggtgggggtggagggtggctgcagtgttcggtaacgcaggtggaggaagtgaagattctgctgcggatgctgccgatatgggtgaccagcgtgctgtacgcggcttccttgggtcagacggccaccaccttcgtgcagcaggggaatgccatgaacaccaagatcggatccttctctgtcccggcggcatccctcaactccgccgaggtcatcttcatgatgatctgggtggtgttccaggacacggtggtcgtcccgatcgccaggcgctacaccgggaaccccgcggggctgacgcagctgcagcggatgggcgtggggcggttgctggcggtgccggcgctggcggtggcggccgtgctggagacgtggcggctgcgcagcgtcagggacggcggcaacctgagcatcgcgtggcagctgccgcagttcgtcatcctggcctgctccgacgtcttctgcggcatcgctcagctggaattcttctactcggaggcccccgtgtcgatgcggagcctctgctcggccttctccttcctggcgctctcgctgggctactacgtcaactccctcgtcgtctccatcgtcgccgtcgtcaccaccacctcgaacaagggctggctccccgccgacctcaacgacggccatctggactactatttctggctctggacggggatcagcgccatcaactttgtggtgtacgccgcctttgccaagaattataccgtcaagagactcgccgtcccgcactcgcactgatcgtctccctcatccacccaacactgccttgtattattccaatcaaccattcttgtattattattccacttgattcgttgagcatgtatataaaccaaataaaaaataaaccaaataaagggctgaatccatgcatt

SEQ ID NO: 20201 - DNA, 928 bp, Oryza sativa
  ref <308>: DATABASE ACCESSION NUMBER: AK070528
  ref <309>: DATABASE ENTRY DATE: 2001-12-06
gacctgccactcgcccactcctcctcctcccccatcctccagtgctacggtgtcacgcagccatggcgctccgcacgctggcctcgaggaaaaccctagccgccgcggcgctgccgctggctgcggcggcggcggcgaggggtgtgacgaccgtcgcgctcccggacctcccctacgactacggcgcgctggagccggccatctccggggagatcatgcgcctgcaccaccagaagcaccacgccacctacgtcgccaactacaacaaggccctcgagcagctcgacgccgccgtcgccaagggcgacgcccccgccatcgtgcacctccagagcgccatcaagttcaacggcggaggccatgtcaatcattcgatcttctggaataacctcaagcctatcagcgagggtggtggtgatccaccacatgcaaaacttggctgggccattgatgaggattttggttcatttgaggcacttgtaaagaagatgagtgcagaaggtgctgctttacaaggatctggatgggtgtggctagctttggataaagaggcaaagaagctttcagtggaaacaactgctaaccaggaccctctggtaacgaagggggccaacttggttcctttgttgggaattgatgtctgggagcatgcgtactacctgcagtacaagaatgtcaggccagactacctgagcaacatctggaaggtgatgaactggaaatacgcaggggaggtgtacgaagatgcgactgcttgatgttgtctgaaggcaacgctcatggttttttttcacctagtactgccatggatctttgtatgcaataaaaatgggcctattgcacttctggaccttgtgtacattgcgtagaggtggactaatgcataacataatatgcctgagattttcttcttgtgctgctttcctgc

SEQ ID NO: 20202 - DNA, 3214 bp, Oryza sativa
  ref <308>: DATABASE ACCESSION NUMBER: AK070529
  ref <309>: DATABASE ENTRY DATE: 2001-12-06
gtgcccggtagttccacctcctcccaggaagaaggcgagttgacacctcgcaaaccctagaccatctccccgccgccgccgccgccgccgccgtcgacgtcgctctcttctctctcgcgccgagagtttaaagcgagcagaaggaaaaagccaaagcagcagccatggcatcccgtttttggggacagggagacagcgactccgaggaggaggagcaggagattgagtcagaagcaggaagtgaaagcgaagatgaaggtggtgatgccggggggcgttcaaaccagaaccgctatttgaggaccaccaacgcaagcgacagtgacgagtctgattctggtcagcgtgtggtccgctccttgaaggataagcgcaatgaggagttgaaaattacggttgatcagatgcgcaatgcaatgaagatcaatgactgggtgaatttacaagagagtttcgagaagctcaacaagcagcttgagaaggtggttcgtgtcaatgaatccaccacagttccaaatatgtacgtcaaggctcttgtattactggaggacttccttgctgaggccctagcaaacaaagaggccaagaagaagatgagcagcagcaatgcaaaggcactcaatgcaatgaaacagaaactaaagaagaacaacaagcagtatgagaacctgatccaagagtgcagagagcatccagagcgctttgaagatgacgatgtggaagacaaggatgacgatgatgagacagatgatgatgctagtgatgcagacattgaggatcctgaaaagatggttatgtctgaatcagaggaggaaggagatgatgatgaggagggtgaccaggatggtggagcctgggaaaagaagataagcaagaaagataagcttatggacaagcagtttttgaaagatcccagtgagattacttgggatattgttgataaaaagctcaaggagattgtggcgtcaaggggtaaaaaaggcacagggagggttgagcgtgttgagcagctaacctttttgacccgtgtggcgaaaacacctgctcagaagcttgaaattctctttcatgtgatttctgcccaatttgatgtcaaccctagcttacttggtcacatgccagtcaacatgtggaagaagtgtgttaataacatgcttcttgtgcttgatatactgcaacagtatcccaatattgtagtagacacctccgtggagcctgatgagaaggaaactcagaagggtgctgactatgatggacaaatccatgtgacgggtgacctggttgcattcctggagagattggattctgagtttttcaaaggtttgcagtgcactgatccatacacgaaagattatgttcagaggctcagggatgaacctttgtttttggttgttgcacagaatgtccaagattacctggaacgtgtcggtaactttaaggctgaagctaaggttgcactgcgtcgtgttgaattggtctactacaaacctcaggaggtatatgatgcaatgagaaagcttgcagagcaggatgaagatagtagggaggatgatgatgcagacgctgacgaggagcgtcaagtagttgatgacaataggggccctccaccatttgttgtgatccctgaggtcgtgcctaggaagcctactttcccagagagtggcagagctttgatggatgcgctgatgtctgtgatttacaaatatggtgatgaaaggaccaaagcccgggcaatgctgtgtgacatttatcaccatgctatctctgataaattttctgtggcacgtgacttgcttttaatgagccatttacaagacggggttcaactcatggacatatcatcacagattctgttcaacagagtcatggcccagttggggctgtgtgcttttagggctggtttgataattgaagctcatggttgcttgtctgagttatattcaactgggagagtgaaggagttgcttgcacaaggtgtgcaacaaagtcgataccatgaaaaaactcctgaacaggaaaggcttgagaggagaaggcaaatgccttaccatatccatataaaccttgaacttttggaagccactcacttgatttgtgccatgctgattgaggtccccaatatggctgccagtacttatgacaggaggaagtctatgaacagaacattccgtaggcttcttgagatcagtgagaggcagacttttgtcgggccaccagaaaatgtgagggaccatgtaatggctgcaacaagagccctccgcaagggtgactaccagaaggctttcgatgtcattaattcgctggagatctggaagcttttgaggaacaaggagcatgttcttgagatgctgaaacttaagatcaaagaagaagctcttagaacctatctcttgtcatactcttcttgctacgagtccctgagccttgaccagctcactacaatgtttgaccttagtgagcaacaagctcatagcattgttagcaagatgatgatgcatgaagagcttcatgccagctgggatcaaccaaccaagtgcattattttccacaatgttgatcaaactaggcttcagggactactcttccagatgtctgataagctctctgtccttgtggagagcaatgagagggcatatgaggccaaaactggtggtacccttgagggagcaccacccaggcgtaggggtggtgatggtcaggactcatccaacttgggcaagtggcaggagaacttcgtatcatcacaagggcggcaaggcggcgggaggtctggatactcaggcagagttggaggccctggaagaggtggtggtggctaccagagggacaggggtagtcagggttcccgtggaggctatggtggtggttcgcgcttccaagatgggggaaggtctcgcaaccagtctggttctatggcaagaggaggtgatggtggtgcacgcatggtgagcctgaacaggtctggtagaggttagagtagttctccaggatagttctcagcgcaaagttttgcaagttctgagtcactgatcaagtttctggcattttggaagtcacatctgttctgaagctattcttgatctcttaatttcgttacagcttacagtttaaatttgtcggacacttgacaaagagctctctggtttgtaccatgggagtgaggacagtattcactcctacatttgatataatgctggcactattttctactctc

SEQ ID NO: 20203 - DNA, 1046 bp, Oryza sativa
  ref <308>: DATABASE ACCESSION NUMBER: AK070530
  ref <309>: DATABASE ENTRY DATE: 2001-12-06
ggatcttccccccgacttcccgggccgtctcctcccctgcaccaccccaccccaccccaccccaccggcggcgatggcggcggctgcccccgcgacgacgtcatccgcggccgcgaggccctcctcctcctcctcctcctcgcggcaatccgacgctcctctgcgcgccgccaccgtctccttcccttactccccacggccggccgcgttggctgcaggcgctcgggcctcgcgggttagccccgtcgtggtcgccgccggcggcgggcaccagcggcttatggggtcgttgactaacacccaggggctcaggtttggagtggttgtggcacggttcaatgagattgtcaccaacttgctactgcagggagctcttgagacatttgagagatattccgtcaaaaaagaaaatataacagttgtaagtgttcctggcagttttgaaattcctgttgcggcacaaaagcttgggaagtctggaaagtttgatgcaattttgtgcattggcgctgtgattagaggtgacacaacccactacgatgctgttgcaaactctgctgcttcaggtgtactgtctgctggattgtctgctgagatcccatgcatatttggtgttctgacatgtgatgacatggaccaggctctaaatcgtgctggtggtaaggctggaaacaagggagctgaagccgctctaactgcaatcgagatggcctcgctgttccagcatcacctggcctgaccgccggggctactgatatcatcgggacggcaaagttttggctgctagagattttcgccgtttgctatagcatcttgaggccattattatccattgtccccaactggttgatcgggatgatggttgtgtttttaccgctgttctttttgtcgagtttttttgcaagactgaagaggtatcaccgtccagctaagctgttcaactgctgtatgtgagaaacatgagaccttgaattgaataaacgtcagtacgtcaccaagtactttgattcgtccatgaataaaaagcaggatttctgcacttgtgg

SEQ ID NO: 20204 - DNA, 1429 bp, Oryza sativa
  ref <308>: DATABASE ACCESSION NUMBER: AK070531
  ref <309>: DATABASE ENTRY DATE: 2001-12-06
gattcgcctccttcttgctgccgccgccatccccggttcggttctctcctcttctttagatcagttaaaataaatggctgacgcagaggacattcagccccttgtctgtgacaatggaaccggaatggtcaaggctgggtttgctggagatgatgctccccgtgctgttttcccgagtattgttggccgtccgcgacatacaggcgttatggttgggatgggacaaaaagatgcttatgtcggtgatgaggcccaatccaagaggggtatcctaaccttgaaataccccattgagcatggaattgtaagcaactgggatgacatggagaaaatttggcaccacacattctacaatgagcttcgtgtagcaccagaagagcatccaattcttcttacggaggctccacttaaccctaaggccaacagggagaagatgacacaaattatgtttgagacattcagcgttccagccatgtatgtcgctattcaagccgtgctttccctctatgctagtggacgtactactggtattgtcttggattctggagatggtgtcagtcacacagtcccaatctacgaaggttatgcccttccgcatgccattctccgtcttgatcttgctggtaggggtctgactgattccctcatgaagatcctgactgagaggggttactcattcaccacctctgccgagcgggaaattgtccgtgacatcaaggaaaagcttgcatacgtcgctcttgactacgagcaggagcttgagactgcaaagagcagctcatcagttgagaagagctatgagctgcccgatggacaggtgatcaccattggcgcggagcgcttcagatgcccagaggtcatgttccagccttctctcatcggcatggaagctccaggcatccacgagacgacatacaactccatcatgaagtgcgatgttgatatcagaaaggacctgtatggtaacattgttctcagtggtggatccaccatgttccctggcatcgcggaccgcatgagcaaggagatcaccgcgctcgcgccaagcagcatgaagatcaaggttgtcgctccgccagagaggaagtacagtgtctggattggaggatcaatccttgcatctctgagcaccttccagcagatgtggatctcaagggctgagtatgaagaatctggcccagctatcgtccacaggaagtgcttctagatgtggcctagctgtatctttcatgagaaccccttgtctattagcattagctggctgtttcatggacaaaaaaattgttgggtctgatggcttgtctatgggtgtatctactctgattagctccggtttttgtgtatgccaatataattattccgtaagtacgtggggagtcaagaacattatgtgtgtagtttgatttcataaattgatttgagattcttg

SEQ ID NO: 20205 - DNA, 3520 bp, Oryza sativa
  ref <308>: DATABASE ACCESSION NUMBER: AK070532
  ref <309>: DATABASE ENTRY DATE: 2001-12-06
tttgtaaatactgaataaccgatgcaattttcgattggatgaaactgaatgttccatgcactcctgcagtcctgctcactatcgcgactgagtatttctttgtagttataatgacattgcaatcaagtagaaatatccattagctaaatcttgacttagctgcctacctaatttgtttgcaacatgcatcatccaccaaatttaaatagcaaatctgactaggtagattacaagtttttgtgctttctagatttacactcccgaaggaaaatctccgattggctatcaaggacccatgttagtatgcaaatgtaaaactgcaacctatttccgattaaatccaatgattttctactatgccatctaataatttctcaattcaattttaagttcctttctacaacattttgcatcttatggtagggttagattttataccaaggtgtggccttttctgcccaggtgagtatttctgcatctatcttgctcctccggagcagataaacactttattccttcactttcattactctctctttcaaatccagcttattagagtccttttcattcaacagggtcatgcatggtggatgtatgtatggtttcagttcatgattttggatgaataaattaagtttaggttctttattgtagccttgtctcatgcatgagtggggatcatggggtctcgctccaatggtgcttcaaacagcatatgtagggggttatttttgcccttattttttttaatcttccttcctctttgtgtaaaaatgtaagatacgtctcaaaatatattgtttctatttggtcatcagcctttcccttgtttgctaaacgaatagtatgtcatcagcctcgccgtgtcatctcgatggcttgcatatatacgaggatgcgggaagggcctgttactgtaggggtgccataattggattggatttcttttacctttacagaacaatatttttgaacaaaaggaatattactttattttgatatcatcttttcttgtattgtaggttttggattctcaaactcgtagcgtttgttgtctacgtttggacgaagcgtcgctcatcttttcattttattcttgcctctgaagataggtactgtgccaatgaagatacatgtttgtgtgctagctaaatcacgcttatgcatttatgcatggttaattacattgtttgctctgttaatctacacaacctgatggcattctctgcaatcttaagggatttatagttttatgcatgattatgcttttcagatctttagtaaaaaatgctcgccagggatttaataagaaatgctggagcactaattgatcctctgctccatttgatcaaatagtactgtccatttatgcctacacttttctgatctcatagtattgtgtcaaataaatttgatatgtagctttggtgtccttaaatggcatggttgttttatacgtccctgtgattttccatgtcatgatttgttgttaccatttcattgaatgctttgctgttaatgatcgcttaacaatcagtaggctccgttggatttgtgcggactcataaagaagaggtgcttgtgtttgctggttcatcaaacagctccatcaaagcggtagggcgtgggataagccaaaggtttggctgtgctgctactactactaacatccattgacattcactattttgaagatcaatagtactatttttattttcggatcagcggtagggttctggacttaaattgccgatcaaatgatttgcggatgcaaataatgaatttccatatgtagacctgtagtgggccgtatgataataatatatttggtatattgcagaaatggctttgtagtaaaaattgctcatataattaagttgtcaaattatgtgcaccgacaatacacctgatttatctacaataacaggtaatgcctgatttgtctacaataacaggtaatgatgtgccgaattgctcttcagattcttcatccgatgttatcatgtttttgtcaagtgaataaactaaaactgtatgacaacagttacgtgttgaatcaactaaatttctgacagtagatgttcttaagtgcacaacctaaaatttctttaattcataagaacatgtaaccacattaggtataaagtttgcaagatatcaatcttgatggcctgttgctgctaggtgtatgcattaattctggtgcgctggatgtagtttgcttgcctctaggattatatgataagttagatgtattttgttggcctgctggatgtatgcattcagctcctgacttattcttgatttatttgtgcatgccggatccatggaagtatcaacccactaaagtctgaactctgaaataaggcttttggtatactgtggcctatatattctgcacgtcatagagctttcatgtcacaatatatgtgcaggttagcactggatggaaattaatacctcatttgttttctatcttttcaacaactttgctcagggttggtataaatcaccacttaagcaactttgtgatggcatccatctagccctatggcagttacatagaggaataacgatgcatttatctgcttatcttatgtaagtgaaacgatctggtgggtacaaatgattatatgattatgttattctccaagtcaatatcttggatgatcttatgctgcttttagtctgcaggcttcggggaaggttgaggattcaagccgtggtcaagagatttttttttttttgtgcttatattgtttgacaaaatagatatttggttgtagtgctgacaaaaatgtttgatatagcattttcttgattcatgtagattgacaattgatttcacaagtaaatgaaatagtatatgttttagacatttagtacacacgctattatctactgaggaggtgttttcacagcttatctacaatgactccaattttaaattcaacattatagctactatgctagattaaagagggtagtgaatatctgctcagaaatatttttgtatactcgtttttattttatgccgaaatttttgtattgatgtctcactgaaattgtttatatataggaatcatatatttattttcactatgaattccttgatttatcctgcactttcttcagaaatttgggtctaatactctaatttcttttgaatcctactgttacttgggcactgttgagaagggagggtgttggaactgccatggaggccgagctccaagcggtctacgcgtattcattgccaagatcggtctcaagctgcaattgtggaggtttacatattaactaccatcctacgggcctgttaggtgttgtatcaatagtttttttagttaacccaaatgtcaggactgattgattatgtaaaactaaattatttttagctttgttttgtcagtgctaaatatggtgattgatgcgatccgtaactttggttattgcaatgtaagatagcaattgatatatggagacaatatataatgcatatacaaaattagatttttgc

SEQ ID NO: 20206 - DNA, 1968 bp, Oryza sativa
  ref <308>: DATABASE ACCESSION NUMBER: AK070533
  ref <309>: DATABASE ENTRY DATE: 2001-12-06
gactgatcaggtcttcaggagaaggagcttgctttgtactcctaactgctccttccagacacagctttgctactggattactgccaattgagtcttgttattcggttcctcaatttatcaagttcttcagagcaggcagtcgaagtccataatgtccaagactgagagcagaaagttgtccgatgactatgaagttgtggatgttcttggccggggcgggttctcaatagtaaggaggggagtgagcaagtctgaagagaagacccaggttgccatcaagactctgaggaggctcggcccggcgatggcgggtatgaagcaggggacaaagcccgtgcccggctccggcctgccgatgtggaaacaggtatcgatctccgacgcgctgctgacgaacgagatactcgtcatgaggaggatagtggagagcgttgcgccacatcctaatgtcatcaacctgcatgatgtgtatgaagatgtgcatggtgtgcacctcgtccttgagctgtgctcgggtggtgagctttttgatcggattgtggggcgtgaccggtactcggagttcgatgcggcctgcgtcattcgtcagattgctagcgggctggaggctcttcataaggcaagcattgtacacagggacctgaagccggagaattgtctgttctctgacaaagatgagaagtccacactgaagatcatggattttggtttgagttctgtcgaagatttcagtgacccaatcgtcgcgctgtttgggtcaatagattatgtttcaccggaggctctatccaggcaggaggtttcagctgctagtgatatgtggtctgttggggtaattctgtacattcttttatctggatgcccaccatttcatgctgcaaccaatcgagaaaagcagcaaaggatcctgcaaggtgaattcagttttcaggaccacacatggaaaacaatatcttcatccgcgaaagatttgatttcgcgccttctttctgttcaaccttacaaaaggccaacagcaagtgatcttctgaggcgtccttgggtgattggagactgcgccaagcaagatctcatggatgcagaggtcgtctcaaaactgcaaaagttcaatgctagaaggaaattgcgggcagctgcgatagccagcgttttgagctgcaaagtggcattgaggactaaaaggctgagaaatcttttaggaacccatgaccttacctcagaggagctggataatctgcggcttcattttggacgaatatgtgcagatggagaaaacgccactctgtcagagtttgagcaggtgctgagagcaatgaaaatggactcactgattcccctagctccccgcgtattcgatctgttcgacaacaaccgtgatggaaccgtcgacatgagagagatcctgtgtgggttctccagcctcaggaactcacgaggcgatgatgctcttcgcttgtgcttccagatgtacgacgctgatcggtcaggctgcatcagcaaggaagagctggcatcaatgctccgagcgttgccggaggagtgcctgccaggcgacataacggagccggggaagctggacgaggtgttcgaccagatggacgccgacagcgacggcaaggtcaccttcgacgagttcaaggccgccatgaacaaggacagcgccctccaggacgtcctcctctcctccctccgcccacagtagcagcagcagcagcagcagaagcttctcagattgatcgatttcttcaggaaaaatactagtatctgtactgctaatacttctgcagcgaatggctggctgccttatctgaaattttcatctgtgtcggctgctgaaatggtagcaaaactgtagctgttctgttgtcacctcgtccgaaaaaattatgagcggtgcggatttcacattttcactatattctgggtgaaattgaatagcaagccgggtaacatatttacctgatttcc

SEQ ID NO: 20207 - DNA, 2514 bp, Oryza sativa
  ref <308>: DATABASE ACCESSION NUMBER: AK070534
  ref <309>: DATABASE ENTRY DATE: 2001-12-06
ggcaagctccttaatttgttcaccaagcagtaccactggtaaaataaagcaaaagcaagtaggcaagcatgtggcggctgaagatcgcggcggagagcggcggcggcagcggcagcagcccgctgctgcacacgggcaacggcttcctaggcagggcagtgtgggagttcgatcccgacgccggcacgccggaggagcgcgccgaggtggcgaggctgcgccgcgacttcacccgccaccgcttccagaggaaggagtcacaggacctcctcatgcggatgcagtatgccaaattagggcatctacaaccagatctttcggctgtcatagttgaagataatcaaaatgttaccgaagaaactatattgtcttcattgcgacgagctcttaatcaatattcgactttgcaagcacatgatgggcattggcctggtgactacagtggaatcttgttcattatgccactcctgatattctccatgcatgttacgggaacgctcgatgtcgtcttgtcattggaacataaacgagagatatgtcgatacatttacaatcatcagaatgaagatggcggctgggggacacaggttcttggccagagtaccatgtttggctcatgcttgaactatgctacattaaagctccttggtgaggccctacataataacgatgcattagcccaagggcgtatgtggattttatctcatggaagcgcaacggcggcacctcaatgggcaaagatatggctctcggtcattggtgtatacgattggtcaggaaacaaagcaataattcctgaattatggatggtgccgcattttcttccaatacatccagcaagattttggtgctttgtccgtatgatttacatgtccatggcatatctttatgggaaaaagtttgtcggcccaatcactccaactatattggaaataagagaggagttgtacaacataccatacagtgagattgactggaagaaggctagagattgctgtgccaaggaagatcttcgatatccttgttcatggatacaagatattgtgtggacatatttaaacaagtatgtggatccaatgtttaatgtctggccatttaataagctgagggagatatcgctgcgcaaccttatgaaacatatctactacgaggatgaaaataccaaatacattggtttgtgcccaataaacaaggcattaaatatgatttgctgttggatagaagacccaaattcagatgcattcaagaggcatcttccaaggatttatgactttctatggcttgctgaagatggcatgaaggctcaggtatatgatggctgtcagacatgggagacagcatttatagttcaagccatttgctctacgggcttagtagatgagttcagtacaactcttgagaaagcctatggtttcctgaaaaattcgcaggttcttcatgacctccctaatggcaaaagtttctatcgccatagatcaaaaggttcatggactctttctacagcagacaatggttggtcagttcctgattgtacaggagaaacacttcaggcattactagggctgtcaaagatttctcctaaacttgttggtgatccaataaaagaaaaaagtttgtatgacgcggtggactgcctgctgtctttttcgaacaaagatggtaccttctcctcgtatgaatgcacaagaacagcttcgtggacagagattctgaacccttcagagagttttcggaacattgtcgttgattatccacatgtcgagtgcacatcatcagcaattcaaggtctaatatcatttacagagttatacccagggtaccgtggtgtagaaattgaaagttgtattaagaatgctgtaatgttcattgagaacaaacaacaaaatgatggctcatggtatgggacatggggtatatgctttacctatggggcattctttgcaataagaggactaattgctgctggcagaaattatgagaacagccaagctatcaggaatggatgcaagttcctattgtcaaagcagcttagtgcaggtggatggggtgagcactacagttcaagtgaaattgaggtctatgttgatagtgggagtcctcatgcagtgaacacctccttggcaatgttagctttactttactctggacagattgaacgagatccaacaccattatatcgtgctgcaaaacaattaattagcatgcaacttgaaacaggagagttcccccaacaagaacatgttggatgcttcaattcttcactttacttcaattacccgaactaccgcaacttatatcccatttgggctctcggagaattctggcaccgacttgttgcaagcaaggactgaagaaggcagccatgcacatacttatgtgatgacaatccacactacatttgttctctacaaatttgtgcaattattgaagagtgcagtatagaaagtacattgcaagttatggcgattattgtatgaacacaatgttaccctaaaaaatatcaaatttataacc

SEQ ID NO: 20208 - DNA, 1111 bp, Oryza sativa
  ref <308>: DATABASE ACCESSION NUMBER: AK070535
  ref <309>: DATABASE ENTRY DATE: 2001-12-06
ggggttcccggacggcgacctgttcacgttcccggacttggagccccacggcgccggcgccggcggcgagggcggcaccgccggctacctcgccgcgtgcggcgaccgcctcctcctcgccgacgacgagtacggcgtgctccgcctcaccagcccgctgacgggggacacggtggtgctccccggcttggtgatcggcggcggcgtcagcgtccgcgacgtgccggtggtgctcgccgacgaggcggcgccgtccggcacggcgccgcggcggtggagggacagcgaggagatgtccgtgctgaagctggtcgtgtgccccgtcggcggcggcggcggcggcctcgtcgtcgccgccatcgtcggccgcgagcacttcgccaaggtggcgctctgcacgcctgaggggttcgtgtggtcgatcagcgcgcgcgaccggtggcggtggtacgacgacatggcgttccacggcgggcgcctctacgctctcacccaggccgaggacctcctcgccttcgacgtcgtcgacgcggcgacggcgagcccgtggtcaccggcgtcgagcgcgtcgtccgcagcagcgtggacgcgttggacgtcgaggacacccggatgcactacctcgtgacgtcgctcgacggcgcgctgctgatggtgcgccgcgagatggcggacgctgggagcacggacgggttcgaggtgttcgaggccgacctggcggcgtcgcggtgggtggaggtgggcgggctgggcgccggcggcgaggcgctgttcgtcggcaggctgtgctccagggcggtgcgcgcgccggacgacggcgaccagatcttcttcctcgacgacaccgacggcctgtcattccggtgggagctccagccgcggccgccgtaccaggtcgccgcgtacgacatggtccggcgaacgttcagcatgctcatgtggaagaagccattggaggacggcaacacgccggtgacatggctcttccccgacgacgacgatgacgacgatagagtgaccaagtgatcaagccattaggattggcagatcgatcaaaaccatacaattatggcgaaataaatccatattaatttcatgaatcatcatcatc

SEQ ID NO: 20209 - DNA, 2159 bp, Oryza sativa
  ref <308>: DATABASE ACCESSION NUMBER: AK070536
  ref <309>: DATABASE ENTRY DATE: 2001-12-06
ggtgtcatcgtcggccttgctgcccatgacgcgatcaagaaacgccaccgcccctccgttcttccagagatcgaatcttgggggatcgagctagttggggttagcggtgtggaagggtcgaaaatccttggagacattggattggattgcagtggggcggacggcggtgggcggggcttcttgtaggctgggctgtaccagagaggagccaagacggcggcgataacggcggcaccggtggcgacggcgccgtcgccgtcggagggtgggggaggcgggtgcctggattgtctgcaggatgtggttcgggcgctgtcgatggggacatgccttacgacggcggagcagcgggccatggaggtgccggctgcgtcggtgaagggaggagggggcaggaggagtgacgaggaggcgcccggcaggatcgcgggtaacggcgcggggaatgtggcctgcctgttcactcggcaggggaagaagggcaccaaccaggatgccatggtcgcgtgggagaactataacggaagatcagacacggtattttgtggagtttttgatggccacggtccacatggccatctcattgctaggaaagtaagagatattctcccttcgagactctgtgatttgatatatgaagactgtggggatagtccaaccagcaattcagatgtctcaactctggaagagaatttatctccgtatgcagatgcagagtgcagatctcccacattggctggacaaaaagaacatcaagaattcttcaacgcaatgaaagaatctttcagaaaggcttttaaaaatgtggataaggagctcaaattacaacggaacattgatagcatttgcagtggaactactgcagttactttaatcaagcaaggtcatgatcttattgttgggaatctaggtgactctagagctgtattaggcaccagagatcagaacgataagttggttgctcatcagttgactgttgacctgaaacctgatcatccaagggaggctaggaggatcagacggtgtaatgggagggtctttgctcatcaggatgaaccagatgtggctcgcctttggcttcctaattgcaactctcctggactggcaatggcccgagcttttggtgacttttgtctaaaggattttgggttgatctcagtacctgatgtcacctataggcaaattactgaaaaagacgagtttattgtcctggcgacagatggggtgtgggatgttctctccaaccaggaagtggtggatgttgttgcctcatgctctggtcgtttcgctgcagctcgttctgttgttgatttagcaaatgagacttggaggttcaaatacccaacctcaaaaactgatgattgtgcagtggtctgtcttttcctgaacaagtatgaagttaccggtggtttatcagggcaacctggatatagtccaaggatgcctgccctatcaggtattacccggcccaatagtaaaagggttactcctgacgacgtcgatgatggtagtgactcaaacgtaagcggagatgagaggtccttggatggtttcactcgattgaacacattgttggcactaccaaagtttggtgacacaagtccaactaagaaatgagttggtaagcagatgagttttgcaggtgctttggacaagagagcatatcggctatattagcatgcccggtgagctcccgttctgatccagcttacgatagctaagaatgagtagggttgtttttttttttcatcctaactcccatttggttacgagttgacaattacgcagcaagcatttggagtcttaactcttatttagtcgagagtagacttaacctttttgtatagctgctcatcgattttctgtcttattgtatgtacttggcgattatatgtggacaaatcctactcattcttatggtaatttcgtttgtcggattatgacagttggaaccttttgctcaaaaggttcgtatgcgtttctaaaaaaagggggttcgtatgctctagtcgcatgcaactatgcaagccggagaaggtctaaaaggccaacgataggggtaaaggataaattccttatatatgaaacggatgtaattacacagctagttctagctggtttgtctaatacaagagacaccttccacctatacttcaaat

SEQ ID NO: 20210 - DNA, 2328 bp, Oryza sativa
  ref <308>: DATABASE ACCESSION NUMBER: AK070537
  ref <309>: DATABASE ENTRY DATE: 2001-12-06
gactctcacgagacagcttcccacgcagcgcagcgcaaccgcagcaatggccgattcgccaaaccctagctccggtgaccaccccgcgggcgtcggcgggtcgccggagaagcagcccccggtggatcggcgcgtcgcggcgctcgccgcgggcgcggcgggcgcgggggcgaggtacaaggcgatgtcccccgcgcggctgccgatctcgcgggagccctgcctcaccatccccgcgggcttcagcccctcggctctcctcgagtcccccgtcctcctcaccaacttcaaggttgaaccctctccgacaactggtactctgagcatggctgcaattatgaacaagagtgcaaatccagacatacttccttcgcctagggataaaacatctggtagcacccatgaagatggtggctctcgagattttgaattcaagcctcatctgaattcatcctctcaatcgacggcttctgctatcaatgatcccaaaaagcatgaaacttctatgaaaaatgaaagcctgaatactgccctgtcatctgacgatatgatgatcgacaatatacctctatgttctcgtgagtcaactctcgcagtcaatatttcaagtgccccgagccaactggttggaatggttggtttaactgacagctcacctgctgaagttggtacatctgagttgcatcagatgaatagctctggaaatgctatgcaggagtcacagcctgaaagtgtggctgaaaagtctgcagaggatggttataactggcgcaaatatgggcaaaagcatgttaagggaagtgagaacccgagaagctattacaagtgcacacatcctaactgtgatgtaaaaaagctattggagcgttcgcttgatggtcagattactgaagtggtttataaagggcgtcacaatcaccctaagccccaacccaataggaggctgtctgccggtgcagttcctccaatccagggtgaagaaagatatgatggtgtggcaactactgatgacaaatcttcaaatgttcttagcattcttggtaatgcagtacatacagctggtatgattgagcctgttccaggctcagctagtgatgatgacaatgatgccggaggagggagaccttaccctggagatgatgctgttgaggatgatgatttagagtcaaaacgaaggaaaatggaatctgctgctattgatgctgctttgatgggcaagcctaaccgtgagcctcgtgttgtagtacaaacggttagtgaggttgacatcttggatgatgggtaccgctggcgcaagtatggccagaaagtagttaaaggaaaccccaatccacggagttactacaagtgcacaaatacaggatgcccagtcaggaagcatgttgagagagcatcacatgatccaaaatcagtcataacaacatatgaaggaaaacataaccatgaagtccctgcgtcgaggaatgcgagccatgagatgtccactccccccatgaagcctgttgtccatccaattaacagcaatatgcagggccttggtggcatgatgagagcatgtgaacctaggacatttccaaaccaatattctcaagcagctgaaagtgacaccatcagccttgatcttggtgttggaatcagcccgaaccacagcgatgccacaaaccaattgcagtcctcagtttctgatcagatgcagtatcaaatgcagcccatgggttcagtatacagtaatatgggacttccagcaatggcaatgccgactatggctggcaatgcagctagcaatatatatggttcgagagaagaaaaacctagtgaaggttttactttcaaagccacaccgatggaccattcggctaacttatgctacagtaccgccggcaatttagtcatgggtccgtgagagtctatactaatgcttatagctcgagaatcatatattaccaatgcttcgtattgacattctcttcagaaagatgctcctatcattgacacatcagttgaaccggaggcgagagctgtacctgtgggctgcagcaaaatacaccacatgggtcttctggagcggcaaaggccttgttgtatacttgtatgtggcactggccctatattcgttgtacagtgaacccgttaagattaattagatcatcagaatttggttttctttaactatcttcgccttcagtggaatgtggatagaacatggattatggttgatttggttttgtgagcttgtctaattctcttttgtgacaaagctttgtatctcactgcatatgtacaatgccgttggcagtaaagatatgcaaatgtgatacctgtaacacg

SEQ ID NO: 20211 - DNA, 1509 bp, Oryza sativa
  ref <308>: DATABASE ACCESSION NUMBER: AK099143
  ref <309>: DATABASE ENTRY DATE: 2002-08-28
gtcgaacaccttcccgagccgactgccgccgccgccgccatgctcctcgcgaagccccacctctcctcctcctctttcctcccatccacgcgggtgtctagccccgctccgggtcccaaccacgcaaagcccatcgccgcctctcccgcccctcgacgctgcctccgtctcgccgtcacatccgccgcggcgccggctgcttcgtcggcggaggcggcggcggcgctgagccgcgtggatgtgctctcagaggcgctccccttcatccagcgcttcaaggggaagaccgtggtggtgaagtacggcggcgcggcgatgaagtcgccggagctccaggcttcagtgatccgcgacctggtcctcctctcgtgcgtcggcctccaccccgtgctcgtccacggcggcggccccgagatcaactcctggctgctccgcgtcggcgtcgagccgcagttccggaacggcctccgcgtcactgacgcgctcaccatggaggtcgtcgagatggtgctcgtcggcaaggtcaacaagcacctcgtctccctcatcaacctcgcgggcggaaccgccgtaggtctctgtggcaaggacgctcgcctcctcaccgcgcgcccctccccgaacgcagcggccctcggcttcgtcggcgaggtctcgcgcgtggacgccaccgtcctccacccaatcatcgcctccggtcacatcccggtcatcgccactgtggccgccgacgagaccgggcaggcctacaacatcaacgctgacacggcggccggcgagatcgccgccgcggtcggcgcggagaagctgttgctgctcacagatgtgtctggaattctggccgaccgtaatgaccccgggagtctggtgaaagagatcgacattgctggggtgcggcagatggtggccgacgggcaggtagctggtgggatgataccgaaggtggaatgctgcgtgcgtgccctcgcacagggcgtgcacactgcaagcatcatcgatgggcgtgtcccgcactcgttgctgctcgagattctcacagatgagggcactggcactatgatcactggctgaggtgattcatcccgtcgtggtttttgtcattctttttggagttggcctggtgtgatatgatagatttaactgtgaaccacaagtgaatggagaaaatgacttgatttggcaccactataccaaggttctagctgtgactcatgaggtttggagaaactgatggcatggagggctggactggtagagctctgggtccttgcagacatcattcctctgttctttccaccaccatggcatggtcagagcaaattccacttgcatctaatggaacggtgccttcttttccgtatttaagtactgtattagtggaaactttcagtctttcattgtgccattcgtcatttctgatctgttgtgtgagagaaattttgagaaaagggaggaaaagctctaccccttcacttggcgttacagaatctattcctcattatgttgtcg

SEQ ID NO: 20212 - DNA, 1828 bp, Oryza sativa
  ref <308>: DATABASE ACCESSION NUMBER: AK070538
  ref <309>: DATABASE ENTRY DATE: 2001-12-06
gaagtaaacccaaagccgccaactgcttctctcgccgccgccgccgccgccgccgccgctcaccgtcgccggagaagagggcaggaggaggaggaggaggaggaggggggagccatggcgccggagcccgaggacgacatcatgaacgagaagaacccgcgcccgctcgacgaggacgacatcgccctcctcaagacctacggtcttggaccttactcgaccagcattaagaaggttgagaaggaaatcaaagagatggcgaagaagataaatgatctctgtggaattaaagagtctgacactggattggctccacctagccagtgggaccttgtatccgataagcagatgatgcaggaggagcaacccctgcaggttgcaagatgcacaaagatcatcagccctaacacggacgatgctaaatatgtcatcaatgtcaagcaaattgcgaagtttgtggttgggttgggcgacaaggtctcccccactgatatcgaggaaggaatgcgggttggagttgatcgaaacaagtaccaaattcaaattcctttgccaccaaagattgatcccagcgttaccatgatgactgtggaagaaaaaccagatgtgacttacaatgatgttggtggatgcaaggagcagattgagaagatgcgtgaggtggttgagcttcctatgcttcacccagaaaagtttgtcaaacttggtatcgatcctcctaagggagtactgtgttatggccctcctggaactgggaaaacacttcttgctagggcagtggccaaccgcacggatgcttgctttattcgagtcataggaagtgagctagttcagaagtatgttggtgagggggcccgcatggttcgggaactcttccaaatggcacgatcgaagaaggcttgcattgtcttctttgatgaagtcgatgccatcggtggtgctcgctttgacgatggtgttggtggtgacaatgaggtccagcgcactatgcttgagattgttaatcagcttgatggatttgatgccaggggaaacatcaaggtcctcatggccaccaacaggcccgataccttggaccctgcattactacgtccagggcgtctggacaggaaagttgagtttggcctgccagacctggagggccggacccagatcttcaagatccacactcgcaccatgaactgcgagcgggacatccggtttgagctgctcgctcgcctctgccccaactccactggggccgacatacggagtgtgtgcacggaggctggcatgtacgccatccgcgctcgcaggaagacggtgacagagaaggatttcttggacgcggtgaataaggtgatcaagggttaccaaaagttcagcgcaacgcccaagtatatggtgtacaactagagggcactgaccttgatttcccgtttcttcctgtgcccctcctttggaccttcagaaagattgagcctgtttgtttccctttcttactcaaaagaaacctgggctgttttctgcatcatatgacacgctgggataatcttatctttagaatattgaaagatcacaatgggaggatgcgatgtgccctacactacactgccgctcttgtgctagactgacgttacgctctccctctcctttcatgtcttgtgtcggtatcgtatcttttgtgtcgtaattgcttgactggaaggggtcaaggtgatgccggacagcacgagcaaaggaactttttcactaggacacgaacaaggcaacttttttttactaggatggtcaaatggataaggcatttcgcgaaaaagatggtcacgaccagtaaagttgtggattt

SEQ ID NO: 20213 - DNA, 699 bp, Oryza sativa
  ref <308>: DATABASE ACCESSION NUMBER: AK070539
  ref <309>: DATABASE ENTRY DATE: 2001-12-06
gagcgactagcgagagatcgatcgaagagaagaggagagatggtgcacgggaagctggaggtcctcctcgtctgcgccaagggcctcgaggacactgacttcttgaacgacatggacccctacgtgatcctcacctgccgcactcaggagcagaaaagcagcgttgcaaaaggagcaggaagcgagcctgaatggaacgagaccttcgtcttcaccgtctccgacgatgttccacagctcaatgtcaagatcatggacagtgatgccttctcagctgacgatttcgtcggtgaagcaaacattcctctggagcctgtgttcctggaaggcagccttcctccagccgtccaccgtgtcgtcaaggaggagaagtactgtggagagatcaaggttgctctcaccttcactccagcagcggaaactcgccatcatcacaaccacgagaacgagggggagggttacagcagctggaactgattgcctgctactaatgagcatcaacgagaggagatcttgtctcaagaattaatgtgcttgtcaacaatactccgtgctatgatgtcctaagaactgaaacatccatttatatgtatatcccagaccattgacttgctctgcctaaattttgtatattttttactacaaagatgtgatggtgtgaaatccagaatatttttatcgaatcatgcactttctttc

SEQ ID NO: 20214 - DNA, 963 bp, Oryza sativa
  ref <308>: DATABASE ACCESSION NUMBER: AK070540
  ref <309>: DATABASE ENTRY DATE: 2001-12-06
ggcaaaagttgaggtaatggatcgatcagagatggggaggggaagggttgagctgaagcgcatcgagaacaagatcaaccggcaggtcaccttctccaagcgccgcaacggcctcctcaagaaggcgtacgagctctccgtgctctgcgacgcggaggtggcgctcatcatcttctccagccgtggcaagctgtacgaattcggtagcgccggaataaacaagacattggaaaagtacaatagttgctgttacaacgctcaaggttcaaatagtgctcttgctggtggtgaacatcagagctggtaccaagagatgtcaaggctcaagactaagcttgaatgtctccaacgctctcagaggcacatgcttggtgaagatcttggaccattgagcataaaggaactgcagcagctggagaagcaacttgagtactcactgtcacaggctcgacaacgaaagacacaaatcatgatggagcaggtcgacgatcttcgccggaaggaacgccagcttggagagctcaataagcaactgaaaaacaagctagaagctgaagccgatagcagcaactgcagatcagccatccaggattcctgggtccatggcaccgtcgtcagtggcggcagagtgctgaatgctcaaccaccaccagatattgactgtgagcctactctgcaaattgggtactatcaatttgtccgtcctgaggcggccaatccaagaagcaatggaggaggaggggatcagaacaacaactttgtgatgggatggcccctctgaagtccaagcttgctaataaaaacgctggcgtgctataatatatagttcggcaaatgttgaaacacatgtgttctcagtatgtatatttctcccctatccggtggtactcttagcacgtacctatgagtgtatgtttgtacgttatctatactctatgctaggcaaccctatactattatggt

SEQ ID NO: 20215 - DNA, 1195 bp, Oryza sativa
  ref <308>: DATABASE ACCESSION NUMBER: AK070541
  ref <309>: DATABASE ENTRY DATE: 2001-12-06
tggggccttggcgtaaaagaaagagaaatctccattctcgtcgtctcctcagctgcttgcgccaagacgagtcgcggctcaacagggggaggggcggcgatctccatccatccggcgagcagagcaggggaggggaggggatcctggaaaatgctaaaccttattaagataaagggtcaaaagaaggaagatgcagccaatgcaaatggaaagcctcctgccaaaaagcaaagtccaggggagttgcgtcttcacaaagatattgctgaacttaaacttcctaagtcgactagaatttcttttcctaatggcaaggatgatttgatgaactttgaagttactattcgacctgatgagggatactatgtaggtggtaaatttatttttactttccaagttcctcctgcctatcctcatgaaccacccaaagtcaagtgcaagactaaggtctatcatcccaatattgacttggagggaaatgtctgccttaacattctgcgtgaagattggaagcctgtcctgaatgtcaacacgattgtatatggcttgaatcttcttttctcacaacctaatgatgaggaccctctaaatcatgaggcggcagcagttcttcgagacaacccagaaaagtttgagagaaatgtccagagggcaatggctggaggctatgttggtgaaacccacttccctagatgtatgtaaggcctgaagatggtgatcggtacctgacttatctgctgctgccatttctcctaccaatgcactatggtaaaagcagtatatgtaaccaagaaggaacttctctgttatgtaacaacagcagttgctagaaagtaagttagtgaggcaattgaactcacgttcataacccgcaatccgaagactctgggttaacctgttgtggcaaatgttctcttttggccctcgcgcgcatctcagtcattctgattcataccagtttctgagatgcttttgtataatgccagctagagaaaatgctgaacagtatgtgtgtgctgcacttactgcctgttatgacttatggctaccaggaagtaagaacaagttcactaacattgcttaatgtaacatgctaccttgggtagttgtgttgttcttttttccaagctctgtaactggaaaagtcttctccacctaaatgttctgaaaggcatttcatggctattttaactgc

SEQ ID NO: 20216 - DNA, 1586 bp, Oryza sativa
  ref <308>: DATABASE ACCESSION NUMBER: AK099144
  ref <309>: DATABASE ENTRY DATE: 2002-08-28
ggctcatcccttcttccaccctttccttcccctcctccgccccccctctcgcctcctctcctcttcgcctcaaaagccgccgccaccgccgcccagggttccaacacctcccgctcctcctcagccatgccgtcctacgcgcaccaccacagttctctggatgggaagatggacgcgctgaaaagtagttgccggtcggaggaggcggccgacgagggggcggccgcggcgccgtcggcgtgggggatggttgagagggacgggttctccgtcgaggacctgctcgacctcgaggagttctgcgaggcggaaaaggacgccgccgaggagaacgagcaggcgctggccctcgtcgccgcgccagaggaggaaaagtcgaaggacgactcccagccgtcgtccgtcgtaacgtacgagcttgtggcgcccccgccgccgcctccggagattgttgacctgccggcgcatgacgtcgaggagctagagtgggtgtcgcgtatcatggacgactccctttccgagttgcccccgccgccgcagcctcctgcgtccgtcgtggcgtcgctggccgcgcggccgccgcagcctcggcagctgcagcggcggcctcaggacggagcttaccgcgcgctgccacccgcgtcctatccggtgcggactccgaccatctgcgcgctgtcaacggaggcgctggtgccggtgaaggcgaaacgcagcaagcgctctcgggccacggcgtggtctctctcgggggcaccgcctttctcggactccacgtcatcctcgtccacaaccaccacctcctcgtgctcctcgtcggcttcgttctcgtcgttctcgccgctcctcaagtttgagtggcacccgctcggcggcacgtcggacctcccggacgatcaccttctgccgccggggaagaagtccaagcacggtaagaacggcaagaacaagcctaagaagcgtggccgcaagccgaagcagctcccaccacatccctcgggcgcggcggcgtcggcccccgcgccgggcgaccggcgctgtagccactgcggcgtgcagaagaccccgcagtggcgcgcggggccggagggcgccaagacgctctgcaacgcgtgcggcgtccgctacaagtccggccggctcctccccgagtaccgcccggcgtgcagccccaccttcgtgagcgccatccactccaactcccaccgcaaggtgctcgagatgaggcgcaagaaggaggtcggctccggactcctcaccgccgccgccgccgcagcgcccgccgtggcgtcgttctagctaaagcaagctagccaccccgcgcgcccccgcggtggctgtacatttttccagccgtattagtcctgtaccgtacctggatttttttcccctttcttttccagtattatcttagttccggttggattaattagagttaggtgcctttaggtcatgttaggtctaggaattcagctttccggtgctccagctcaaaagcttttactatagtttgttagggcactgctgctgtagcagcagtgcagccgcggcagcgctagcgcagaacttcatttccattctagctt

SEQ ID NO: 20217 - DNA, 1925 bp, Oryza sativa
  ref <308>: DATABASE ACCESSION NUMBER: AK070542
  ref <309>: DATABASE ENTRY DATE: 2001-12-06
gagacggcctcacgccctcaccccatttgttcagcagcacatcgatcgctcattcgctcccttccaggggagcacgcgtcgatcggttgaaggcgccatggctagtagaggaagtggaagtggaagcggaaaaggaaaaggaaaaaaagcaagtggaggtacaagaggaaaaggaagaatgccactagatggagaaatcactgaaagaattagcacgctgcgcatggcaaatactccacgcactgaacgtcttagaagaaatttggcatcactagtgttacgccaggcgcttcagggtgtatattcggaaattctcggcgggtatatccaatcatatgagttggactatcaggatcaggatggatgctcgtttgttcaaggtagaatttttatggagtcaccacgaagtggagaagaagggttcattcaacatgatgcaacatttgttgtcatggatgaagattatgaaactggaaggattatggcccaaaagatctatgataccactatcaagtttcatggatacaacgatgtcattgcagatatctatctagttgcctactgtgaaacacttggtaaatgggttattggatatgagcctttttgccagtactggcttgaaagtacccttgcaccattttatgagagtgatactacaatttcagcatactggagagataaaatcagggaaatgactgaaagcatatcatatttatgcacaagaaaagtgagtcatggtggattagcaaatcgagagagttatgtgcttgacttggactcaaaattaaaattgattaatgtggcaaggtattcaactgatggtagcacaactcgtgacgatgtcgtggacttctttgaccttttatgcacggaagacaggattaatgcttcagggaatggaaatgtggagtgggaaggatttgactacttgatcaagtctaattcgatgtataacaccaggttcggcgagtggaaacaagcaaatattgaaccacccaattttgaaagaccattcagctgagaaactggcatgttatttaagtattcataagaatgcccagggaatgaatcgagcatcgttgacaaatttttccaatgcactgctctgtaaaatacctgattacgctgggtataccagcttggaagagtatgtcatgaagtcctgtggctgtgacttgtgttatgacactgttgcctgtgtcacccctccccgcagagtttacattgacataatctatttcataaggcatctggttgaacatgctggtgacagaaaatacaataagactatgttgcattggactgctgacgcaatatttgacaagatatgtgggatgtttcctggctttatgagcatggcctactcggttcaagcagtgaacccacggtattggtctaacaacccggagtggactaaactcttccgtgaggcggaggagaacggcattgaacttccagatgattcctactagtgctcttgctgatccgaggacagatcgatggtagcagccaacttgaagtcggtacgtatgtaagttcgtcgtcctgtgatccttgacgaagcaagttgaaccaaccattaaataaattaagttaatacaccatctcatctgactgatggtgtagtagtctcagtgtgctagctagtgccaacgcatgcaaagctatacgctgtgtgtgttgtaaagcataagctagctagtcacgctctcagctgttatttgtcgttctagctatttgatgcggcatgcagtcacgaagactatgcagcttgatatgtatgtcgcagtattaattagtactatcttagttgaacctagcttgtcggttgatttgtactctatgtcgcagtacgtatcactacgtactctgcttctgtctcagttgaacttggaccttaattattaattagcttattgtgtgtc

SEQ ID NO: 20218 - DNA, 2952 bp, Oryza sativa
  ref <308>: DATABASE ACCESSION NUMBER: AK070543
  ref <309>: DATABASE ENTRY DATE: 2001-12-06
gtggtttaaaccccccaaaccccacccaataatcctcctccttaatgataaacacgaagaaaattaaatactccctcccacaatttttcctttttctttctttcttttggaggccctccacaattattttattttggttgttggtggtagtggatggtgtttcttttttattccatttgtttatttatttttggcaacaacaagaagaagaggagagagagaagtagaagaagagaggagagaagctcctctctctctctcttgccttttttttttcttctctttttcatattgttatcttgggatctgatttttgtccccatactgggagggaaagaggagaggagggattgattttctttctcctcctcttcttgttcttcttcttgttgttccactcttattgttcatcatcctcctcctcatagctgaccaaatctctgctgtgacagcaatctctgctgcttggttctgcctcccatgaggagcacaccatcagtgtgattacaaagcaaggaaccctcctaccgcgtcgctgagctgatgaaggagctctgacgactcggatgcattcttctgccatcatcaattgatccaacaaggcaactcgatcggaatttgagtttggtgaactctgtaattgattccctgcaagtatccatgcctttgcagcaatcttgctaattgagttgtcaaagctgcatacatggctacttactactcgagccctggcaatgaaagggactcgcaagctatgtacccagcggattcaggcaattcatcatatcctgtgccatcagcaataggaaacatgttatatcctggcaatgggtcttctgggccatacacggaattcagtggcattatccagcatcagcagaatttcatggagctgcctggccatccaactgcgatctctcaagattcatcgtcacgggaacctaacatggtcgcgtcgtacatggatcagcgctcttttggacctgccaaagatatgagaaatgagatgttgatgcatctgatggatggagcacataatgctggtgctgatctcatccacaatgacactcatagcagcgcgcagattgagtttggcctattgaacaaccacaattcgatgagcgttgcaccagcaccaggccaaggattgtctctgagcctcaacacgcatatcctggcgccttcgtatccatactggtctgcgaaaacagagttgctaacaccacactcttaccatggtgatgacaacagaatgaagaatatgcaatctgaggcctcacaggcaatcagaaactcaaagtatctgaaagcagcacaagaattgcttgatgaggtcgtcagtgtttggaagagtataaagcagaaggctcagaaagaccaggctgaagcaggaaaatcagataacaaagaagccgaggggggttcgaaaggtgagggggtatcttccaacccacaggagtctactgccaatgctgcaccagagatttctgctgctgagaaacaagagctccagaataagatggcaaaacttatggccatgttggatgaggtggaccgaaagtacaaacactattatcatcaaatgcaaattgtagtctcatcttttgatatggttgctgggtctggagctgccaagccttatactgcagtggcccttcagacaatctcaaaacatttcagatgtctgaaagatgctatcaacgatcagatcaatgttatccggaagaaacttggagaggaggagagttcatctggcaaagagggaaaattaacgcgcctccgttatattgaccagcaattaagacaacagcgcgctttccagcagtatggtttgttacagcaaaatgcttggaggccacagaggggactgcccgaaaactcagtttcaattcttcgtgcttggctttttgaacacttccttcacccgtatccaagattcagaaaagctgatgctagcgagacaaactggcttaacaagaagtcagatttcaaattggttcataaatgcccgtgtccgcctgtggaaaccgatgatcgaagacatgtataaagaagagattggggaggcggatctcgactcgaactcctcctccgacaacgtaccaaggagcaaggacaaaatagcaacatctgaagataaggaagatctgaaaagctctatgagccagacttatcaaccaagccaattaggtgaatccaaagccaacatcgggatgatgagccttggtggggcaccagccggcttccacaacgaaggcaaccaggatgacagcttcatgaacctaatgctgaaggaccaaaggccgggcgaagccgaaggcagcctcctccatgatgccgtcgcccatcattccgatgagaacgctcggttcatggcttaccatttgtcggggctcggaagatacgggaacagcaatgtgtcattgacacttggcttacagcatcctgacaacaggctttcggtacagaacactcatcagccaggtttcgccggtgctggagaagaaatttacaactccaccgcttctctcggtgtcgctgcagcttcctcttcggactacgaatccacgaaccaaatagatcaaaggcaacggttcgaaccatcgcctctaatgcatgattttgtggcctaagatgctcaaaataccaaaaatatatggaggcaagatttgcctggggggagcatttgtaatttgtagtgccagaataacatgcctcagaaagcatggaaattgttagctgtagttgcatttggtacagaagaggggggtatagcatgaaatgtaatataattaagtttagcaggtgggggtttatagggggtaaagaatcctgtaaaaatggaatacatcatacatgtaaaagattatgattttcagaaccattctgtaaaaaaaaacacacctgtaatgactacttatcatccaggtatatgttgttcagcctattgac

SEQ ID NO: 20219 - DNA, 2315 bp, Oryza sativa
  ref <308>: DATABASE ACCESSION NUMBER: AK070544
  ref <309>: DATABASE ENTRY DATE: 2001-12-06
ttggagatagaatagagagagacacacaaacacctacaacaccaacaacaacaagagaaagagagaaagaagagaaggaaaggagaggaagaagaggtggtggtggtggtggtggtggtgtgtggcctccttcccctccctcctctcgcgaggttgccatgcctcccccaagatcgatccaacccgatcatcaatcggggcggggaaggaggaggaggggatggaggcggacgccgggaagctgttcatcggcggcatctcgtgggacaccaacgaggaccgcctccgcgagtacttcgacaagtacggcgaggtggtggaggccgtcatcatgcgcgaccgcgccaccggccgcgcccggggattcggcttcatcgtcttcgctgaccctgccgtcgccgagcgggtcattatggagaagcacatgatcgatggccgcatggtggaggcgaagaaagctgttcccagggacgatcagcacgctcttagcaagagcggcgggagcgctcatggatcgccggggcccagccgcaccaagaagatattcgttggggggctagcgtccaccgtgacggaggcggacttcaggaagtactttgagcagttcgggacgatcaccgatgtcgtggtgatgtatgatcacaacacgcagcgtcccagaggttttgggttcattacgtacgattcggaggatgctgtggacaaggcattgttcaagaccttccatgaactgaacggtaagatggttgaggtcaagcgcgcggttcctaaggaactatcacctgggcctagcatgcgttctcctgtcggtggattcaactatgccgtgaacagagccaataacttcctcaatggatacacccagggttataatccgagcccagtcggtggctatggaatgaggatggatgcaaggtttgggcttctatcgggtggccgtagtagttatccttcttttggtggtggttatggagtcggtatgaattttgatccagggatgaaccctgctattgggggaagctcaagcttcaacaacagtctccagtatggaaggcagcttaatccatactacagtggaaattctggtagatacaatagcaatgttagctatggtggagtcaatgacagtactgggtcagtgttcaactcgctggctcgtaatttatggggtaattcaggtcttagttactcttccaactctgcaagctctaattccttcatgtcatctgccaatgggggccttggtggaattgggaacaacaatgtgaattggggaaaccctcctgtgcctgcacaaggtgctaatgctggcccaggctatggcagtgggaacttcggttatggatccagtgaaaccaactttggtctcggtaccaatgcttatggaaggaatgctggatctggtgttgttaatacattcaatcaatcaaccaatgggtatggaaggaactttggagattcatcaggaggaggtggcggtggtggcggtggctccatctatggagacacaacttggagatccggatcttctgagcttgatggaaccagcccatttggctatgggcttgggaatgcagcttcagatgttacagcaaagaactcagcaggttacatggggcattaacaaatagagcaatgtcgccgcctaggaatctttttcacatacaacatttgtcaaaataggttgaggagagaaccacaggtgcatcaggtgcaaattttgaacctcacatgatttacagaaatgggttagttaatagagctaaccaccagggatttggtcaatgagatcagatatatatcctcagagaaccatttaaacgtatttccattttatgtaaggtttgagattgtggtttcggatttctacagcgagtttaggttttggcaaccttgtgttttttcttggttgagatgtgaagtaagattgcgggatatatatatctgaagagtgttcagttgtacggcggcgctgcccccatataggcccccctttttgggtttttgttcttatagtagaaactgctctagcgttttgcaaattgtgtgctagctgttgttatcaggatgataatttttttccccttcttggtttttatcttactgaagtgtatgtaccagagatcttgctggtctgtgtttttcctagtggaacttttgagggatgccccttctgggtctcaaagaataataatgctacattatattctaattcattttgaggctttctaaggctatatattatttgtatgtaccctgctggaacatctgtacattctgatgctctttgcaatttgcctttgtgctgcttttgc

SEQ ID NO: 20220 - DNA, 945 bp, Oryza sativa
  ref <308>: DATABASE ACCESSION NUMBER: AK070545
  ref <309>: DATABASE ENTRY DATE: 2001-12-06
ggccccaccggcggccggcatggacgaggagacgcagaagaaggtggagtccacggttctggagatcctccggggctccgacatggagtccctcacggagttcaaggtccgcaccgccgccgccgaccgcctcggcatcgacctctccatccccgaccgcaagcgcttcgtccgccgcgtcgtcgaggggtacctcgaatccctctcccaggaggatgagcaggagcagcagcaggagcaggccggcggcgccggcgaggaggggaaggacgaacaggccgaggaggaagaggaagaggaggaggaggaggaggaggagcggggaggtggaacgaagagggagtacgatgacgagggagacctcatcctctgccgcctttcggccaggaggagggtgactcttcaggagttcaagggcaagacgcttctgtccatccgagagtactacttcaaggacggcaaggagctgcccgccaaagggataagtttgacagttgagcagtgggaagcatttcgtgattctgtgccagcaatagaggatgccattaaaaagcttggagaatcatcggactgaaagcatgtttcagaagccccttttgcctgtatcaaatcaagaaggcctttgttctggccctttacttagggccagtacaggctgtaagtccgctatggagggtctggaggtactagggttcctataaacttttgtaaaacttatcccttagtcaagctgcatgatgctgtgtagggtagacggttggagacttggagaagtaatttcttcatatgctcgtcttaatattggagttagtgatgtacactgacatgcatctggctactttagaaaaatcagacatgggttccagcaacaagcctcttttgtttggatcatgaggcactgtcatcggactaactcatctttatgaagaattagttctccgccgc

SEQ ID NO: 20221 - DNA, 2602 bp, Oryza sativa
  ref <308>: DATABASE ACCESSION NUMBER: AK070546
  ref <309>: DATABASE ENTRY DATE: 2001-12-06
gactccgccgccgccgctcgtccacagctcgccgccgcggcgcccctcccggcgacgactgatgctccgccccctagccgcctccaccccgccgtccccgagcagctcgccgacgctgaccagagcagaggcccgtacgacggtctccgaactgctcgcgaagtaggggaagccgccaccgcgttgtcgtcgcctaagcttcgccggtgctcgcagggttttggtttggtttggtttggtccgtgagggtttgatcaggaaagtgcttgggctcaagtctgaagctgaaccaacaccggcaatgggagacgaaagcaacacactccgtgtacttgtggcaaccgattgccatctcggctacatggaaaaggacgagattcgtaggtttgattcatttgaggcgtttgaagagatatgctcattagcagagcagaataaggttgattttgtgctacttggtggtgaccttttccatgagaacaaaccttcacgttcaaccttagttaagaccattgagattctacggcgttactgcttgaatgaccagccagtgaagttccaggttgtcagtgatcagacaatcaactttccaaacagattcggccaagtaaattatgaagatccaaacttcaatgttggattgcctgtgttcactatccatggaaaccatgatgatccagctggtgtggataatctctctgcaattgatattctctcagcctgcaatcttgtaaattattttgggaagatggaccttggtggctctggtgttggtgaaatagcagtctatcctgtactcgtaaaaaagggtacaacttttgttgcgctctatggccttggaaacattagagatgaacgattaaacaggatgtttcagacacctcatgctgtacaatggatgcgacctgaaactcaagatggaatgtcagtatctgactggttcaatattcttgttcttcatcagaataggataaaaacaaaccctaaaagcgcaatcaatgagcatttcttaccacgttttctggactttatagtatggggccatgagcatgaatgccttattgatccccaggaggtacctgggatgggttttcacatcactcaaccaggctcatcagttgcaacctccctgattgatggtgaagcaaaaccaaagcatgttctcttgttagaaatcaagggaaaccagtataggccaaccaaaatacctttgagatccgttaggccctttcactatgctgaggttgtgttaaaagatgaagtggatgttgatcccaatgatcaggcctctgttcttgaacatttggataaaattgtaagaaatcttattaagaagagtagtcagccaacagccagtagaccagagaccaaacttccactaattagaatcaaggtagattactctgggttttcaacaattaatccacaacgatttggtcagaagtatgtcgggaaggttgcaaacccccaggatattcttatcttctcaaaatcagcaaaaaagcgtcagactactggagtaggcaatattgatgactctgagaaacttcgtcccgaggaactaaaccaacaaactattgaagctttggttgccgaaaataacttgaaaatggagattcttccagttgatgacttggacattgcattgcatgattttgtgagcaaggatgacaagatggcgttttatgcctgtttgcagcggaatcttgaagaaaccagaactaaattgaattcagaggcagataaatttaaaatagaggaagaagatataatagtcaaagttggcgagtgcatgcaggaacgtgtgaaggaaaggtccctccgctccaaggaagattcacggttcacgtcaagctctcaaaacttggatactggaggtagatctgttacagctcaaagtaacctgaactctttcagtgatgatgaagacaccagggagatgcttctcggtgcaagaacaactaatgctggaaggaaagcatctggatttacaagaccctctaaagatgctaccgatgttgccaaaactggaacttccagaaggggcaggggaagagggacggcctcaatgaagcagaccactctgaatttcagccaatcaaggtcaagtgctgctatccgcagtgaggaagtgcaatcttcttcagatgaggaaaatgagactaatgaagcaaacgaagttgttgaatcttcagaaccggaggagagtccccaacaaactggacgggaaagggcagctcctagaggtggtagaggtaggggtagaggcgctactgcaaaaaggggtagaaaagcagatatttcatccatccagagcatgctgatgagcaaagatgatgatgacgatgatgaagatgacaggccgaagaaacctccacctcgggtcactaggaactacggagctgttaggaggagatgacctcttgttagtctaagtctgcctggcaaattaagtttccaatgaactactggaacgccaactcgcgtgatttgtacattccttagcctcatggatttacgtgcttgtagctgctaaatgctggatgtcagtttgtacattggcaacatgacattcatgcgggcacaagggattctcatcatc

SEQ ID NO: 20222 - DNA, 2392 bp, Oryza sativa
  ref <308>: DATABASE ACCESSION NUMBER: AK070547
  ref <309>: DATABASE ENTRY DATE: 2001-12-06
gaggcgcttatcactcccaatagtactctagatgatgtgcacatgccactcctaaagtcaattcctccagtaacccgcatggctatgggacgtggaacctgggtgaccgtcctatgtagaaagctaagggattggtggcattgggttgcagaaggtgatataccaattgttgcatcacatggaactgaaattgaagcatacaaggttctagaaccggcgactcgtttaattatcttgaaagcaatatgcgatatacgtgtcgagcaagaggatatccggaatttcattgacagttccctaaagcatggctatgacctttctacctttcgtaaagaacgaatagggggtgatgcctatggaatctcatactggtatgaagatgatccgattctcgggcatagattatatcgtgaaattagacgagtggaacagctgaagaaagagccaggaaaaagatctagggggaaaggagggtctataattcttccagttgtgtcctaccagtgggaaactgtcgcatccaactttgacgagtttgatgatgttgcagaaaaactcttttcaagtcggaacaggacagaggccaaccttggcaagaagttgaagattgaatatcttccagatattgaaaagatacataaaaagaaggagaggttgctcaaaaagcaacaaagagaagcccttctcattgatagcttcttggctccagatggatttaccactggtcgctctcttcgtgatagaaagccagtaacatacacttttgatgaatatgaccgctcaataagtgaggccataaaaataacgaagaaaggagaaaactctgctgagcctgctgctccagccaatagaaggatccttacgccaagaccggaggcatcgagcaatggcaaggtgaatggcctctcaccgactaccaatgaatatgatggaaattcttcaaagtcagatgactaccgagatagtgatggtgaagaagaaagtgagacacttgatcggagcaaccgccggaggaggagatctcagagatatacacgggactttgtcgaggctgtctcagatattgacccgaactttgacagtgacgatgaaatcatgggggaggcagtctatgatgaggaatatctgagaactcgaaaacagcagaagacatcaagtgcttctgaagaggatgaagagttccgattagaagaagatgatgatgaagaggaagaggaatattctttgagtaccagtgaggatttagaggagccacaacagcgcaagaaactgcaaactcgtggccggcgaggggccaagcttagatctgttgatgaaatccaaacaggtcttaggcgcagcaagcgttcttctcgtcaacgcattaattaccaacagtatgattattcggacacagacacagagggaggaaaggaaggaaaatccgatgcatcagatcctgatgctggttttgatgcagaaaatgatacggaactctcgacatcgagtcaagagcaagaggaagatgaggatgatggccctgaggaacaaaaggacaatagcgacgacaataaaatggatgaggatcatgtaatggtggaaaataaagaagagcaggaggagcagccgcagccacctccactgccaccacagcagcctgtggaaaaaatggaagctcctagtagagagattgaaactgtagggagaacatttctagatttaaatgagcttgcacctggaggtggctttgacgatgggccaagcctgactatgaaagatgaggatatggataacagttaggaaataagttttgtaatacaatcgagtttagtaggcgctgcttggagcaaggtgtaactgcgtgaagtcgtgggccattgccatagatgaatggtccactagtaagatgacacagcaatatctgaacagttttagatgattgctgttacatcgatttacagtgacaaaagaggcgaggttccaccgaggttgtggtgaaaagagcttcaaatgtaacagattgcttgtttgatacttgggggccatccaaagggagtttttcattctattgttgtacactacacgaagggcgcgcatcggtcgctgctgtattatgtccagactgattgatgctgtgttgctgccagatacaaacttgtagcctccatttgtttagctctaggcgcgatactgttgtcgggaaattcttgcaacattcatatggtggaaacttgtaatacacctaagtgctgctcttctcggcatttcttacggctatattccacttgtagaatgtagtttttgagtctaagtaaggcctgtagctcttgtatttatatctgtcaacctgattagattggtacatctgtgtgcagttgatgacctgatactactgagctagtaggatttctcc

SEQ ID NO: 20223 - DNA, 1345 bp, Oryza sativa
  ref <308>: DATABASE ACCESSION NUMBER: AK070548
  ref <309>: DATABASE ENTRY DATE: 2001-12-06
ggcgttcgcatccgccgccgcagccgcagccgccgccgccgacgccgacgaggagaggaggagagggaaggcgagagggaggtaggtaggtaggcagttagccatgtcgccggcggagccgacgagggaggagagcgtgtacaaggcgaagctggcggagcaggcggagcggtacgaggagatggtggagtacatggagcgcgtggcgcgcgcggcggggggcgcctccggcggggaggagctcacggtggaggagcggaacctgctgtccgtggcgtacaagaacgtcatcggcgcccgccgcgcgtcgtggcggatcatctcgtcgatcgagcagaaggaggagggccgcgggaacgacgcccacgccgccaccatccgctcctacaggggcaagatcgaggccgagctcgcccgcatctgcgacggcatcctggccctgctcgactcccacctcgtcccctccgccggcgccgccgagtccaaggtcttctacctcaagatgaagggcgactaccacaggtaccttgcggagtttaagtctggcgacgagaggaagcaggctgcggagagcaccatgaatgcatacaaggctgctcaggacattgctctcgcagatttggctccgacccaccccataaggcttgggcttgcactcaacttttcagtgttctactatgagatcttgaactcccctgaccgtgcctgcaacctcgcgaagcaggcgtttgatgaggccatatcagaactggacagccttggtgaagaatcctacaaggacagcactttgatcatgcagctcctgcgtgacaacttgactctgtggacttcagatgccaatgatgatggtggtgacgaaatcaaggaagccgcagctccaaaagagcctggggatcagtgagatgaattcggacgccagtctgatgcaccatctgttgttgttggggcaatggacattgatgtcttcggctttcagtagctatcttctagtacacgaactgtcgtcgcaccatcgcggaggagacgatgatgttcttaaattacttaagtagttctgggtcacgcttttgttcagttgataaatgatggctggatcctggttttcttgttccacgatgccagccacaggaaaaaccctactattctgcactgttagaatgctgttatattaaccatgtttgacaagacattttcagtatgtttgtatgaccgtcttggaagtgtttggttgaacctgtctcagggtctttggtccaagacattattcacctggcttgcttaactcgttttagagaacaaaaaaatattgtctgtatggtgacatgcttgagttcaccgtaatctc

SEQ ID NO: 20224 - DNA, 2406 bp, Oryza sativa
  ref <308>: DATABASE ACCESSION NUMBER: AK070549
  ref <309>: DATABASE ENTRY DATE: 2001-12-06
gagtctagggtttcttcgatccacttgacgccgcgtcgcaggcactcctcgtcttcctcggtcgaagaaaagcggcggcggcggcggcggcggcggaagctgccgccttccttcaccccaaggcccaacagatcgaggacgctgacattatgttgcagctacctttctcccccaaagagagttggagttcaccagtcaattcagccattgggcacgtgcggaaaattaggaggagggctggtcattttctctcaagaagctccaagaataaggctgctcacagtaaggggggacagacaaccaagtcattgatctcaggcgacttacattcgggctctattcaagatgtctgggctactctcagcgctgaagttgcatcaaaattgtctaaaagcgttgtttctctggctttgtctgatggaaacataccgatatatgcatgctcaggcacagctatcagttgccaggaggggtctggtacaatttttctgacttcggctagtttggttagagctttctatgatactgaagaaatttatgataacttaaagattgaagtgcgccatgaaggcaatgaagtgtacaagggttatttggcaaaatatgatttagacaagaactttgctgttgtctacaccatggagtctcttgatgttcatgttgtactttccgaacatttgaaggataggtatgccaaaaagaagctagtagctgtatcgcgtaacaagtatggcggattaattaccaaaagtgtgatggtgggtagtcatcataattcaaacagatctgaagtttgccatgacatttcggtgatggctgaggactgggaaggtggacctctctttgactttgatgggaaatttgttggcatgaataagtttttggctatggatacaacctttatcctgtcatggatgtcaattctcattatctttaagcattatttgccaaccctgcaaaacaggattcttaaacggttacaaaatttgaaaagagtcagggatggagagggaccgggtgagctatctgactgtcatccagaagttcatagaggtggtctcgataaggaacacgttgagtatctaaactccttgggttatcccaagccaccagtaaacgtgttagatgatggcttgatattggcttattcttttgaggagaattttggctttgtatatggtgaagtcattaaaaagtttccttgtgacatacatcaaagtgttgttgcacttgcttcattcaaaggagaaaggagatttttcgcatgcacgggtttttttatagaatggaagggatgtacaattattctgacatcagcgagcttggttgcagagtctggtgacagaaacaagattgatgaaaacttgaggattgaagtgttgcttccaaacgaacaacgcagacaaggaacattacagcattatagtttacactacaatgttgctctagtcagtgtcaacgacatggatttccatgctcgtccagcaaatatgaagcttgacaatgagtgtccacctcaagtagcagctctagggcgttgcttcgaatcaggcaaaataatggctgtatgtggggatttggttgactggactggcacacttgattgcaatttccttatacgttcctcatgcaaaactactaaggctggaatcggaggacctcttattggtttggatgggaaagttattggcatgaacttttatgataaaaaaataggaaccccttacatgccatgggatgtaattcttaaaattctggcatgttttgagaatgaaagtagtgctgctgaagttggcaatggtagtgatccatctgatgcgcctggctggaaaatccctggagatggcagtgtcaagctaaacaggtggcctgtgcccttgccatattggcgtcctcatgacgatgtggaagagcaagaacccccagagggctgtgaataccagtgcacatacagaaatggtgaaagatggtgctaccggtagaatatgttcgttctactcctctctctctctctctctctctctctctctagtagccctgtaatgttactacatgtcccttgccgtgttttgttttggtgtgtatcgcactgggagttgaagaacattcagctgtggtgatgctgagatgttaaatacaatgttaagtaaaagtagcgtgtctatcttggatatatcctatttgttttttaaaaaaatcccaaagtatttggcaggacgggaagtgccaaagcttccaacttgaaacgtattgaatttcgctttgtggatgctgcacgagtaaaaccgatattgtgcattatgtgtttgtgtggaaatataaggggtgggtggcaggggatgctcatgagatggtcgtctagcaatgtgtacttgaaattgctacgggttttattaaaactcagac

SEQ ID NO: 20225 - DNA, 3073 bp, Oryza sativa
  ref <308>: DATABASE ACCESSION NUMBER: AK070550
  ref <309>: DATABASE ENTRY DATE: 2001-12-06
ggcttctcctcccactctccccctctctctcctctctcctctctcctccccccgagatccgctccggccacccgccggcgaggccgccccccgccccgcccgccttgcgatcttgggacagtgcggcgcgtcccggaacgccggttcttggccggtcgaggtggtggtggtggtgataaacggtgcggtgtctgaggagtgggcggttgctgccgtgcccggaggagctaggaggcggcggcgggagagcactgttcttggaggctgcttttgaggtggggtgggggggaggcgttcgttcgccgccggcgccggtggcgtgcggtcgtgggcgggaggtggtggtggtggtgctgctgcattgggtgcgtcgtgggtggattcggatggttgcttggtaggatttcccttttcatggtcgatggggtggaaggcggccatggtggggggtaagttggccggcgtcggcggcgagaagctcaggtgcgccgcggcgcccgccgcggcggcgcggtcgcggatgaagctgtggatggtgcgcgccaccaccacggtgctcctctggacctgcgtcgtgcagctcaccgccgtcggcgacacctggggcccccgcgtgctcaagggctggccctcctgcatcacctcgcccgacgacgacgccgcctccgccacgctcgccgccgcccgcccggagcccgtcgtcgacaaggccgtgctaccgcccaaaagaatttataggaacaatggttatctgatggtctcatgtaatggtggacttaatcaaatgcgagctgcaatatgcgacatggttgtaattgcgagatatttgaatgtcactttggttgtgccagagttggataagacatcattttggaatgatccaagtgagttccaagatatattcgatgttgaacactttataacctctttaagagatgaagttcgcatattgagagaactgcctccaagggtaaaacgaagagttgaacatgggatgtaccactcaatgccaccaataagttggtctgatatctcctattaccataaccagattctccctttgatacggaagtacaaggttctccatttgaacagaactgatgctaggctagcaaacaatggtttacctatggagattcagaaactgcgttgccgagtaaactatgcctccttgagattcacttcgcaaattgaggagttgggaaagagagtaattaggatactccgccaaaatggccctttcttggttcttcacttacgttatgaaatggatatgctggctttctctggctgtacacaaggttgcagtaatgaagaagcagacgacctcacaagaatgaggtacgcttatccatggtggaaggagaaaattataaattcagaattgaaaagaaaggatggtctttgcccattgacgccagaggagactgcccttgtcctcagggcattggacatcgatagaagcatgcaaatatatattgcagctggagaaatatatggtggaaagcgcagaatgtctgctctcacttcagcgtatcctaatgtggtgaggaaagagacacttttggaaccttctgatctaatgttcttccagaaccactcatcacaaatggcagcactagattacttggtttctttggaaagtgacatctttgttcctacatatgatggcaatatggctaaagttgtcgagggtcatcggagatacatggggttcaagaagacaatcttgttagaccgaaaacttattgttgagctagtagatcaatacaacaacagttctttgcgatgggatgagttctctttaatgctcaaggctgcccatgcaaaccggatgggatcagcttcaaagaggacggtgattcttgacagacctaaggaagaggactatttttatgccaatccccaagaatgcctgcaagattctaatctcttacatacatcatgatatccactatgttaatatttcatccacgctatactgttccattctttcgtaaatgcaactgtgaatcaagagttggggtcctcgctattttgaagtgaaaaggcggctcggcctcaagcttgagccatagatgaattcaaactcaaggacaagggaggtaaggggggtgttgtttgtagttggtaaatacacataatagaaatggaggcagatttgtttattccacaaaataaagagtaacactctttgtatagatggttgatagaatctaccatgaaggccaaggtaatttaaagagagatgctggatccccatctcggatctcgggtggtgtaacatagcaattgttcttggtagccccccctccctccccatcggcaaaaattttgtccaccaaagttgttggaaaaagaattatatatacactgtttattgaatcgatacagcctttatgaagatatatggtaacttgtgcagaatgtttctaccacttgtaatttgtaatgctgctcttgcattgatttcctacatggaggttgctttgttaacctgtgaattggtgatctatgttctgatgcaggataaataaataggatcggtgcaagctaagagcacccggtgttgtttgccttctttaatccatgaactccctccatttcacaatgcaagtcattctagcatttcccatattcatattaatgttaatgaatctagacatatatctatctagatttattaacatcaatatgcatatggaaaatattagaatgacttacattgtgaaacgggggaagtatcaattaggagagttctaacggtttggcggtgattagccgttatgagaaacgaacaaaagctgcagatttgcagtttttttcttcttttttgaacaaattgcgggttagtactttatggttgaagttgatattagtatgatgtgctcatcagtcatcagttctgacttgtgccccagatttctatctttttgcttgtgtcctttgcgtttcttcttttctttttcttttaatcactggctcagtagtcagcaggtattagttttggttgttgtcacaactattatgtgccactcttttaaagaaattcggcatacttcattttctcggc

SEQ ID NO: 20226 - DNA, 3032 bp, Oryza sativa
  ref <308>: DATABASE ACCESSION NUMBER: AK070551
  ref <309>: DATABASE ENTRY DATE: 2001-12-06
gcgcggcgacccttgacttcctcccccttctctcctcctcccacaaaacgtgaccgaatccggctgatccgagcccgccgacctccccggcttccccgatccggcgacgatggatggcggcggcggaggcgacgccttcgggtccgcgaccgcgccgctggcctggcacgacttcctggagcgcatgcgccagccctccgccgccgacttcgtcaagtccatcaagggctttatcgtaacgttctcgaacagagctcctgaccctgaacatgatagtgcggctgttcaagaattcctggaaaatatggaaggtgctttcagggctcacaccccctgggctggaagttctgaagaagaactagaaagtgccgggccttgagaaatacgttatgacaaagctgttcaatcgggtatttgcttctgtcccggaagatgtgaagagtgatgaagaactttttgagaagatgtctttgttacagcagtttatacggcctgaaaacttggatatcaaaccagaatatcaaagtgaaacatcatggctgcttgcacagaaggagctgcagaagataaacatgtataaggctccaagggataagcttgcttgcatcctgaactgctgtaaagtcatcaacaacctacttctaaatgcgtctattgtatcaaatgaaaatcccccgggagctgatgaattccttccagtcctcatctatgttaccataaaggtatgattcactacttgttaaagtactggttgatgatacaaatgaaccatcaaatattgacaatattatattaagttgttggtgctgtattggagaaagaaaatttgccccctttgatatggcacagattaggtgtcgacttgatggtgactatttgtgtattacctactcaactttgatattttctagaaaaaatataagcctattattggtgcagtggtacgtgatttgttgggcacattgcctcttaatagagttgtcagtgcgctgtgcaacctcatttactgttgcttcgtattacttttagttccaacttctacctatctattatgatgcaggttccatgtctaatctaatagtgagttttgtactgaaatagtttgccagatttgagagcaaccttgtcatgcactcatgcccatcagtacatgtgcttagagcaaccatgaatctgtgaaccatcagttgggcatccctcctctagctaggcactacatcagttttgattacaaatgatggttaaactttcattacaaacctaatagttggcatttgagtggttgtggacttgtttttgaaaactgcagcaaatgaccataaagggcttaagatcagatcatgtacggttatcactttacttttctcttcattaccggaaagagcttgtcaactactgaatggtaagagttaatgatatatgtgctcttctagtttggcctctcaaggtattacgtgcttctggaattactgcagttagcctaaactacccttgcaccgcaattcagcattagttgtagttttgttctatcatctgaactacaatgttatgatccttttgcctgaaaatcatctgtaaagtgtttttatttgtcatttaaattaaggtagccaaaagaatttaagcagtagctgttcttaatgcaggcaaatcctccacagttacactcaaatctattatatatacagcgatacagacgtcaatcacggttggtgtcagaagctcagtatttctttacaaacatcttatccgctgagtctttcatctggaacattgatggggaatcattatcaatggatgaacgagatttccaaaagaagatggacttggcaagggaacgcatgttgggattatcagctagctcagagaatcaggacaaccaaaacaatcttgatgtacgggagcaaaaatcacaaacactgaaagctagcagggattctgatgtcaatctctctttgaaagataatttccaaggtcctggactggaaatgagaagggacagtgatgcaagtagtaacccagttgagcgtgtgcaatcgatttctgatttggagaagaaaggagcagccgagcttctcaaggatgatgacttgaacaaaaaaattcaagagtacccattcctttttgcccgctctggtgatctgactgttgctgatgtagaaaaccttttaaactcctacaagcagctagtactaaagtatgtagcgctttcgcaagggatgggtatcaaccttgaaaaccctcctgttcagagcatgcaaactgtttctgatcttgtggaatctgaggagcctaaaaatgtgaagaatgcagtaaatttcagcgaaggaagcagcaaaaccagtgatgacataaaaaatgatactctttattcagaagtagacaacacgggtacccaacaaactgcggttgacccaagttatcagaaggcacagcaggatgaagcatcagatcaacctgaacatgcatgagttgttggtcaagtatggttggccgtcgaaatacagggaaaacgttgtcaacggcgggtcattctcttatatatcaaggggtgacaactggttacagagaagtgggtgcattgctgtgctcctgaagccacaaaatgtaaatgctggaaactagaatatagagattcaagtccctggaaactagaatatagagattctcttatatcagcgtcgaggaagatcaagattcattctgctgaagcaaagctccttgtcccgacgttcgttcattgatcctttggttatggactcttcaagtttgattttgcggttaataccattttggtaaaccattttacttttgtagttcaaattaaaatatccatatgtgaaattagatccaagagaaaatggcatgaaacataatttgatcgtcttctagttgttgtctttagctgctagtactagtgcataccgatgttcgtcttctacagattagttatcaccggtgttttgagcacctcaacttcatttgtttggtttaaatggacataatttcagggaactattccttccctgtcg

SEQ ID NO: 20227 - DNA, 3414 bp, Oryza sativa
  ref <308>: DATABASE ACCESSION NUMBER: AK070552
  ref <309>: DATABASE ENTRY DATE: 2001-12-06
gtgccggagcgccgccggcggccaccagctccacgcgctgctcgccaagctcggcctgctccaccgctctgaatttctctccgctctcctctctcgcctcccgccttcgccgtcggcgctctccctcctactcgaggcacccccggccgtcctctcgccgtcactcgtctgcccggtaatcgtcgccttctcttcctcccaggccccgtcctccgcgctcctcctcttcaatcatgcctcctcgtgctccctccccaccccgcttcccaccttccctgcgctactcaaatcctgcgcccgcgcattcaaccacagctctcgcgccagtgccgcgtcggtcttcgtctccaaggggatggagctgcattgccgtgtcttgaagcttggctgcgggaaggatcgctatgtgcggaatgcgctcgtctccatgtatggcaagttcggtcgcctcggggatgcacggaaggcgttcgatgaaatgcctgacaagaatgccgtctcctggaatgcgttggtcggggctcatcgtgccgctgcagattggatgggtgcagaccgcgtgtctcaggccatgccagtgaggaacttgtcatggtggaatgctgagatcgcgcgaaatgtgaggatcgggtatatggatgaggctgcaaggattttcagcgaaatgccagagagggatgctgtatcatggaactctttgatcagtggctacacaaagctcggcaaatatacccaagcattggggatttttcaagaaatgcaggagaatggcattcaacctactgagcttacacttgtactagtccttggggcttgtgcaaagattggtaagctggacctggggacaaacatccacagaaaccttcagaacaagggcattgtagctgatggcttggttggcaatgcactcattgatatgtatgcaaaatgtgggatgttggatcttgccaagaaggtctttgacagaatgtctatgagggatattacatgctggaatgcgatgatcgttggtttctctgtgcatggctgctcacgtgaggctctagagctctttgattcgatgaagattgagccaaatcctgtcacatttttgggtgtcttgaccgcctgcagccatggtggcctagtgaatgaggggaggaaatattttaatagcatgattgaggactacagaattgttcctgatgttaagcattatggctgcatgattgatatgctttgccgctatggaaaaattgaagaagcttatctgatgattaaagaaaacccttcaacagcaagctctgttctgtggaagatgttgttggcagcttgccgagtgcatgggcacatcgatcttgcttacatgttttttcatgaactacgtgagttgattctaactgataatggaggacttgtcacaatatcaaatgtttatgcagaagcgaagagatgggatgatgtcgagcatctgagaatgaaggtcagatgcaacagtgctttgaagcatgctgcacatagtcaaatggacgtaatgtaagcaatacatctgcctgaaactataggaaataatgatcattcttaattctagaagccctagctcttgagttttgctgggctgtagctccaataattttaatgttggtagcttcatttttatcttgatgttggtgtcaagtcattttaagtacagaagggttaagaagggcaaattataactattgttatggcatgcttgtttatcttaagatttccagatggacatatgtgtgatggcacaagaaaattaaccgataccgttgcttgaatggttttgttgatcaacaacaaatgtttctgaaactgaatcatgacttccgggctaattgaatgttttagacatgaataactggcagcaaaagaattgctcacatcattgccccttcactcatatcactcagtaccaaaggtttgggcagaagcagagatggagtgaagttgagtatctgagaacagagatgatcagatacaatgcctcaaagcatgctgcaaacagccaagttaattttaggtagccaataaacccgccgcaagctgtacagtgtaatattcagcttcatttccagaagtccactttgctaccacttctagactgtagttccaacgggacaatactgctgctaattctcaaagtgaagactgctgaactgtgaatttcgtaagaactttgagtcgtattaaactattaatgtattgatgcacagcagatgggagataaccttcttcttgtgctgaaatgtgcctgttccatcaaatgccttggatttttccactgagagtcctcgtttttgagtatgtcacaatcattgtggttaggactttggagaagtgcattgtttcccaacatgcatcagacaaaatgaaaatattgggtttctatccatttccattgcaatatgtgaaattttggatgtctactccacttagtgtctgttgtcagtaaactgcactggctaaattggctactgaaatgcagaaaaggagaatgaagttgaactctgtgctctgcctagaagtgatttcaatgcgaacgcttcgctagatcagtagcccatgaaaggtggaattttcagcaagtaccaaagcaagtagtatttcggtggaagttaaataccatggtgacgagctcgagaagctgatccagatgggcaaacacaaataggattgcagaatgcattctttcttggcttcatttttaagattgccagatggtaactgtaatatttgctatacaatgctggtgaacgacattccagtaaaagttttaagtttcggtgtatatggagcaatggaaatttatatgggcacaaatgaaacagttctggagactcagtaagagctgaatattaggggcaagaaggcatgtagttggttggtgacattaggagcatggagttgatgccattcatgtgcatgcgaggttttatctgacctatcgagatgaggatcaaatgaacagagtagtatacgttgctaggcgacgtctctggatgaattaatggatcgatcaggttgctgcaggctgctatagctctgcaccaggaccaagcactgcacattactgtatctgtatggtcacactgatgaaaggagaaatttgcgaagtagctgctgatccatctgcccaatcgataggctacaaataaatgaagctggtagctttcattcaataaatatggattccttcaacagtggagtacccattgctctgtttgcccacagatggaattgaagctgcgtgtcaaatgtcaatctttctaaagacctgtcttttaatatgtatgcttgtgaattgtattttgtatatacgccatacataaaaatgatactgccattaagtcattactgttgcaatattctattcacaatgtaaattatctactgttgttatggtgt

SEQ ID NO: 20228 - DNA, 1100 bp, Oryza sativa
  ref <308>: DATABASE ACCESSION NUMBER: AK070553
  ref <309>: DATABASE ENTRY DATE: 2001-12-06
gcaaaaagaaagcaacaaatcaccaaaaaaaaagaaagagaaatgtcgtcgccgccggtgctcttgctgtgccggctgttcccgggcaccttcaccgacgtcgcccaccgattccgcctcctcgacttctacgcctccgcgcttcccatccacgccttcctcgccgccgtggccgcccacgccgacccacctcgcgtcgtcctcgtcttcggcggcgggcccatccccgtcggcgccgagctgctcgacgccgtcccctccctccgctgcatcatcaccgtcagcgccgggaccaaccacatcgacctccgcgagtgcgcgcgccgcggcgtgcaggtcgccaacgccggcgggatctactccaccgacgtcgccgactacgctgtcggcctcctgctcgacgttctccgccacgtctccgccggagaccgcttcgtccggcgcggcctctgtccggagcagcgcggcggcgatttcctccccctcggatccaagatcggcgggaggcgcgtcggcatcatcggcctcggcagcatagggtcggcgatcgcgaggagactggaggcgttcggctgcgtcgtctcctaccacaaccgccggcgaagggaggacgtggcctacgcctacttcccgaccgccaccgacctcgccgcgagctccgacgtgctcgtcgtggcgtgcgcgctgacggcggagacgcggcgcatcgtggaccggggcgtgctggacgcgctgggggagcgcggcgtggtcgtgaacgtggcgcgcggcgccaacgtcgacgaggcggagctggtgcgcgcgctggcggagggcagggtcgccggcgcggggttggaagtgttcgacgacgagcccaacgtgccgccggagctgtgggccatggacaacgtggtgctcaccccgcaccaggccatcttcaccccggaatccatggccgacctgagccgcgtcgtcctcgccaacctcgacgcgttcttcgccggcgagccgctgcttacgcgagtggaagcctcggagtgacgcacacttgccctgttagtccaacaattgacttattcttattatcatcattattgctataaaatgttttagggcct

SEQ ID NO: 20229 - DNA, 1474 bp, Oryza sativa
  ref <308>: DATABASE ACCESSION NUMBER: AK070554
  ref <309>: DATABASE ENTRY DATE: 2001-12-06
gatcaccatcgatcagtcacatccttcgccttcccagcatggcacgcatgcctcctcctctcgctgtcgcttgcacggctctcctgctcctcctcttcgtctcggtctcgccgtgccgcgcggcgtcaggtggcgacccgtccgccgtgctgctgccggtgagcaaggacgacgcgacgcagcagtacgtgacgatgttccggcagcggacgccgcaggcgcccttgaaggccgtgctggacctcgccggcgccacgctgtgggtggactgaggccgggtacgtgtcgtcgtcgtacgcgcgcgtgccgtgcgggtccaagcagtgccgcctcgccaagaccaacgcgtgcgccaccagctgcgacggcgcgccgtcgccggcctgcctcaacgacacctgcggcgggttcccggagaacacggtcacgcacgtcagcaccagcggcaacgtcatcaccgacgtgctgtccctgcccaccaccttccgcccggccccggggccgctcgccaccgcgccggcgttcctgttcacatgcggcgccacgttcctgaccgaaggcctcgccgccggcgccaccggcatggtgtctctcagccgcgcccgcttcgctttccccacgcagctcgccgccaccttccgcttctcccgcaagttcgcgctctgcctcccgccggccgccgcggccggcgtcgtcatcttcggcgacgcgccctacgtgttccagcctggtgttgacctctccaagtcgctcatctacacaccactcctcgtcaacccggtgagcacggggggcgtgtccaccaagggagacaaatcaaccgaatacttcgtcggcttgacgcgcatcaaggtgaacggccgcgccgtgccgctgaacacgacgctgcttgccatcaacaagaagggagtgggtggcaccaagctgagcacggtgaccccctacaccgtgctggagacctccatccacaaggcggtcaccgacgcgttcgcggccgagacgtccatgatcccgcgagtgccggccgtggctccgttcaagctgtgctacgacgggagcaaggtggcgggcacacgcgtggggccggccgtgccgacggtcgagctggtgttccagagcgaggccacgtcgtgggtggtgttcggggcgaactcgatggtggccaccaagggcggcgctctctgcctcggtgtggtggacggcggcgtggcgtcggaaacgtcggtggtgatcggcggtcacatgatggaggacaacctgctggagtttgacctggtgggatcgcggctggggttcagctcctccctcctgttccggcaaacgacctgcaacaactttcgcctcggctagatgtgcaacgcatggcagtcgccactgcagcttagcttactatctcaaaaaaaaaaaagatgctttgcatttctttgtgcaatcgtgtgaagttgttggaataaattgttcatccattacaact

SEQ ID NO: 20230 - DNA, 2077 bp, Oryza sativa
  ref <308>: DATABASE ACCESSION NUMBER: AK070555
  ref <309>: DATABASE ENTRY DATE: 2001-12-06
agtacacactcctatctatccaacaagctaattaagcgaggagcttggtagacggcggcaatggcgggcgcggcggcggcggccttcgcggcgcaggtgctgcgggggcggtggttcatggcgtacggctccttcctcatcatgtcggcggcgggggcgacgtacatcttcgccatctactccaaggacatcaagtccaccctcggttacacccaggagcagctcaacaccgtcggcttcttcaaggacgtcggcgccaacatcggcatccacgccggcctcatcgccgaggtcacgccgccatggttcgtcctcgccatcggcgccgccatgaatctcgggggttacctcatgctctacctctccgtcaccggccgcgtcggcgccaggaccccgctctggctcgtctgcctctacatcgccgtcggcgccaactcgcaggccttcgccaacaccggcgcgctcgtcacctgcgtcaagaacttccccgagagccgcggcgtcatgctcggcttgctcaaggggttcgtcggcctcagcggcgccatcttcacgcagctctacctctccttctacggcggcggcggcagcaacaccaagccgctcatcctgctcgtcggctggctcccggccgccatctccgtcgccttcctcggcaccatccggatcatacgcgcaccgcgctcgccgaccgcggcgcgccgcgagtaccgcgcgttctgcggcttcctgtacgtgtcgctcgctctcgccgcctacctcctggtggtcatcgtcctccagaagcggttcaagttcacccgcgccgagtacgccgtcagcgccgccgtcgtgttcgcggctctcctcgcccccttcgccatcgtcctccgcgaggaggccgccctgttcaggaagacgccccccaaggaggaagccgacgacgtcccggcgctgtccgcggccacgaaaccatcgcccgcggccgccgagacgccaccagcgacggcgatggagagggtggtccgcgcgctgaggccgccgccgcgcggcgaggactacacgatcctgcaagccctggtgagcgtggacatggtgctgctgttcacggcgacggtgttcggcgtgggcgggacgctgacggcgatcgacaacatggggcagatcggggagtcgctggggtacccgcagcgcagcatcgccaccctggtgtcgctgatcagcatctggaactacctggggcgcgtgtcggcggggttcgcgtcggacgcgctgctgtcgcggtacggcatctcgcggccggtggtggtcaccggcgtgctgctgctcacggtggcggggcacctgctggtggcgttcggcgtgccggggtcgctatacgcggcgtcggtgctgatcgggttctgcttcggggcggcgtacccgatgatcctggccatcatctcggaggtgttcgggctcaagtactactcgacgctgtacaacgtggggaacgtggcgtgccccgtggggtcctacatcctcaacgtccgcgtcgccggcaggatgtacgaccgggaggcgaggcggcagggggcggtggccgtggcggcggggaagaaggagctgacgtgcattggggtgaagtgctacaaggattccttcttgatcgtcgccggggtgacggtggccgcggcggtggtgatggcggcgctcgcgtggcggaccaggaagttctacgccggggacatctacgcgcgcttcagggaggaggcggctgccggtggcggtggcgctggcaatggcaccggcgccggagaagatgagaaggtggaatccaaggaggagaaggcggtgatgacgccgacgagcacctgagctgcaattctgctgctcgatcagaagatctgagagatagaggagcaaaaaggactccttttttctttataactgttcttttagtttttaagaagtgctatactacaacattgcaacacccacatttagagggataattgacccacattttcaacttatctgggctagcccgattcctccaaaacaaaaacactttttatggctggctataaggggaaagattcaatcggctgttcaaccg

SEQ ID NO: 20231 - DNA, 2409 bp, Oryza sativa
  ref <308>: DATABASE ACCESSION NUMBER: AK070556
  ref <309>: DATABASE ENTRY DATE: 2001-12-06
gagtgcatctcaagaagtactcgagcaaagaaggagagagcttggtgagctgcagagatgaccccctccgtgatggcgtcgtcggccaccaccgtcgctcccttccaggggctcaagtccaccgccggcatgcccgtcgcccgccgctccggcaactccagcttcggcaacgtcagcaatggcggcaggatcaggtgcatgcaggtgtggccgattgagggcatcaagaagttcgagaccctctcctacctgccaccgctcaccgtggaggacctcctgaagcagatcgagtacctgctccgttccaagtgggtgccctgcctcgagttcagcaaggtcggattcgtctaccgtgagaaccacagatcccccggatactacgatggcaggtactggaccatgtggaagctgcccatgttcgggtgcactgacgccacccaggtgctcaaggagctcgaggaggccaagaaggcgtaccctgatgcattcgtccgtatcatcggcttcgacaacgtcaggcaggtgcagctcatcagcttcatcgcctacaagcccccgggctgcgaggagtctggtggcaactaagccgtcatcgtcatatatagccttgtttaattgttcatctctgattcgatgatgtctcccaccttgtttcgtgtggctctttctctcctcccactccgctagctccggccaccaactttgacccgtcctcctcctccgcatcccccatcccctcctccccggcggcggcggcggcgcggaggcggcggcacgggagcggctagtggtttcgtcggcggaggcggaggcggggccaagatgttcgggcgcgcgccgaagaagagcgacaacaccaagtactacgagatcctgggggtccccaagaccgcctcccaggacgacctcaagaaggcgtaccgcaaggccgccatcaagaaccaccccgacaagggcggcgaccccgagaagttcaaggagcttgcacaagcttatgaggtattgagtgacccggagaaacgtgaaatctatgaccaatatggtgaagatgccctcaaggaaggaatgggtggaggcggatcccatgttgatccatttgacatcttttcatcattctttggaccttcttttggtggtggtggcagcagcaggggcagaaggcaaaggaggggagaggatgtgatccatccgcttaaggtttctctagaagatctttacaatggtacttcaaagaagctctctctttcccgcaatgtcctctgcgccaagtgcaagggcaagggttccaagtctggtgcttccatgaggtgcccaggttgccaggggtctggcatgaaaatcaccatccgccagctggggccttccatgatacagcagatgcagcagccttgcaatgagtgtaaggggactggagagagcattaatgagaaggatcgctgcccaggctgcaagggcgagaaggttattcaggagaagaaggttctggaggttcacgttgagaaggggatgcaacacaatcagaagatcactttccctggtgaagctgatgaggcgcctgataccgttacgggagacattgtattcgtcctccagcagaaggaccactccaagttcaaaaggaagggcgatgatctcttttatgagcacaccttatctctgactgaagcactttgtggtttccaatttgtcctgacacatctggacaacagacagctgctcattaagtcaaaccccggtgaagttgttaagcctgaccaattcaaggcaataaacgatgagggaatgccaatgtaccagaggcctttcatgaaggggaagctctacattcatttcacggtggagttccctgattccctggcgcctgaacaatgcaaggctctcgaggctgtgcttccaccgaagcctgcatcccagctgacagaaatggagatagatgaatgcgaggagaccacgatgcacgatgtcaacaacattgaggaagagatgcgcaggaaagcccaagctgctcaggaggcgtatgatgaggacgatgagatgcctggaggtgcccagagagttcagtgcgcgcaacagtaagcagagtatgtcatctaggaaactcgtcattggttcacaaatcaacgtcgtcgcaaaggtttgccgtaaatttttggacccaaagatgattgtgctctgtttcccgttgcggcgaacatgaagatagtgaagctgattttacaccccttaagccgggactgtatcccttttgtttgcgacttaaaaaatgctactcgtatctagtaatagctggctacgttttactatgctgtgagactcgtagagttttacctcctaaaaagaaactcggtatgttgtgaatgctacaactgacactgcaccgtgtgcagtggctcaacattttttgtggtc

SEQ ID NO: 20232 - DNA, 1943 bp, Oryza sativa
  ref <308>: DATABASE ACCESSION NUMBER: AK070557
  ref <309>: DATABASE ENTRY DATE: 2001-12-06
ggcttgcttcttccatattgatcgaggagacatcacatggatcatcatccaattccagcagatgagaatgagatgactagtactagtccccagatgcagatgaggagaaacaagctctcctcccacttccaaggagatatcgatgatgatggtggtgttggtgttgtggacatccgggggtcgccgatggggtcggcggagctggcgcgcaccggcgggtgggtggcggcggtcttcatcttcgggaacgagatggcggagaggatggcctactacggcctgtccctcaacatggtcatcttcatgttcaacgtcatgcaccgccccttcgccgcctccgccaacgccgtgaacaacttcctcggcatctcccaggcctcctccctcctcggcggcttcctcgccgacgcctacctcgggcgctactggaccatcgccgccttcaccaccctctatctcctgggcctcgtggccctcaccctctgcgccaccatgcccgccctccaggccccgggccaggacgagtgcgacggcttcgccaagctgctgggcaagtgccagcagccgcacccctggcagatggcctacctctacgccgcgctctacaccaccgccttgggcgccgccgggatccgcccctgcgtctcctccttcggggcggaccagttcgaggagcggagcccggtgctggaccgcttcttcaacctcttctacctggccgtcaccgtgggcgccatcgcggccttcacgctgctggtgtacgtgcagaggaaccacgggtgggcggcggcgttcggggcgctggcgctggccatggccgcatccaacgcgctcttcttcatggggacgccgctgtaccgccaccgcgtgccggggggaagcccgctgacgagggtggcgcaggtgctagtggcggcctacaggaagcgtcacatcaagcacaccacggaactgttgtacgaggtgggcggggccaagtcggcggtgcgcgggagcggcaagatcgagcacacggaggagctgaggtggctggacaaggcggcggtgagggtggagggccaagaagaaatcaataacccatggcgtctttgcactgtgacccaggtggaggaggtgaagatcctggtgcggctggcgccggtgtcggcgtgcacggtgatgctgagcgtggtgctgacggagttcctgacgctgtcggtgcagcaggcgtacaccctcaacaccaggggcctccccgtggcgtgcatgcccgtcttcccctgcctcgccatcctcctcctcctcgccctctactacagggccttcgccccgctcgcccgccgcctcaccggccacccgcacggcgcctcccagctgcagcgcctcggcctcggcctcctcctctccaccctctccgtcgcttgggctggcctcttcgagcgctaccgccgcgcctacgccatccgccatggcttcctcccgctcttcctcactcccatgccgggcctcagcgcctactggctcctcatccagtactgcctcatcggtctcgccgaggtcttctgcctcgtcgccctcctcgagttcctctaccaggaggcccccgacgccatgcgcagcctcgcctccgcctacgccgccctcgccggcggccttggctgcttcttagccaccgccatcaacaccgccgtcgactccatcaccggcgacatcgacgccggacgcccctcctggctcgcgcagaacatcaacgtcggcaagttcgactacttctactggctcctcgccgtgctcagcaccatcaacctcatcgtcttcatctacttcgccaaagcctacaagtacaggatcaagccccccaccaccccacataactagttcatagtatttctacaccactacagtctagtactagtagtatctgctaagtgacattatattgatcaatcaaacaaattaagggc

SEQ ID NO: 20233 - DNA, 1705 bp, Oryza sativa
  ref <308>: DATABASE ACCESSION NUMBER: AK099145
  ref <309>: DATABASE ENTRY DATE: 2002-08-28
gattgccacacacacaccgaccggtgctgtcgtgcttcctctcctttcagacaaagcaaaaatttaatttccttccagtggagaacctcgaagtcaaagaacaacgtgttcaccatgcccagcgatggcagcttccgcatcgtcctcttcccgttcccggcgcagggccacttctccgccttcctctccctcgccgcccacctccacgacgcccagcccacggccgacatcaccatcgtctccaccccgcgcaacgtggaagacctccgccgccggtcgagctcccagacgcggtacctccggttccacgccctgccgttcgcgccagccgagcacggcctgcccggagacatcgagtcgaccgacgccgtgccgctcctccacttcatcacgctgttcgaggccaccgagtcgcgctcgctacaggacagcttcgacagcttcgtccgtgacttgatcaccgacgccggagcggacggtgccagggtctgcgtcatcgccgaccccttcctcgcgtggacgacagacgtcgcccgccggcgtggcgccgcgcacgccatcttcgtctcctgcggcgcgttcggcagcgtggtgttccactcgctgtggaaccacttgccgcacctgcgtgcgcccggtgacgacgcgttctgcctcccggaccacccggaggttactgtccaccggtcgcagcttccgccttacctactccacgccgacggcacggaccggtggtcggcccaccaccgccggcagacatcggccgggtacgacaccgacgcgattctcatcagcacgatggaggagttggagacgaccgggctgcgcatgctccggaaaacgatgggcgtcccggtctatcccatcggccctctagtgcgtcgccggacggagcactccgatcacatcggtgaccataacgacgatgacgtcaagcggtggctcgacacccgagaagagaggtcagtgctgtacatctcattcgggtctaataactcgctaaggcctgaccagatggttgacctcgccatggcactggagctcaccggcaggccgttcatttgggctatccgtccgccgttcgggtttgacatcgagaccaccaacggccgcgagttcagcgccgagtggttgccggaagggttcgaggagaggatgcgtgccaagaacattgggcttctcatccacgggtgggctccgcaggtgagcatcctcgcgcacgcgtccaccggcgcgttcctgagccactgcggctggaactctgtgctggagagcatggcgcacggcgtgccaatcatcgcgtggccgctcacggcggaccagttcttcaacgcccagatgctggaggagtggggcgcgtgcgtggaggtgtcccgcgggaactggccggactccccggcgctggagcgtgagagggtggtcgaggtcgtggagatggtgatggggattacggcgaaggcggacaagatacgacagagtgtgaagcagattcaggggatgattggtcgaactctggaggacggtggttcgtccaagacagcattggaggaattcttgaagctgcatggtcacattatgctcatgaaatgctgacgccgagagaaataattttctgttttagcaatttgcccaaccttgaaacgtggtgcctgaaataacctattatgtgttcttgaataacgcacgcatttgggttttgtattgg

SEQ ID NO: 20234 - DNA, 2209 bp, Oryza sativa
  ref <308>: DATABASE ACCESSION NUMBER: AK070558
  ref <309>: DATABASE ENTRY DATE: 2001-12-06
gactgaaagctcattgctcctgggtagagagagagagagagagagagagaaagcagaggctgctgcaactgtgaagcttcacctgcagaggaggagggagaagaacaatggcggaggatggaagaggagaggagaaggccgtggacgtggtggcggtgaagaagccgaagcagggaggcttcaggaccatgccgttcatcctagcgaacgacttctgcgaccggctcgcgaatgtggggttcagctccaacctgatcacgtacctgaccctgcagctgcacctccccctcgtcgacgcctccaacacgctgaccaacttccacggcaccgccaacctcaccccgctcgtcggcggcctcatcgccgactccttcgccggcaggttctggaccatcacgttcggctccgtcatctaccagctcggcatggtcttcctcaccctctccgccgcgctcccctcgctccgcccgccgccctgcgccaagcacgccgccgactgccagcgcgcctcgtcctcccagatcgccgtgctctacgcctcgctgctcttcacctccatcggcaccggcggcacgcgcccctgcatcatggcgttcggcgccgaccagctcgagctcgacgctggcgcgcgcgggcgccgcgggcgcaaggggcccaagtggagcttcttcaacctctacttcttcggcatcgagctcgccaagctcaccgccgtcaccgtcatcgtgtacatccaggagaacgtcgggtgggggtggggcctcggcgtgcccaccatcgccatgttcgccgccgtggtcgccttcgtgtccggctactcgatgtacgtcaagatgcctcccgccggcagccccctggtccggctggcgcaggtcgcagccgccgccttcaagaagaggaaagccgtcatgccggagccaagccgcctctacgaggacaaggtgctcgacgccggcatctccaccaccggccgtcttctccacaccgatcagctaaagttctttgacaaggcggccattatcacggacggcgacgtgctgccgtccggcgagccgaagctgtggcggctgtcgacggtgcaccgcgtcgaggagctcaagtcgatcctccgcatgctgcccatctgggcggcgggcatcctgctggtgacctcggcgtcgcacaacagcagcttcgcgatccagcaggcgcgcaccatggaccgcgacatcacgccgcacttcaagatcccgccggcctccatgctcatcttcaccaacctcgccatgctgctcaccctcgccttctacgaccgcgtcctcgtccgcgtgctccgccgcttcacgggccacccaaacggcatcacccacctccagcgcgccggcgtgggcatgaccattgccatgctcgccaacgcggtggccgcggtcgtggagagtcgccgcaagtccgtggccgcggcgagcggcatgctcgacgcgcccaagggtagctcgctgcccatcagcgtcttctggctggtgccgcagtacgccatccacggcgtcgccgacgccttcatggacgtcggccgcatggagttcctctacgaccaggcgccggagagcatgcggagcaccgcggcggcgctctactggctcaccatgtcgatcggcagctacctcggcacgctgctcgtcaccatcatccacgccaagacgcagcggagcgggcagtggctgcaggacaacctcaaccgagccaagctggacagctactactggctcgtcttcggcttgcaggggctcaacctcatctactacttcgtctgcgtcaggtactacaccttcaagccattggagacggtgaaacctgaggaggagctcgagctctaccgtggaaatggcaacgagggcgatggcaagaaaggaggaaccttgaagtagaatgtgcatttcaatccccttgccggattggaacagaataatatgttcacttttactacatagatggtttatgctttgatctcaccatataaattgccgagattttatgaactctctggcaaatagaagaacgtatttttgtgtgtcatatattcaagaacaagaagtgtatatgcccatgtcctcaaaggattttctctgtttgatcagtgtttacataaacaagtaaaatatcaaggcgagatgtatcaatttatcccggaaaaaaataatttctgatcgtatgccagaaaaatatttgattg

SEQ ID NO: 20235 - DNA, 1361 bp, Oryza sativa
  ref <308>: DATABASE ACCESSION NUMBER: AK070559
  ref <309>: DATABASE ENTRY DATE: 2001-12-06
ttgatgaacgtgttgactgattgcttcgtgtaattgcggtcagcagcagtacgtatgggtaccagcagccggccgacgacggtgaaggaggggaagaaactagaggcgccccgccgtgccggcagccatgcagccgtgaagcgctctccggtggacaagccgccgttcacgctgggcgacatcagaaaggccatcccaccgcactgcttccaccgctccgtgatcaagtcattctcctacctgctccacgaccttgccattgccgcgggcctcctctactttgctctggtcgtcatccctgccctcccaggcgtcctccgcctcgtcgcctggccgttctactgggccgcgcaggggtgcttcctgttcggggtgtggatcatcgcgcacgagtgcgggcaccacgcgttctcgggccacgcactcctcgacgacaccctcggcctggtcctgcactcatggctcctagcgccatacttctcgtggaaatacacccaccaacggcaccactccaacaccagctcacaggagcgcgacgaggtgttcgtccccaggttcaagtccgacctgccgtggtactccccatacgtgtacaagtacaacaaccccgtcgctcggctgctgctcctcgtcgtgcagctcaccgtcgggtggccgatgtatttggtgttcaacacctggggtcgccagtacccaaggttcgccagccacttcgatccctctgggcccatctacaaggggcgggagcgcgtcttcatcgccatctcggacatcggcatgctggccgtgtcgctcgcgctgtacaggcttgcggagggttacgggttttggtgggtggtgcgcgtctacggcgtgccgctgcttgtcgtcaacgcgtggcttgtggtcgtcacgtacctgcatcacactcaccgggcgatcccacactacgactccagcgagtgggactggttgcgcggggcgctcgccaccgtggaccgcgactacagcttccttaaccgagtgtttcacaacatcacggacacacacgtcgtgcaccacctgttccctaccatcccgcactaccacgctgtggaggcgaccaaggcgatccgccctatcctcggcgagtactaccagttcgatcccacacccatcgtcaaggcgatatggcgcgaggctaaggagtgcatctacatccagtccgaggaccacaagggcgtcttctggtacagcaacaagttctagtacctgtagcagcggcaagcgggcgtataggaagggctgacagaattagccatgtcggtcttgcctcatcgcttcatctaaacccataatctacttgaagtcttgaattaattgtaaactcaaatgaaattccc

SEQ ID NO: 20236 - DNA, 1765 bp, Oryza sativa
  ref <308>: DATABASE ACCESSION NUMBER: AK070560
  ref <309>: DATABASE ENTRY DATE: 2001-12-06
gatcaaagcgagacaccttttcttttggcctccttcctcgcgaaaaccaccaaaccaaaacccacacacccacagcttttctccccctcactgctttgctctccagtctccacctcctcctcctcgctgccgcgccgcccatccgccagccatggcgatgtcgtcgtcccgctcggcggccgcgatccgggggcggcgggtcggggcgctggcgagggcgaggaggcacgcgacgagggcgatggcgtcgctgttcggccacgtcgagccggcttccaaggaccccatcctcggcgtcaccgaggccttcctcgccgacccctcccccgacaaagtcaacgtcggcgtcggcgcctaccgggacgacaacggcaagcccgtcgtgctcgagtgcgtgcgcgaggccgagcgccggatcgccggcaacctcaacatggagtaccttccaatgggaggaagtataaagatgattgaagagtcactaaagctggcatatggtgaggattctgatttcatcaaagataagaggattgctgcggtgcaggctctttcaggcacaggtgcatgccggctctttgccgatttccagaggcgtttcttgccaaattcacagatctacatacctacacctacatggtccaatcatcataacatttggagggatgctcaagtacctcaaaggacattcacctattaccatccagagtcaagagggcttgatttcgcaggactgatggatgatattaagaacgctccaaatggttcattctttttgcttcatgcttgtgcccataatcctactggagttgatcctacagaagaacaatggagagagatatcctaccaattcaagataaagaatcatttcccattctttgacatggcataccaaggatttgccagcggtgatccagagagagatgctaaggcaatccgaatcttccttgaagatgggcatcaaattggatgtgctcagtcatatgcaaagaacatgggactgtatgggcaaagggcagggtgcttgagtattctgtgtgaggatgagatgcaagcagtttctgttaagagccaattgcaacagattgcaaggccaatgtacagcaacccacctgttcatggtgcactggttgtctccataatccttaatgatccagaattaaagagtttatggttgaaagaggtcaagggtatggctgatcgaatcattggaatgcggaaggcactccgggaaaatctcgaaggcctaggttcaccattgtcatgggatcacatcaccaatcagattggaatgttctgctacagtgggatgacacctgaacaggtggatcgcttaaccaatgaataccatatttacatgacccgtaatggcagaataagcatggctggtgtaacaacaggaaatgtggcgtatttggctaatgctattcatgaggtcactaaaacgaaatgaagctacttcctcttccctcttcggccaatgaaatgaggcttgcaagcggcggcgttttttttttggggggtggtctattgacctttaagatggttgtactagagaaataatccagtgaacatgctggtgtttctccaacttcggattttccctgtatggaggagagaactagaaacctacccaattttgagagctatagatgccgatcctgttatttcaatcgtcagatgttatgcctgtggcagcctggcaggtcacctcagaaacagagatatgtgaaagagaataaatgcaaatgagctgagcattttgacg

SEQ ID NO: 20237 - DNA, 1054 bp, Oryza sativa
  ref <308>: DATABASE ACCESSION NUMBER: AK099146
  ref <309>: DATABASE ENTRY DATE: 2002-08-28
ggccgccgccactcccctctcgccttcctttccccaactaaaccctaactcctcgccgccgcctccgcctccgcctcctcgtcggagcagcgagccgctgctccttctcctccaccaccagccatggcgacccagatcagcaagaagaagaagttcgtgagcgatggcgtgttctacgcggagctgaacgagatgctgacgcgggagctggccgaggacggctactccggcgtggaggtgcgcgtgacgccgatgcgcacggagatcatcatccgggccacgaggacgcagaacgtgctcggcgagaaggggcgcaggatcagggagctcacctccgtcgtgcagaagcgcttcaacttccccgagaacggcgtcgagctctacgccgagaaggtcgtcaaccgcggcctctgcgccatcgcccaggccgagtccctccgctacaagcttcttggaggcctcgccgtccgcagggcttgctatggtgttcttcgctttgttatggagagtggtgccaagggttgcgaggtcattgtaagtggaaagctcagggcccaaagagccaagtccatgaagttcaaggatggttacatgatctcatctggtcagccagtcaatgagtacattgactcggctgtgagacacgtgctcctgagacagggtgttcttggcatcaaggtgaagatcatgctcgactgggaccccaagggcaaggttggcccgaccacccctctgccggatcttgtaaccatccatgctcccaaggaggaggaggagctgcgccctccggtgttgatcgctgaggcttaagcttatgatgatatttcacatctttttgaagccttgggcatgtttgacagtaccctcttaaaactccagtttggccagttctagctaggtctctgtcttcagtaagggcaatgcaacagtcggttacttcagttttattatggacaaaagctatgtactggtgtcattttatttttttttaaactaagttttgccgagacaaaagttccagtcatatgtatgccaaatcttggtttgtagcccc

SEQ ID NO: 20238 - DNA, 1449 bp, Oryza sativa
  ref <308>: DATABASE ACCESSION NUMBER: AK070561
  ref <309>: DATABASE ENTRY DATE: 2001-12-06
gaccctctctccctgtgtttccttcacatccactctcccatccagattcccaagcccatctctctctctctctctctctctctctctctctccactccagtcgaggcacggccggctccccccgcgtcgccggcgagcagggcacgggcgtgtcgcgctcgcggacggcctcccctcccctcccctcgtcctagccttctcctccgtgcggcgcacggccggcgaggccacccagggttggtgacccaaggggggcgagagcgcggagacgcggcccccccatccatctccgtctcccccgtccggatcgaatccgaggtctataaatggcaggaagacaccgcatacctcgtgaatactatgatgaacgtcgaggatttcgtgatggcccccccacctccgcttgctcgagcaaggcccatctctccacgtcgcttggaggaggagctgtctagccgccgtgctgagatgcgcagaatccatgatgacaatcagcgcctagctgatgaaattgttggtctcaggcaggcaatgcctcgtctgaaggaagatctccatgccgcaagtcaagctatacccaagcttcgtgcagaaaaagaacttgagtcaagggagctgactcagaggaatctgaagttggaagctgaactacgttccttagaacccctcaggcaagatgccttacagctacggtccgaggccgggaaactacagtcaataaggcaagagctgactgcaaaggtgcaggggttgttaaaagagcttgagcatcagaattctgagaaccagaaatacctgtcatgatagctgaacgtgatgctcttcggcaggaactagtccgaatgaggggaacccttgagtacgagaagaaggcaaggcctgatctgacagcacaggtgcaggcaatggagaaggatcttgtttctatggctcaggaatctgagaagctgagggctgagattaagaagagaaatgcacccagtttcagcggccatggagcttatggaccaccaatggcgactccagggatgggcctgcaaggcgtctatgatgatggctatccttccataggcagccgctatggcactggatcttgggcaccacatgatccccatggttatccacaactgtgactgggcttctgatcgttcttccctgggcagtgctttatcttcgtaatatcgcttgatggttgatactgatcgtgacaaagcttttctcttagtagaacttgtggtgcacagtagatggtcttttgggggtgcacttcaagtgttgttagtttagcatatgtagcaatataccagctatggttgccttggtacctctccaaaaaatgtaatcaatgatgactgtaagagggaattcagtgcaacgaagaaggaaaataggaacttaagctttacaagatgcaagtttgcgtatgaatataacaaggtggaatcagtc

SEQ ID NO: 20239 - DNA, 1090 bp, Oryza sativa
  ref <308>: DATABASE ACCESSION NUMBER: AK070562
  ref <309>: DATABASE ENTRY DATE: 2001-12-06
tggagactagacaggacaggcggacgcgagcgtcgtcctcttcgtttcgcttctcctcctcctcctccgcctccgctctcgcgagatctcctgatcgactcgctccgccatggctggagaagctgatggaaaagccccactgggatcaagatacccccctgctgctctcaacgagcgcatcctttcttccatgtctcaaaaacatgttgctgctcatccatggcacgatctggagataggtccaggagctccagcagttttcaactgtgtggttgaaattcctagaggcagcaaggttaagtatgagttggataaggcaactggtctaattaaggttgatcgtgttctttactcatctgttgtttacccacacaactatggtttcattccacgcacactttgtgaggacggtgaccccatggacgtcctcgtcctgatgcaggaacaagttgtccctggatgtttcctgcgagctcgtgctattgggctcatgcctatgattgatcagggtgagaaagatgacaagatcatagctgtttgtgctgatgaccctgaataccgccacttcagggacatcaaggaaatcccccctcaccgccttcaagagatccgccgcttctttgaagactacaagaagaatgagaacaaagaagttgctgtcaatgagtttctcccagcagaagatgccatcaacgcaatcaagtactcaatggacctctacggcgcctacatcattgagagcttgaggaagtgatctccagctgatcaactgcagaggctacatgattcactgaacagtttctcatcaatagtacgacatatgttaacatacatggtctaaaaccagtacttcggggatatataccttctactattcatgttaagacaagaagcagcaccttttctttccatgtatgccatgtcagatactcgggtcccaagcacctgacccctttgctgaactctctgctgcccaaaccgacagtttgctgaacggttacctaatagaaatcaaccatttacataaaggctcattggaatcctttttgacaaatcgtgtgattctgcctgtgtaagcatgatttactgc

SEQ ID NO: 20240 - DNA, 1406 bp, Oryza sativa
  ref <308>: DATABASE ACCESSION NUMBER: AK070563
  ref <309>: DATABASE ENTRY DATE: 2001-12-06
gctccatggctttccaccttcgcttcctcctcctccttgccctctagctactagctcacactgtcacagtcaccacacagctactagaagtaagatttagctagattattcattaatctgtactaattgatattgctaagcagctgcagcagcagcagctggttggggggaggaagaagaaggagagtgttcgatcggcggcggcggcggctcaccggtccgacatgcgcaggggttcaccgtggtacgactactactactcctcgtcgtcgtcgtcgtcgtcgtccccggcgcggagcaagcgcgcgcaggcgcagctcgtcgtcgtcgtctccgccgccggcaagaagctaccctggccctcgccgcggcgtcgcgggagccatgtcgtcgccgttcctgggctcttcttcctcttccgcttcgtcgcccctctcttacctgaccccgcctaggcctcctcctcctcctcctccccttctcatggggcagggatacgccgctgctgccaatggcggaattggcggcggcggcgtcgaggcggtgaacgcggcggcggcgccgaggcagggtggcaggcacgccgggcacccgccgctgccgaggccgccgccgaggcagtgcccgcggtgcggctcggcgaacaccaagttctgctactacaacaactacagccgcacgcagccgcggtacctctgcaaggcgtgccgccgccactggacggagggcggcacgctccgcgacgtccccgtcggcggcggccgcaagaacagcaagcgcgccgccggcggaggcaaggccggcgccacagcctcgacggcggcttctgcccatgtcgtcgcgccggcggcggcgccgccgacgtcgtcgtcgttccccgatctcctgaggcagatgctgatggcgccggctaccgccggtggcggaggcggctacagcatcgaccagaccgcgtggcagcaaatggcggcgttcgcggctccacctcaggccgccaccggcgatgtcggcggcgcggtcggagcggcgtcgacggcggcgccggacgcgaactgcggcggcggcggcgtgcagtactggaacgggtggctgcaagatgacatgcccggtctagatggttcatgttaagtaacccgtgcttgtattgatacgtatacgtatacggagctacggatatatataccgaatacgtatacgtatatatatgtgtgtgtatatgcatgtatagcctatgtatgcatacatgcatacacatgcgctatgaaagtatatacgtatgtcgtatgcgcatactaaattagcgtaacaagagcctatgactgtactagtgtagtttggattcaggttattaactcgtgggtatatgttgacctactgtagttaaatttgtgtatttgtgcgactct

SEQ ID NO: 20241 - DNA, 1545 bp, Oryza sativa
  ref <308>: DATABASE ACCESSION NUMBER: AK099147
  ref <309>: DATABASE ENTRY DATE: 2002-08-28
gtgtggccggcgcgttgggagctctgagcggaggcgggcggctgcgcggccatggagggacgcgagcgccgccgcagcatgtcgtcctcgtcgtccgggaggcgcacgccggagctggagagggagcgatgggcgccgtggagccccgcccccacgtggtcgcggccgctctccgtcgggggcggcggcagtagggcggcgtcgctcaagtcgctcttcaggacgatcgggttgtggttcagctcgctctccacctcctcctcctcctcgtcgtcggcggcggccacctccgcctccggcagcaacgctaagaggaggagcagaagagagcccaatgacttgatcaagaagccgccattgccggggcctggcagtgatcaggggaaggcgtcgatgcgcgggctgtacaacagcagcaggggaagaggcatcgcgacgcagttccagagctcggtgttctccatggaggagatcctgcgcgccaccaacaacttctcgccggcgctcaaggtcggccagggcggcttcggcgccgtctacaggggcgtcctccccgacggcacgctcgtcgccgtcaagcgcgccaagctccgggaccagaacccgcacgtggacgtggagttccggagcgaggtgaaggccatggcgcgcatcgagcaccagagcctcgtccgcttctacggctacctcgagtgcggccaggagagggtcatcgtcgtcgagttcgtccccaacggcacgctccgcgagcacctcgacaggtgcaacgggaggttcttggacatgggcgcgcggctggagatcgccatcgacgtcgcgcacgcggtgacgtacctgcacatgtacgccgatcaccccatcatccaccgcgacatcaagtcgtcgaacgtgctgctcaccccgtcgctgcgcgccaaggtgggcgacttcgggttcgcgcggctgggcgtcggcgaggccggcgccgccgacggcgtgacgcacgtgacgacgcaggtgaagggcacggcggggtacctcgacccggagtacctcaagacgtgccagctcaccgaccggagcgacgtctactccttcggcgtgctgctgctggagatcgcctccgggcggcgacccatcgaggcgaggcgggagatgcgggagcggctgacggcgcggtgggcgatgcgcaagctcgccgagggcgcggcggcggacgtgctggacccgcacctgccgcggacgccggcgacggcgcgcgccgcggagatggtgatggagctggcgttccggtgcctcgcccccgtgaggcaggagaggccgagcatgggcgagtgctgcagggcgctgtgggcggtcaggaagacgtacagggacatggtggtggccgccgccggcgacgagacgccgctctcgtccatctccgaccgggccagctcgtcgtccgccggcaccggcggcgaccggagcggcgagctctggaggaattaatcaacgttttgctgtaaatatgcaaaagcgaaagtattcgttaaaattctgctcatgtgttgatgttgtttgtgt

SEQ ID NO: 20242 - DNA, 3748 bp, Oryza sativa
  ref <308>: DATABASE ACCESSION NUMBER: AK070564
  ref <309>: DATABASE ENTRY DATE: 2001-12-06
gatccatccatccagccctcccggccccgcccatctcgccaaaatcgcgcgccgcttcccctccttttcccccaaacccgcgaccccctctcctcttccccctcgcgcgacgactcttccgaagcacacccccgccgccgcccgcctcctcctcctcctcctcctcccctccatcccccccaacatccggtggtgactccgacgaggaagcgccccaagaagcgaggtgaggtcggagggagggagggaggaagcagggatcggctcgctcgctcgctcgcttccgcccccaaccttaaaccctagggcccccgcacttcacctgctcatcggctcgaatcttgccgcgctcgggtgtggggaccgggaagatccgggtcttctcttttcgggggattggagatgtcttcggacatcaggaaatggttcatgaaggcgcaggacaagaatggtggcgcagcgaagccggctgggacgacggcgttggcgaagaagcccgtgctcagcattccggagaagccgtcggcggcgccatctatggcggcttgtgatcaagattgttcagctagaaggaagactagcaagtactttgcatccaaaacagaaaaggaggaagacaccagtgcaggaaaaggtaccgggagaggtttgcctaaaagaaaacttcagaaagtcagtgatgagcttgaggatgacatgaagcctttgccagcaaaggaagtccataaagaagaagaagatgatgatgacgacgactttgtggcaccttcaaaaaggaaaactccggtgaagccaccaccatcaaagaagttgaagggtgcatctactgctgaagctcatggaaagactggtcttgatgatgataacgaggacaagatggatgaagacgctaagaccccttccaaggcatctggaagtggaaggggaaggggaagggggagagggaggggaggaagaggagcaggagcagcccatggaaagacaattggtcttgatgacgacggtgaggaggataagatggatgaagatgccaagaccccttccaaagcagctggaaggggaaggggaggagcctctgggggaagagggagaggagggggtgggagaggcttcatgaactttggtgaaaggaaggatcctcctcacaaaggggagaaggaagtcccggagggtgcccctgactgtttaactggtttgacatttgtcataagtggcactcttgacagtcttgaacgtgaggaggcaactgatctaatcaagcgttatggaggccgtgtgaccggctctattagcaaaaagacgaattacctattggctgatgaagacgttggtggagtgaaatcaaataaagcgaaagaactgggcgtcccattcctaactgaagatggtttatttgatatgattcggaaatcaaagcctgcaaaggctactgtggcaaaacatcaaagcgacaaaaattcagaaaagcagcaaaaatcaccaatgaagagttctccagttaaagttgaaagaagagatggtaatcaaattaccacaggcaaaaatatttcaccaaagagtaataaaggaagtgcctccattgacaaccaaaaggtcaacattgttgaccgtggttctttgcaatggactgaaaagtatcggcccaaagttccaaatgacatagttgggaaccaatcaatggttaaacagcttcatgattggttgagaagttgggaggaccaattccttcattctggccagaagggtaagggaaagaagcaggctgatagtggagctaaaaaggctgtgttgttgagtggacctccaggtattggtaagaccacaactgctaaagttgtcagtcagatgcttggattgcaggctattgaggttaatgcaagtgatagccgtggtaaggcagactctaagattgagaaaggtgttgggggcagtacatcaaattctatcaaagagcttattagtaatgcaactctgaattatagtaacaaccgattaaaacgacccaaggctgtactagtcatggatgaagttgatggtatgtctgctggagatcgtggtggtgttgctgatcttattgctagcattaagatgtccaagattcctataatttgcatttgcaatgaccgttatagccagaaattgaagagccttgtaaattactgcttgctactcaacttcagaaaaccaaccaagcaacagatgggtaagaggttgatggaaattgccaagaaggaaggtcttcaagctcaagagaatgcaatggaagaacttgcagaaagagtacacggggatattcgcatggctcttaaccatttgcaatatatgagcctctcccagtccgtggtcaaatatgatgatataagacagcgacttaatagtagcacaaaagatgaagatatttcccccttcacggctgttgacaagctgtttggttttaatggtgggagactacggatggatgagagaattgatttgagcatgagcgatcctgatttagtccctctgattatccaggaaaactatatcaattatcggcctatcactgttgggaaggatgacagtggagttaaaagaatgaattttcttgctcgtgctgctgaatctatagcggacgctgatattgttaatgtacaaataagaagatatcgacagtggcaattgtcccaagctgcttgtttgtcttcatctatagttcctgctgctttgatgcatgggaatagagagatccttgaagcaggtgagcgaaacttcaataggtttggtggatggttgggaaagtactcgaccacaaataaaaacataaggctactggaagatgcccatagtcatattcttgcctcccagcaagcaaatttggacagggagtcattgaggctggattacctcactcttctcttgagacaattgactgatccactgaagacaatgcccaaggatgaagctgtgcaaaaagtggtggagtttatggatacctactctttaagccaggaagactttgacacaattgttgaattatcaaaatttaagggtcatccaaatcctatggatggtattcaaccagctgttaaaagtgccttaacaaaagcatacaaacaaggaagtagttctcgtgttgttcgagcagcagatctagtaaatatcccaggcatgaaaaagccattaaagaaacgagtggcagcaatccttgagccagtgggagagagtttgcctgaagaaaatggagtagcgtcatctgaaggcgatgaagaggattcctctgatgctgaaaataatgatgaactggtgcctggtgacacaaaaccaaaactggacctgcagagtgataagaagaaagggatccaagtgcagctcgacctgaagagcaatggcaatggcttgaactcgaagaagatgccggctggtagatcaaaagcttctggctctgctgggaaggctgctggaggctcaggtgggaagaggaagaggtaaacgtccgccggccgccgtcatttagtcggtggtgaatctacatgaacatcctctgatattctggggcagaatgcggttcaaattttcttgcttgtacataagtcccaatcatctttgtaggcagtagtaggcaattggtatctgctccagatattttgtttcctcccacttgtatgagcttcatttcgctctactggcatttggccagttttcagctttgcaagacaacgtccattattgttgacttccgttcaatgaaattgtgtcatgtttgttgtct

SEQ ID NO: 20243 - DNA, 1370 bp, Oryza sativa
  ref <308>: DATABASE ACCESSION NUMBER: AK070565
  ref <309>: DATABASE ENTRY DATE: 2001-12-06
gatgtgaaatctcgccgtctcctctcggagcctttcctcctcgccttctcccttctctctctctctctctctctctctctctctctctctcccgaaccttctcgccatggccgaccacgctgcggcggaggcggcgccgcagtcgtcgcaggaggaggaggaggactggaaggaggccgaggggggagacggggacgtcgaggtggcggacaggggcggcggaggcggcgccgccaatgggggaatcccggaggggaggccgatccgggtctacgcggacggaatctacgatctcttccacttcggccacgccaagtcgctcgagcaggccaagaggctgtttcctaacacatatctccttgtcggatgctgcaatgatgagttgacacataagtacaaagggagaactgttatgacagaggatgagcgatatgaatcacttcgtcactgcaagtgggtggatgaagtcattcctgatgctccatgggtggtaacggaagaattcttgaataaacataacattgattttgttgcacatgattctctgccgtatgctgatgctagtggagctggtaacgatgtctatgaatttgtcaaaaaacttggtaaatttaaggaaacccagcgcacagatgggatatcgacgtcagatattataatgcggattgttaaggattataatgagtatgttatgcggaacctggccagggggtacaccagaaaggatcttggtgtcagttacgttaaggaaaaaagactgagagttaacatgggattaaaaaacctgcgtgacaaagtgaagcagcaccaagaaaaagtaggggagaagtggaatacaatggcgaaactccaggaagagtgggtggaaaatgcagatcgatgggttgctggttttctggagaagtttgaagaaggctgccactcaatgggaactgccatcaaagagcggatccaagagaggctcaaggcgcaatccagggatttcagccttctacagtatgatggcgaggatgttgacgaggatgaggacgacgacgaatatgtcagagaataatgccaccactgtgaatatacgtcaagtataatatatgtacatgcgctgcatgtagcagatcttcaatccttgggcatgtcatgcacccctctctcttcaggaatggtgaacttgtgccccccaggttagattttggtgctgtgttgtagcaatagcaggtgttttgtttaggctaagacgcaaagtaagcctgtaaaatcccctagtcgatggcctgaatggttatctggaagatacagatatgttcaattatatttttgtttagcacacaagaacactatatttcaattgactatctactatatttcaattgact

SEQ ID NO: 20244 - DNA, 1353 bp, Oryza sativa
  ref <308>: DATABASE ACCESSION NUMBER: AK070566
  ref <309>: DATABASE ENTRY DATE: 2001-12-06
gagtggtgacgcccactgggacttcccctccctttcctagtttcctcccaatcgtgaccaaattccgccagatcgccggtggtctccttcgccggccgcctacaggaaccgctcaaccgcgggcaccagctaccgccgcccgccttcttcctccctcggagtccccaataccacaacccttgccgcagagaaaggcgctgtagttggtggtggtagagctggctgtggaggcgagggagcgaggatagggaggggatgactagcctgtcaattacggtgatgacgctcaacctacacgagggggagcaaccgagcgagagccccaacagctgggagaggcgccgcgacatctgcgtcagcgtcatcaccagctactcccccaccatcctctgcacccagcaaggattgaggtggcagctggactacctacagcagtgcctgcctggttatgagcaatttgggatttcaagaaaaggctcagaggataacactgatgaatattgtacaatattctatgaaaaagaaaaggtggagcttacagaaggtggtaccttttggttgtcagaatctccttcagtgcctggaagcgtttcatggggggcaactgcaccctgcattgctacatgggcaacacatttcaactcaaacaagtagaaccacctgggttcagcttccagattgtaaatacaaaccttgatgaagatagccctcgagctcgtagacgaagtgctttgctaacgtggcaacatatagcatcgttgccacccaatttaccagtgatctattgtggtggattcaacacacagaaggagtctatgactgggcggtttttgctcggtagatccagagaacatggtgttgtgggtgatatgagagatgcttggccaaatgctcgtgtccgcaaaaatgtttcactcatacatacgtatcatggatttaaaggggagaaacaaggtgccctagagtttctgaaattaatatttagagcactttgtctctgctgggatcgacagactcaggacttgcatattgactggatactgtttagagggcgtccactggttcctgcactctgtgaagtcataaatgacaatattgatggtgtttatccttcttcacattttcccatatttgctgaatttttgcttccacgctccgtccgcctagtggagacaccataatcgttttgtgtgttctttttgccataccatttctttttcatcattaatgtttctttttggttaaattgtttgtttatttttattttctctctgtcgcgttttgtttgccttgatcatacacgttacatgtactcctgtagtcctgtgcagaatctgggccaatattcttatc

SEQ ID NO: 20245 - DNA, 4143 bp, Oryza sativa
  ref <308>: DATABASE ACCESSION NUMBER: AK070567
  ref <309>: DATABASE ENTRY DATE: 2001-12-06
gcgactgctagttttactgtgcgccggcggcggcagcggcgatggccgcgcgcggcggaggcgggcgaccgccggcgtcgcgccgccgtagacggaagccgcggggagggaggatggagcgggtttctactcccgctcgtctccgccggccgccacggctggatgccgccgagtggtttgatatcccaggtgaacacatgtccgctccagatgaaaaggcgcctactgaggttgcaggcatgcccttttcttgggatatgcagtctgaagcagccaaatattttggaaactttgacacagagatccaagcttcttgtcagactcaagaaccatcatacagagccatttatggaagctgcaattctggccaaatgattggactaggggattcacaatataaactggctgggtcatcctcatctcaaagcctctatagtgataacttctctgatgccactggattcaaccagctgaagcttcaaaaacaaacaagtgctgatggaaacaccgaatcctggtcagaactgaacagagatgccattggaggtttatcaggtaaagggagtccactagccaaatcaggaaagcagcttgagcaacgtatggcgaaggctctttctgctcagccataccaccctgtatttcctgtgactcaaggtgttagttccagcaattcatcttcccaacatgttgtgagttcatcaggagaggccaaatatattggaaattctggtcaagaaatgcaagttgcttgtgaaactgcaaaagaaccatcacatagagccttatatggaagcaaaaacccttatcaactgactggactcagtgatctccgtgataaaatcattgcctcatcttcatttgaaggagtcaatactggtagcctcactagcactttgtcagggatgaacttgccaaccaacagtgctaaagaaaacactgaatacaaccaactgaagcttcagaaacaaatagatggttatcagaggtttgaatcaggctcaggattaaacagggatgatgctggagatataactgtaacaggagttccacaacaagtgcaggttgggcaaaacatggtaaatgctctttctgctaagccctaccatcctgtgttttctgtctcacatggtacaagtgccagttcatcttcacaacacccatatatggcgagacagttgctagagcaccctgaatacaatccaaggatgcatcgcacccatccttcattgcaaccaacaatcgaagctgcatccacctcaatgacatcccatgttaaagagccctgttaccaagaaaatgttggggatagcaacccaggtatgtccctgcttcgcagcacagctgtttcctccagggatgtagagaacaaatctcccaacctgggtgatagggtgcatgctgatgtttcggaaatatactccactttggatcaccaaacttcagctaacagcatgcagattcagtatgctcctcaggttgtaaggcaaccatcacaacagtccctgcattctgatgttacagaaacatattcagcttttggtcatcagtctgcagccagcaatatacagaggcagtttgctcctcgggttacaagacaagcatcacacaggtccctatatgaaagcagcaatagcagtctatggactggacctcatgatgattcccagatggaactgttcaggccatcctcgtctcgcagaattagtactaatgtcatctctggtgaattgccaaggatcaacttgcagagtgagacaatgatgggaaatgctgatttcaaccagcaaaatcttcggagacaaatttctctccgtgaaaacactgaatctcactcttttggcacatataacgagttgccaagaacatcttcctttttgcgccgtcaaagctctgaatcctcacaactgaatagtgcttctgtcaaatgttcaccaggttctggtagctcatcaaccacgatgggtcctcctcgccctttcaatacagtatcaggaggtgccagttctctgctaggaagtcctctttcttccatgtctggaggttcaagttctggtggtaatcctgatcatcagggcactgttttatcttcaatataccaaccagatggatacaatattaattccaccttgcctctaagaatgagaacacatgcaagggaggcctatgccacatctgttctacctcaagccacaaggcgaagccaccaagtgaactttgattctgcagaacggagaccccaatatgttcaacaaaggggtctggatgacactataaattcaaacatgttgagtgctcggcagcagtttcagaggcaggttgaaaggcagcttcagaggcaacttgaaaggcaacttcagaggcaacttgaaaggcaacttcagaggcaggttcaaaggcagcttcagaggcatcatgagagagcagctgcatctgaagcacatccattttatggcaatgatgagacttctgtcaggatgaacccaactgaggaatttcttgatatagtaaaggatcatgaagcattcttcctttcattttatcatccttctcgtattccagcccgtgtcatgaatacagtagatcaatgctatggtgttgatatggaaagggagatgccacatcaagagagtcatccaacacctggctgtggtactgagctttctcataagaatgacacttcaggttttgaaagatctgatgtggatgtcgcacacatacatgattccaaaaggctaaataatgaggaactcaatgcccttctattacataggaagttcagcagcttaaacaaagggaattaccggctttttcacatagaaggccatgtgcttcaatgcagcattgatcagtgtgggagccgctttatacagcagaagcttccaacagcgacacctgatgagaaactcatggtctttaaagaaatcatgcctcattttcttgaaatggtgactgatgtatttggaaattatgtgctgcaaaagatgatcgagcatggagccccatttcaaagaagggaaattacagcttgcctttttggaagtgttcgagcttaagctgtcaactatacgggtgtcgagtagtccagagggctgtagagcttagtgatctagatcagaagatacagattgccaaggagctcaatagtaatatcatgaaatgtatacatgacccaaatgcaaaccatgttgtccagaaatgtatagagcatgtgccaccacgattcatacagttctttgtggagagcatgtatgggcgtgttgtggagttatcagtccatccatacggatgccgtgtcatccagagaattctggagtactttgattcatcgatccaggagatctttctagaagagattatagaggaggtttactatatggcgaaagatcaatacgctaactatgttgtgcagaacatattgcagcacgggaaagcccttgtgcgatctgcaattataaagaaatttattgggagagttgtggccatgagcaagcaaaaattcgcctctaatgtcattgaaaagtgcttaatatttggtagctatgatgaaaaacagaagatcattaatgaggtcatcggcacaacggacctcgtcagaagtggtgaaaccgaggctcttgtggttatggtgaacgaccaatatgctaactacgttgtacagaaggtgattgaaacctgcgacgagtggcagcggaagctaatactcaggcgcttgagggcgcaccacagcctgcttcacgactgcacctatgcaaagcacgtcgtggcacgactggataggctcatcgatatcggggagcgcaaaatggcgaatcccaggcgccccaggcgacatgggaaagatcctgtgccaccactgacctagaaatgagctcgagtaaatcagctgaaggggacgacggtgacctctgtccactgctgcttctgtctgcagcttactgaatcctactactgcggtaaattcgacgatcaatcgagactgctgagatgatgaactggtcatgaactctctgtaatgttagtgaataatggatgtgaagatcgaatgaacatttggatatctgtaatgtcacttgaactctggtaactgcgaggtctattctacctgtgtttgtaaggggaggagactttactatgcctgcc

SEQ ID NO: 20246 - DNA, 2470 bp, Oryza sativa
  ref <308>: DATABASE ACCESSION NUMBER: AK070568
  ref <309>: DATABASE ENTRY DATE: 2001-12-06
gttaaagtcctcctccgctttccgcctccttcctcctcctccccctctcccgtctccgctactccaaacttaattttgatttctcgccggagaattcctcctccgcctcccggctcctcccctccgccctcgcttccgcaggcgaactaaaccatggcgacaggtcaaattttctccaaaaccacccaagcgttattctataattataagcaacttccgatccaacggatgcttgattttgacttcctatgtgggagagaaacaccttctgttgctggaataatcaatcctggttctgatgggtttcagaaacttttctttggacaagaagaaattgccattccagttcatcctacaattgaagctgcctgcaatgcacacccaactgctgatgtatttatcaactttgcatcctttcggagtgctgccgcttcttcaatgtcagctttgaagcagccaacaatcagagttgtagccatcatagcagagggtgttcctgaatcagatacaaaacaacttattagttatgcacgtgccaacaacaaggtaatcattggaccagcaacagttggaggaatccaagctggtgctttcaagattggtgatactgctggaaccattgacaacattattcaatgcaagctttacaggcctggatctgttggctttgtttctaaatcgggtggcatgtcaaatgagatgtacaacaccattgccagagtgacagatggtatttatgaaggaattgcaattggaggggatgttttccctggctcaactctgtcagaccacatcctgcgtttcaacaacatacctcaggtcaaaatgatggttgttcttggggagcttggaggaaaagatgagtattctcttgttgaagccctgaaacaaggaaaggttcagaaacctgttgttgcatgggttagtgggacatgcgctcgtctattcaagtctgaagtgcagtttggccatgctggtgcgaaaagtggtggtgagttggaatcagcacaagctaagaaccaggcactaaaagatgccggggcagttgtccctacttcatatgaagctcttgaaactgcgatcaaggagacatttgagaaactggttgaggacggaaagatctctcctgttactgagattacaccacctcctattccagaggatcttaaaaccgcaattaagagtgggaaggtccgagctcccacacacattatctccactatctcggatgacagaggcgaggaaccctgctatgctggtgtccccatgtctacaattattgaacagggttatggagttggtgacgttatttcgcttttgtggttcaagcgcagtcttcctcgttactgcactcagtttattgagatgtgcatcatgctttgcgctgatcatggtccttgtgtatccggtgctcacaattctatagttactgctagggctggaaaggaccttgtttccagcttggtatctggtttattgacaattggcccccgttttggtggtgcaattgatgatgctgcccggtacttcaaagatgcatatgatggaaatctcacaccttatgagttcgttgagggtatgaaaaagaagggaatccgtgtccctgggattggtcacaggatcaagagcagagacaacagagataagagagtgcagcttctacagaaatatgcccacacacatttcccttctgtcaaatacatggagtatgctgtccaggttgagacctacaccctgtcaaaagccaacaatttggttctgaacgtcgatggtgcgattgggtcgcttttcttggatcttctttctggcagtggaatgttcagcaaacaagaaatcgatgagattgttgagattggttaccttaatggactctttgtgcttgcgcgttcaattggtctcatcgggcacacctttgaccagaagaggctcaagcaaccactctaccgccacccatgggaggatgtcctctacaccaagtgaagactcggttgttcttaatattacctagatattccagctttgtacacacttcaaaaggtcaagcgaaattgcataaaagtgaacgccgatgaaactagggggagaagaatggggtcaccggtgaccgctgttgttgcgtgtttcaagttagttgcaaattgagatctgttcctgatttttgtcaaagcaagaaccattaggacaacatgggggatattggaaatttactgtatcatcgtgtactatcgattctctcaacgaaaaaaaaaatctagtctgatgctaatgtgttcaccggtcgtggagagtgttgtaatgtttgtgattgtcaatgtgccacttcgataggcatcatttttgctattaaaaataaaataaaatttgcatgtctttcctgcttctacagttgtacctccatcagactgatcccaaagctccctattcctgtgcaattagcaattgttctctggaaaaaaaacactttatttgc

SEQ ID NO: 20247 - DNA, 3885 bp, Oryza sativa
  ref <308>: DATABASE ACCESSION NUMBER: AK070569
  ref <309>: DATABASE ENTRY DATE: 2001-12-06
gagctcacctccactcgtggggttaaaaccccgagaactgcacagcagcagcagcacacggcgcagcagcggcaaaggcggcagcagcagcagcagcaagaaccgagcaaagtcgcaagaagcgagcacacacactcctctctctctctccctctctagctactgttgttcttggagttgtagaggaggaggaggtggtggtggaggtggtggagatagggggaggatgctgatgctcctagtcctatcctagttcgtcgtcaactccggcggcggatctgcggtggagcggcggctggattgtcgagcggtgagggtgacacgcatctccggagctcgccgcaggcgggagggatctgaggcgcgtttcttaatttgccttctctttgagctagctgcaaaggcggcggcgtgcggcggcggcggcgtcttggcgcgcgcattctatccggcgagtcgacgacgacgacgaccttcgcgccggtgtagcggcgcccgtgatgtgaaggaattcgagctcgctcccttgggatcgaaaaggttgcgggttggagaggcaagaaggtttggccggtttggggaaggagagaaagcgatggtggtggtggtggtggtggtggctgggttgcttgctccatgacacgacagcgcgtttgggaacgcctcgtgatctcggtgcagaaaggattccttctctgctccatttcttgcactctccactttgcattctagatcggttgggggaagaagaagaagagaagaagaagaatgaagctctcgccgtcggccggcggcgtctccgaccagccgccgtcgccgccggaagttgcagaggagcagaagtgcctaaattctgagttgtggcatgcatgcgccggccctctcgtttcgctgcctgcggtcggtagtcgggtggtttattttcctcaaggccacagtgagcaggtagctgcatcaacaaataaggaaatggagtctcagatccccaactatcctaacctgccgccgcagcttatatgccagctacataatgtgaccatgcacgccgatgcagagacggatgaagtctatgcgcaaatgacgctgcagccactcagcccgcaagagctcaaggatccattcctacccgccgagctaggcactgccagcaagcagccaacaaattatttctgcaaaacgttaactgctagtgacacaagtacacatggtggattctctgttccccgtcgagcagcagagaaagtatttcctccgctggatttcactcagcagcctccagctcaagagttgatggcgaaagacctccatggaaatgaatggaaattccgtcatatctttcgtggccaaccgaagcggcatcttctgactacgggttggagcgtctttgtaagtgcaaagagactggttgctggagactctgtcctttttatctggaatgacagtaatcagctgcttctgggaattcgtcgggcaaataggccacaaacggtcatgccatcatcagtattgtctagtgacagcatgcatattggtctgcttgctgcagctgctcacgccgcatcaacaaatagccggtttactattttctataatccaagagcaagcccttcggagtttgttataccactggctaaatatgtaaaggctgtctaccatacccgcatatcggtgggcatgcgtttccggatgctttttgaaacagaagaatccagtgttaggagatacatggggacaataacaggaataagtgatcttgatcctgttcgttggatgaactcacactggcgctctgtcaaggttggatgggatgagtcgactgctggagagagacagccaagggtgtctctttgggagatcgagcctctgacaactttcccgatgtatccatctccttttcctctcagactaaagcgtccatggccaacaggcttaccttctttatatggcggaaaggaggatgacttggcttcttctcttatgtggcttcgagatagtcaaaacacaggtttccaatctctgaattttggaggacttggtatgagtccgtggatgcagccaaggctggatagttccctacttggtctgcaacctgacatgtaccaaacgatagcggcggcggcggctttacagaacaccactaagcaagtatcacctgccatgctgcagttccagcagccgcaaaacattgtcggtagatcttctcttctatccagtcagattctgcagcaagcacagcctcaatttcagcagatgtaccaccaaaacatcaatggcaactcaatccaaggccatagtcagcctgagtacctccagcaaccgcttcaacattgccaatcatttaacgaacagaagcctcagttgcagccgcagcaacagcagcaagaatcacaccagcagcaacctcagcatcaacaaatgcaacaacagaaacacttgtccaactttcagactgtaccaaatgcattgtcggttttttcacagctttcctccacccctcagtctacaccctccacattgcagacagtttcaccattctcacagcaacataatttccctgacacaaatatcagttgtctctctccatccaatgtctcatccatgcacgatacactgagatcattcccttcagaagctgcttcagacctcccaggtgtgccaagaatcacccctgtacctgtctctgacccatggtcatctaagcgagttgcagtggaatctacgatcacttctcgcccacatgacatttcatcacagatagagaacttcgacttgacaccttctagtattcctcaaaactccacgttagcaccactgcctggaagggaatgcctggtggatcaagatgggagctctgatcctcaaaatcacttcttgtttggtgtaaatatagactcacagtcacttttgatgcaagatggcattccaagccttcacaatgaaaacagttcaagcacaattccatattccacatccaacttccttagcccttctcaagatgattatccattgagtcaaacactaactactccgggctgcttagatgaatcaggatatgttccatgttcagataatgctgatcaagtgaagcgaccgcatgcaacctttgtgaaggtttacaaatctggaaccgttggaaggttgctcgacatcactagatttagcagttatcatgaacttcgtagtgaggtagggcgcctttttggccttgagggccagttggaagaccctttgagatcaggctggcagcttgtatttgttgaccgagaggacgacgttcttctagttggcgatgatccgtggcaggaatttgtgaacagtgtgtcttgcataaagatactttcgccgcaggaggttcagcagatgggcaagccgggcattgaactcttctcgacttctgcaaggagacttggcaacagctgtgacaactacatgagcaggcaggaatcaagaagcctaagcactggaatcgcgtcggtgggctcagttgagttctgagaaatagggagctcatagcacccggcgttaggcgtccagttctgtacgtctctgtagctcttagttctgtgacctggaacccaagcacataggtcaagtgtagctctaagttatgcgctgtctggtaattatgtcatattacattgacttttagtggtacctattacattttggtatacatgccgacactttgtttcctggaatactgatcatgttaacttagggcatctaattattaggttcatgttgagtagtgctgtagtgccgcaggcgctagctttggccatattctgtatattgatgatgttttcctcctgcaatgtactgttaatgacagcaagtaaggttttccatgcaactgtgaaaattcagttcaagaactattgagct

SEQ ID NO: 20248 - DNA, 634 bp, Oryza sativa
  ref <308>: DATABASE ACCESSION NUMBER: AK070570
  ref <309>: DATABASE ENTRY DATE: 2001-12-06
ggcacatcgcgtttctcctcgaggccgcgaagagagaagggggagggaggactgaggcagcggcggcggtagcagtgaaggcacacggcgcatggtggcggtggtggcggctgcctcctctcgcacagcaagggcgccgggcggaggtctgggcggcgctgggcggaggtcagggcagcgcacggcggttggatttggcgctgagacctcatggcggcggcacttggcggcgggagcggctccccacagcgaggaggcgcacggcaggagctgggcgacgccggtggcatagcagatctggtgcaaggagcaaggacataccaggctgcaccaaatttattaagactggcttgcaaaatgaagagctacttgagaagatgtttgaagatatccgcaataccggtgctaaccattggtctttggggcaaggcaccataccaacagccatggatgcatttcgtgattacctagccggtcgtattgcaggttgatggacatatatcgtattttgtgttgttttgcggtcttatgctctatctttcgatgataatggtactagttattattactaaatatatgtcatgcaacaactttaatttttactttattttggagtaccaatcatataatgatt

SEQ ID NO: 20249 - DNA, 1719 bp, Oryza sativa
  ref <308>: DATABASE ACCESSION NUMBER: AK070571
  ref <309>: DATABASE ENTRY DATE: 2001-12-06
ggctgacctcgtgcttgtcctctgggtctctgtccccctcatctctctcctcctcactctcctcggctgctctcctcctctgtcggtggtgcactgcttgctcgatcctctgcaatggcggtcgacccgcgccaggtggtggccgggttcctgaccctgtccatgttcgtcatgctcggcaacatgatcaagcacgaccacttcacccccgtcggcgccggccaggaggagttgggcttggaggcaacaggcatagaatcaaacgaaattaaaattgcagatactactgaaatgactaaggtcaacaaggctggagtggatctcccaaaggagactgctgaggagattagaccctgctggtctaaaccaagatcaaatgttcaggagtctaagggttttgttacattctcattgactatgggccctgaataccacatctcacagattactgatgctgtggttatcgcaagatatttaggtgcaacacttgtgcttccagaaattagaggaaatgagttaggaaagaggcggaaattcgaagacatgtatgatgtggataaattcatgacgagcttggatggagttgtcaaagtagtacattcacttcctaatgcagtgtcttctaagaagccagcagtagttagagtaccaaaccgggtgactgaagagttcatcacgggaaccattgagccgatcttccaaagaaataactacttacgacttgcgactattttctcttcagtaagtttgaaacagaaggagtcgggtaacaaggacttggattcgactgcctgccttgcaatgttcagtggccttcagttgaaacctgaattttcagcagtagccaagcatatgttggacaagcttaaagaaataagcgagaaatccgatgggatggttatagctattgatttacagaccgaattgctagaaaagaagatctgtaagacgaatggaggtgcaagaagaagaggctgttattaccctcaggaagttgtgcacttcctgaagaaggttggcttctctgctgatacaaccatctacttgacggagacatggtggcacaaaagcctggatactctgaaggaggcatttccaaacacttataccaaggatgatataatgccggccgctaacaaaggcgagttcctgaaatccggggattcataccttgcaagagcactggacctcaaaatctgctcggagagcgacgtgttcgtccctgccatccccggcctgttctacggacatgtcgccggtaagaggatcgctgcaggcctgacaaacatcatagttcctgctccagtgtccagcagttcagctctggcttcagagttcgtctccacatacgtgtccaagaagagccatcttgcctactcatgttactgctagtactgttcttatatcatcagcatcagcatcagcatcaataagttcaactgaagtgagttgcttggccaagctttgggtacatatgtaagtccttttgttgtatactagttcatgatgttgtgaggaacagtatcatttatgtgttacttaattgttgttgataacaaaaggagagaagcacagaattagtgtgctgaaaaaaaaaggacactagattaggcatgtggaaagagtgtgtgcttcatgtactaccaagttatggttcatcagctggaaattactccaaaatactgcttccatagaagatgtgatgtgtgaaattctctt

SEQ ID NO: 20250 - DNA, 2301 bp, Oryza sativa
  ref <308>: DATABASE ACCESSION NUMBER: AK070572
  ref <309>: DATABASE ENTRY DATE: 2001-12-06
ggccgcttcgttcgccggcgatcgatgagcgcggcggagctgtgcgacgccctcgccgccgccgggttcgacggcgacggcccactcgatctggacagcctcgagtggccgttcctccagggggacgacgcccgccgccttctcgcctgggtctcctccaggctccgccccgccaacgtcctctccgccaccgacctcgccctgtatgagcagcttgaactagaagggaaacttttggagggggaggacttagactttgcgtttgacagtatttcggccttctcagagactggagaaaaccaggaagacacatttctgacagaagaaagtcttgagcacatccgtgactcaaagcttacactcagagctgaagtttctgatttggaaaggcagcttgcttctcttgaatggcagcttgatatgcttacagcacaagctaccaccattactcagggaaagaagtcacgtgtatctgctaaaactaatcctaatatacaaatttcaagattagatgagaaacttgctaagagaagtttagagatgaattcattacttggaaaacttgctgctaccacccaggagttgtcttattatcattcagaagctgatattggaatttacctatcatacagtgacttccagtcttacataatccaaaatttggcttgtatcaaggaactaaacagatggttctccaagaagtttgagaagggacctctccaatttgttgccaaagaagacatgtcaagaggagattatgaagggtcacaccatctttctgttgaactgaagcgaattaattccatattcgctagaagcaaaagacagtacatagaagcacaagcagaatatgctaaggaggaggccatactctcaacgcttagaacccaattggcatcccagcagtcacttgttcatcaggatgttaattctctaaggaggagaaactctgagtttgctgaagagcttagggatctttcacttcaagtgaagagatgcctatctgagattattacaagcctgtgtgctgaccttgctcaacttgagggtgcaaatattttgcaaggggatcataatttgaaggttctgcgtcaggaatgctacataagccagcagaaaaggttcatcaattatctggttaatcaacttgctgctcatcagtttctaaagatagcttgccagattgaaggacgggcaaaaatgtcaagtgcctattcactgctaaaagcagcagcaatggagctgcagggttacttctcagttgttgatggccgtctggaccgatatcatttaattggtcaagctgcatctgtaatgcttgaagaaggatctattgatgatcgtgatacttttcttcatgctgtgagggatattcttagtactcactcaggtgctcaagcaatgactccatcatatgtttcagcatatggtttagttgagcagatctcagatctgcaaaatgagctcgagtatcttcatcatgagcttgaaaatgttcttccacgtgaacgcaaaagatgtatcgatgaactatgcaggatgatccaaacactcgagcaaattctgtctgtaccatttacatatgtgcaaccaacattgacaccatggcctgtagcacaatcgcttgaagaattggaaataatcaaccagcaagtctctgcttgtgttaacgaagtaacgatggctcgagataaaaaggccaagatgttacaacaaccttcgcgcaatgtgcagcaggaaagacgagtatttgtcgatttcttctgccacccaggacggcttgagaatcaagtcagagagatgagttcccatgttagagcactccaagagtgatcttcgattttgctgtgaagaagggcccaataaataattcttttgattcttaaaaaatcagcatcgtgcaccctgtcttctgttggcagaatgcaggctttttgcagttgtatatcctcagcataaaaaaatttagagttatggtacagattttcttctatatcgtccataaaaatatacgcagcctagtgcttcaagaataactgatgccgtgtttaagatgttcggccaaaattttacatatttcgcctgtaaagatgctaataacaaaacaaattatagattctacctgtaaactgcgagacgagtttattaagcctaattaattcgtcattagcaaatgtttactgtagcaccacattgtcaaatcacggcgcaattaggctcaaaagattcgtctcgcaatttacatgcaaactgtacaattgattttttttcgtccacatttaatgctatatgcatgtgtcc

SEQ ID NO: 20251 - DNA, 930 bp, Oryza sativa
  ref <308>: DATABASE ACCESSION NUMBER: AK070573
  ref <309>: DATABASE ENTRY DATE: 2001-12-06
ggcatcgtcgtctcgccttgccccgtccactaaccctagcggcaactgcgatctccaaccgctcgatctctcgccggaggctccagatctgcgggaggtagtcgacctcgtcgccggcggtggggtttccgaatcgggggcgaagatgacggaggcgtgggtgcggcacaagcccgggatggcgagcgtcaaggacatgccggtgctgcaggacgggccgccgccgggcggcttcgcgcccgtgcgctacgcgcgccggatccccaccaaggggcccagcgccatcgccatcttcctcactaccttcggcgccttcgcctgggggatgtaccaggttggccaggggaacaaggtccgccgtgcactcaaagaggagaaaattgctgcccgcaccgctttagtgccagtgctccaagctgaagaagatgaaagatttgtcaaagagtggacaaagtctcttatgtgggaggaaataattatgaaagatgtccctggatggaaggtcggccaaagtgtctataattccgggaaatggatgcctcctgccaccggcgagctgcgtcgtgaagattgatgaaatccaaggggcttgccgcagcctaccaaagatgccatcatgtcttttgggcatgcataaggcttttgaaccagaatacccaaaaaaaattgctacgaggaactcactcttaaagcactcgctgtgcatttgttgtgttgatgaaatcttggctaataattggacatgtcaaacagacatttgtttcacatgaactatgctcttttgtggacggaacatctgttttgccctgatgttctcccttctctatgttttatttttttctactctgtactaagcacttcttggtcagtgctttaccttactgtaaacattcgaatgtattcagtctttttagacaaagacacaggagg

SEQ ID NO: 20252 - DNA, 2197 bp, Oryza sativa
  ref <308>: DATABASE ACCESSION NUMBER: AK070574
  ref <309>: DATABASE ENTRY DATE: 2001-12-06
ggccacgacgtcaaccctctctcgtctctcttctcctagccgacgcgacgacgacgacgacgtcgtcggtgtcgcctccgcgcgcgcggcgcgctgctcccctgcacgccgccgccgacccacggagaggactccccacccatcccaggtacggcgcctcgccgcgttctcttctccaggttcgctttgcagaactccctaacaagaaccagatccaacccgaccaccgctccaagtcttgagggttcttgcattgggagagggggagatgagcggcccaatgcaacgctcgtcgcagccacagtttatctctagcgtcgagcggaacaatcaatcgaatggtcctggcactcctcttattgacagcatagatgttgatcagattgttattccagagaaaaatagttggaagaacctattttcatacatagggcccggatttcttgtctctattgcgtatattgatcctggaaattttgagacagacctacaggctggagcacagtacaaatatgagcttctttggatcatacttattgcgtcatgtgctgctcttataattcaatcacttgcagctaggctaggagtcgtgactgggaagcacctggccgagcattgcagagctgaatatccaaaggctacaaatttcatattatggattcttgcggaactagctgtagttgcatgcgacattcctgaagtaattggaactgcttttgctttgaacatgctctttaaaatccctgtgtggtgtggtgttctgataactggactcagcactctgatgctactgttactacaacaatatggggtccgtaaactggaatttctgatagctattctggtgtcattaatagcaacttgtttcttagttgagcttgggtattctaaaccaaattcttcagaagttgtgaggggcctttttgttcctgaacttaaagggaatggagccacaggtcttgctatctcactacttggtgctatggtgatgccgcataatctttttctccactcagcattggtactatcaagaaaagtgccacggtcagttcatgggatcaaagaggcatgtagattctatatgattgaaagtgcatttgccctcacgatagcgttcctcattaacatatctatcatatctgttagtggtgctgtctgcgggtcagataatttgagtcctgaagaccagatgaattgcagtgatcttgatcttaacaaagcttcgtttttgttaaagaatgtcctcggaaactggagctcaaagttatttgcagtagccttgttggcgtctggccagagttctacaattacaggaacttatgcgggacaatatgtcatgcaggggtttctagatcttcggatgacaccctggatacggaaccttctaactaggtccttggcaattctgccaagtctgattgtttcgataattggaggttcctcagcagctggacagttgattatcattgcatcgatgatactgtcatttgagcttccttttgctctagttccactcctaaaattcacaagcagcaggacaaaaatggggcagcacacaaattcaaaagccatttctgtgataacatggggaattggttcgtttatcgttgtcatcaacacctacttcctgataacaagctttgtcaagctgcttctccacaacggtctatcgactgtatcccaagtattctccgggatattcggtttcctggggatgctcatatacatggctgcaattctctacctcgttttccggaagaacaggaaagctaccctgccattgctggagggcgattcgacggtccgcatagtaggtcgcgacacggccactgaaggagaaggttctcttggccatctgccccgggaggacatctccagcatgcagcttcctcagcagcgaactgcttctgatctcgattagaaagatggcatacaaatactcaaatcaatcaccaaagaaatataccactgatgataatcatgcagctagtagctacctacatagcccaaagagttagccagctgatccctcaggtattcacctggatcatcctagtgaatactgcatactactaattccacatatatagtgacaataattttgtcttgatatctggtactgccgattgtacacgatggttagctaactgtgatcctgtgacaccaaagcttcttacttagaatcttatacatttcg

SEQ ID NO: 20253 - DNA, 2941 bp, Oryza sativa
  ref <308>: DATABASE ACCESSION NUMBER: AK070575
  ref <309>: DATABASE ENTRY DATE: 2001-12-06
tgataacccgttccgttccattcctgtctcctcgtgatctctacctctcgacggaatcgcgcgccgcgctctcgcgacgccgccgccgccgatcgatcgatggacgccgaggccggcgtcggcggcgccgaccagctgccgtggaggcaacactacaggaatttactgcttttagcataccagagttttggtgttgtttatggggacctaagcacatcacctctttacgtttataaaagtacattctcaggaagactacgtcgatatcaagatgagcaaacagtctttggtgttctttccttgatattttggaccttcacacttattcctttgctgaagtatgtcactattgtattaagtgctgatgacaatggtgaaggtgggccgtttgctctttattcactgctttgcaggcatgcgaaacttagttttcttccaaatcaacaatcagcagatgaagagctatcgacatactacagaaatggttttacttcacgtcatggatctttaccttggctaagaaggttcatggagaagcacaagaatgccagaaccgtgcttctcctcatagttctgtgcggtgctagcatgatgattggtgatggtatccttactccagcaatctcagttctgtcatctatgtctggattgaaagttcgagctactggtttacatgatcgttctgttgtactcctttcatgcattgtgttggttggtctatttgcattgcaacaccgaggtactcagaaggtagcgttcatgtttgcaccaattgtcgtcatctggctcttttgcattggtggaattggtttatacaacataatacattggaacccaaggatataccaagctctctctccatattatattgttaagttctttaggacgacaggtaaagatggttggattgctctaggaggcatacttctttctatgacaggctgtgaagctatgtttgccgaccttggtcacttcacgagtgcatctgtcaggctagcttttatcaccatcatatacccatgtcttatattacaatatatgggtcaggcggcatttctgtcaaaagatatccttgacatgcccacaggtttttatgattctatcccaggacctatattttggcctgtgtttgtggtggccactctcgctgctgttgttggtagccaagctgtcatttcagcaacattctctattgtgaagcagtgccattcgttgggatgtttccctcgagtgaaggttgtccacacatcaaggtggatctatggacagatatacattcctgaaataaattggatccttatggtgctctgtgtagctgtcacagttgcattccgtgatattacacttattggtaatgcctatggtgttgcgtgcatgactgttatgtttgtcactacattcttgatggcattgatcatgatcttcgtttggcaaaagaacataatatttgctctatctttctttttattattcggatccgttgaagttgtttatctctcctcatccctcatgaaggttactcagggaggatgggtgccgcttgtgcttgctttaatattcatgtctgtcatgtatatttggcactatgggacaaggaagaagtaccagtatgatcttcagaataaggtatcaatgagatatatcctgtccctgggtccaagccttgacgtagttcgtgtcccaggaattggtctgatttacacagaactggtgactggtgtacccaacatcttcacacatttcactactaatctccctgcctttcatgaagtcctagtctttctttgtgtcaagtcagtaccagtaccatatgtgtcgccagatgaacgataccttgtgggcaggattggacctagagcatatcggatgtaccgctgcattgttaggtatggttacaaagatgttcagagagatgatgacaattttgagaacatgttagttatgaacattgggaagttcattatgatggaagctgaggatgcatcttcttcagcaagttatgatactgctaatgaaggacgaatggccgtcataacaacatctgatgactatgactctccactagctgtgagagattccaatgacctagctgactccatgacgatgaggagcactaaatcagagagtcttcgaagcttgcaatcctcttatgagcaggaatcacctaatgtgagccggaggcgacgtgttcgctttgagctgccagaggaggatgacatggatcaacaggttaaagatgagctgttagcacttgtggaggcaaaacatacaggggtaacctacgtcatggggcatgtctatatcaaagctaggaagaactctagtttttttaagagatttgcaattgatgttggctactctttcctccggaagaactgcagaggtccatcggtcacactgcacattccacatattagtctgatagaagttggaatggcgtaccaagtgtagcgcgatgctcatcgcaggtcacgacgtcacgtggatacccggtagcaacaaatcatgtgctacctgtggccgcctttttggagtcgaggctttgattcctatgctttatccatgcgttttcagtttcagttggtacagatgaagaggctctctatgttaatatgatcatttagctcaaataaagcatcagatctaatgatcgtagtttgctcttcccttttggtatatttacatgcatgctctgtaatttttatgggagctatgtaatggaaatatgcgtccccgtttttattgcagctatgtaatggaaatatgcgttctcgtagctgatatatcccaatttttgttaggaagcgattaccacatatattctttcatgtatgaatttcttatggaacagaacatctgtagatatacagtgcctcgtggaatttctctgcaaataaaccagatactagataacatcagtatgatttcctttttcatttgg

SEQ ID NO: 20254 - DNA, 1581 bp, Oryza sativa
  ref <308>: DATABASE ACCESSION NUMBER: AK070576
  ref <309>: DATABASE ENTRY DATE: 2001-12-06
ggcgctcttgtacaccaattcacacacacattttggatctcgacacatctctgtgccccttgccactccgatcgatcgaaccggtcgccatgccacaggagagccgcggcagctccggcaaggcgccggtgacggtgacggtgacggctgcgggggcgagcagcagcggcgagtgctcgacgccgcccttcaggctaaacgtccacgctcccgagttcgtgccgaggtcgccggccgccagcccgatggccgcggccgccgccggctactactcgccgttcttgcagctgccgggcagcagcattgggctcggcgcggactggagcatcttcgccgacccagatccgaccttcttcctgccggactttggacacgccaagatcggcggcggcaatgggcagcccaagggggcaagtccggccgacattgcacagaagatcatcaagcaggtcgagtaccaattcagtgacacgaatttggtcgcaaacgatttcttgatgaagatcatgaacaaggatcctgagtgctatgttcctatgtctgtcatttcatcctggaagaaaatcaaggctatgggggtgaccaaccaactgctagtgaatgctctaagaacatcctcaaagctcgttgtgagtgacgacggtaagaaggtgcgacgagcacagccattcaccgagcgacacaaagaagaattgcagtctcgaatggtcatcgcggagaatttgcctgaggattcaaccaggaacagcctcgagaagatcttcggcatcataggaagcgtgaagaacatcaggatatgccacccgcaagagcctagctccgcgagatcttccaagtctgacgcgctaatcagtaacaagttgcacgcgcttatagagtatgagacctcgcagcaagctgatcgggcagttgataagctcaacgacgagcgcaactggagaaaggggctccgcgttcgcccggtgctacgtcgatcgcccaaatcagcgatgcgattgaagcggccggacttcgaccacctcatgatctccgacgacgatcactcgccgcaatcccaggcgtcgtcggattcgccaatggcggaccacttgcctgaccatcaccaggaagatcagcacggtaagaagtcgtgggggagagggcggggaagcaggccgcacgctgccgccggcggggcgccgcaagccgccgccgccgcggccgggcatttggactccctgatgatgatgagcccccgccacgcgccgcaggggccgaggatgcccgacggaacgcgagggttcaccatggggcgcgggaggccgtcgccggctgccgtcctccggagctcgccggcccgcgcagtcgccgctcctgctccggcggctgtgatgatctaatggtggtggtgtttttagcgcgcttgttcgttagcaagtggttgagttatttctgcaatttttcaggtccggaataaattttgaattcggaattagtaaataccaagttgtaatatcgaccttttggattgggtctagtagtaattattttctcactatgtaacaattttaaattttaatataactaaaaagaaaactcgcc

SEQ ID NO: 20255 - DNA, 1507 bp, Oryza sativa
  ref <308>: DATABASE ACCESSION NUMBER: AK070577
  ref <309>: DATABASE ENTRY DATE: 2001-12-06
gcgttcatcagttgcagttcagagttgcccactgctactttactttgcagctattttgcttctgcttcttcttgttcttgttgctgttggtaatactgcgagagaaattaatcagtagagtgttcatctactatcaatttttgatcgaggagagatggcgggaacggcgaactgcatcgacatcctcatcgccatcatcctcccgcccctcggcgtcttcctcaagttcggatgcggggtaattatggagtacctaattaaattactctctgttaccttagtttcttccatgccttttgcttaatttggtcgatcgatttgctcttgctaattaacttgcacatatatatgcagcatgagttctggatctgcctgttgctcaccttcctcggctacatccccggcatcatctacgccatctacgccatcaccaagtaattcatcattagttactacatcatcaaccaaatcctcaaggtgaagtagtgaaatcgaattccctaatctacctcctcctagctaattcatcaaaacttcacttaatatttttccacacatatcaatctaaagtttcctttgttttctggatgtatgtatgcagggatgggctccaaaccgcttcatctatcttctcgattgccgtgtgcttgttggaatttggaaatgatatatgcatccaaaattcagtcctgagtgctccaattcttgtcatctagtcattttcaatgtccccccagtctcttcctctaatgtttgatgatatgtagaatctcttgctgttaatctgttgctttcgtgtgaataagctcccctcttatgtatatctatctatgacttgttttactagtaaacttgattattgagagcttgagacttgcttccctgtctgtctgtatatcttgttccaacactggaactgaatcaataattgtgcctgcactgctcaagagtgctctgaatgtagtcataattgcagataattagtacaattatctcactcaaatccctttaataaaaaggagcatcaacttggatcataaagttgcactcatcgctatctcttttttcccctttatccattgaaaaaaccttttgtttttctttttgggatttggttcgcgtcactaaaatagccaaataatatcaggtttgttggaacgtgattatcttcagagtgattgaggcagaattcaagtgggccctctcgcttacatggacttttatgggctgccatatttttctcttcccgtgggccccttctttggatgggccgaaattctcctcacggggggttgaggttgacggcccaggttagcttttcttcaggtttattgaaagggccgacgcttcagatgcagtagtttcagactttcagagctgcactactggtacaagatgtctcttgtgtctgatttagctgaaatttcttcggtaaatttatgttgggtcggaccggctattgtgtattcttgctaagttgcgattaaattgaatttcgtgtgtttgc

SEQ ID NO: 20256 - DNA, 1367 bp, Oryza sativa
  ref <308>: DATABASE ACCESSION NUMBER: AK070578
  ref <309>: DATABASE ENTRY DATE: 2001-12-06
gtcttctcttctcttgggaacctccacttgtgctcgcctcctcgtcctcctcctcctcctccccctcccggtaaggcggacgaccgagctgaggctgagctagggctagggcacccacctcctccccttccggtagagcattgtggtgagatagcatacatacttctttcaaggagcaagtatgtagtaagttaagtatcctggatggctgctggtcggggcattaaccagctcctacggaggacactccataatcagtcctcaggctcatctctgctatcctcgttccggataaagcatgaagaatcctccgctggactgagagcattggctcttcttggagttggtgcttctggtcttttaagctttgctacaatagcttctgcagatgaagctgagcatggtttggcagcagctgaatatccctggccacatgctggcattcttagctcttatgaccatgcatctattcggcgtggacatcaagtttatacacaagtgtgtgcctcttgccattccatgtcattaatttcgtaccgagatttggttggtgtggcctacactgaagaagaaacaaaggctatggctgctgagattgaggtggttgatggtcctaatgatgagggtgaaatgttcacacgtcctggtaagttaagtgaccggttcccacaaccatatccaaatgagcaagcagcccgttttgcaaatggtggggcatacccaccagatctcagtcttatcacgaaggcaaggcacaatggccagaactatgtgtttgctcttcttactggttaccgtgatccacctgccggtgttcagatccgtgagggtttgcattacaatccctacttccctggtggtgccatagctatgcccaagatgcttatagatggagctgttgaatatgaagatggtactcctgccactgaagcccagatgggcaaggatgtcgtttcgttcttgtcatgggcagctgaacctgagatggaagagaggaaactgatgggagtgaaatggatcttcctactgtcacttgcacttctccaagccgcatactaccgtcgcatgaggtggtccgtcctgaagtcacgcaagctggtccttgatgttgtcaactgagggaccactgtttcttactttcattaaaatgttttgagcatttaagcggaagcatttcaaataatgagtatgatgtacattctgccactggggtttcccatgcctagaattttctgttttcttcctctgctgcaaaagcattttcttcatgggagcacttgcaatttttgtcaatgttacctgagtggtaccagcaagcttctaacagaactgctaaagttcataaatctttatgttttgaactgtgc

SEQ ID NO: 20257 - DNA, 1175 bp, Oryza sativa
  ref <308>: DATABASE ACCESSION NUMBER: AK070579
  ref <309>: DATABASE ENTRY DATE: 2001-12-06
tggtcaaaagaagcaacaactgcagaagtagagggtgttctaacacaaagcggaacttctcccgattacaaggttggcaacagaataacagacatcagccaaaaaatggttgaagaactaaaggagtctgtgaaagaagagcaggctgagaaaaaggaggaggcagccaaggagaagccagatgaaccacaagagatcgtactgaaagtcgacatgcactgcgaaggatgtgcaaagaaggtcgagaaatccctcttgagatttgaaggagtcgaaaacgtcaaggctgacagtcgatcgaagacggttgtggtgaaaagcagggccgcagatccctcaaaggtctgcgagagggttcagaggaagacaaagaaaagagttgagctgattttccctcttcctccacctccagaagaggagaagaaagaggaggctccagcaccacctccagaagaaaagaaagaggagccaccgaagacaataactgtcatcttgaaggtccagatgcactgcgacgcttgtgcgcagattctgcaaaagcgtataagcaggacagaaggtgtagaatcggtcgagactgatctcctcaacggcctagtggtcgtcaaaggggtgatggatccggctgtgctcatcgaaagcatccagcggaagacgcggaggccggcagtcatcgtcgaagaggtgaagccgcgggaggaggagaagaaggcagagggggaagagaagaagccagatgaggataaggccgacggcatcgaagagatcaagaagtatgacttctggccgcccgtccagtactatgtcgagtacgtctacccatacccgctaccgccgccaccgacggcactggtgtccgaggagttcagtgacgagaacccgaacgcttgcaccgtcgcgtgataccatctgaagctgttcttttgcttagacggtggtttctatgctagaaatgcatgctgatatggtaataaaatgagtggttttgagaacttgtacaagattgtgttattaagtatcatgaaaagtgagctcgcattgctcaattgactagctctcctatggtacaacctatttacccgggtttagatttgacacttgtgctcgtatttctcattagaaatatggtcataatttggtatattttaatatagaaaaaaaagataatacacacg

SEQ ID NO: 20258 - DNA, 1320 bp, Oryza sativa
  ref <308>: DATABASE ACCESSION NUMBER: AK070580
  ref <309>: DATABASE ENTRY DATE: 2001-12-06
caacccctccactttctcttctcgcgccggcgccatgacgctcctcgccgccatcaccaatccctccgccgccgccgccgccgccgccgtcgcggcgaaccccatcgtcctcactcccggcgccgctccgccaccgccgacctcctccgcgctccccacccagatcccgccctccgactggtccctctcccccgccgaccccgccctcgccaccgccgcctccttcctctccacctccctctcctccacctccgtctccctcccgcgcttccgctccctcctcgcctccttcctcaccaccctctccaactcgctctccctccccgccccctcccccaacctcccacaagccatccgctccgtctccccctacttccccgccgccctcgcctcccccgtcgcctcccgagcggcgagcctcgctgagtacgacgtcctcctcgccctcgccgagtgcggcctcctccgccaccccccgccgagcctcctttcctcgctctccgaggccgaccgccccgagctcgtctgcgccgtggtccgacaggccgccgacctccgctcctccgagctgctcgcgacgctccgctgcttcctctcgccggcctccgatgccgcctacgacgccatgatgagtgtcaagaaccggtggaaggaagccgcggtgctagcggtcaacaggtgcaaggagaagggcgcggggaagaaggtcgatgccatggcgaggcaggcggcgctgctgctcatgatgggatacgatgggttcacctcaccggaggtgtgcctgcattacctgtttgcgtctgagaatgtggactctgtggtcttcggcgcagccgtatcggagctggatggtggggaggtggtcaggctgatgaagtacctcaccaagtggatagggaaataccagaggttcccagaggcgcaggcatgcccagaggctgtgggaatgccagggctggagctgtgtgacattgtgccctcatttcgggtggtggctggggcgctaggattggtgtttgaccagcacttctcgcacctagcgctgaatgcagagttgaaggaggatttgaaggccgcggagatgatggtgaaacagctggccacagaagctgaatctgcagggcctatcctggacttgcttcgacgtatgcagcaagatgtgtgagacactaaaatgtgcccctcaattttttttactgatcttagctgttatgctcatgtccgagaattttgattgttttactgcattgcagtgatgagttatgtgctctattatctaatatcatagtatgataatggtacatgttctgtttggaaccc

SEQ ID NO: 20259 - DNA, 1109 bp, Oryza sativa
  ref <308>: DATABASE ACCESSION NUMBER: AK070581
  ref <309>: DATABASE ENTRY DATE: 2001-12-06
gatccatgcatcgcctccattattcatgcttcgattctccatgctttcctctactgctcattggtaacattcggcaaatttgacagatgggtatattggtcatcttggtggacctgcaatgctgccgctgcgatgccaagatcaggaaggtcctgggctgccttgaagaggagtactgcatcgagaaggtggagtacgacgtgaagaacaacagggtgatcgtgcgcgggaagttcgacccggagaagctgtgcaagaagatctggtgcaaggccggcaagatcatcaaggagatcctcatcgtcgacgtctggccgccgccgctgccgcagccgccgccgccgtgcaagccgccgccgtgcgagaagcctccggaggactgcaagcccaagccctgccattgctgcagctgcgagaagcccaagcccaagcccaagccctgccactgcgagaagcccaagccctgtcactgcgagaagcccaagccatgcgagaagccgccgccgtgcaagccggaggagccgccgaagccgccgccggagaagccgccgccgaagccggagtgcaagctggtgccgtacccttacccggtgccgtacccgtacgccgggcagtggtgctgcccaaagcctgagccgccgaagccgccgccggagccaccgaaggagccggagccgccgaagccgtgcgggtgctcgcacgccttcgtgtgcgtctgcaagccggcgccgccgccgccgccgccgtgcgggtgctcggggggccacgggaactgcggctgcggcatcaggccgtggccgccgcaggtgtggccgccgccgcccgtctgcccgccgccgccgtggtgctacaccgaggacaacgccaacgcctgctccatcatgtgatggccggccggcggtcggcgtcgatcacgatcatctctgctgcttaatttccttgcttgctactacctctgctcctttccttgcctcggaaatcggaataaattaaacacgaggctgatcgatgtgtttgtaattaatccatggtgtttgtgttgtgtgctgtgtgggctgtataataattaattacagtatgttcatgtaaatttgtttgtttgtttgttt

SEQ ID NO: 20260 - DNA, 1716 bp, Oryza sativa
  ref <308>: DATABASE ACCESSION NUMBER: AK070582
  ref <309>: DATABASE ENTRY DATE: 2001-12-06
ggaaagaccaaaaaggtataaaaaataaataaaaaaaataacgccgcacagaatcgaagcaaaaaccccaattcctccggctcccacgccatcttccacttcccgatcgccgcctgctctgctcgccggcgacggcgagccttgccgttgcggcgttgccggagaccacccaagcgagcggatacctctcatcgccgggccgcctcctctagaggacgccgccgcgtcgtaaccgcgcacagcctgtgctccccgcagccggacacgagcggctgctgctgctcgatctcccgccggcgacgagttggtggtcggttccctgctcttcctccccctctcaccgaccgttcatcaggtcatcgcctctaagcagatttcaagtcttgcgtgatggaagctacccattcttcatcctgggcagacctccagccagagctcctgggtcttgtcctcggacgccttccctccttagctgatcgtgttcggctaagagcagtctgtcgcccatggcgctccaatgctcggttgcagcccgttcccctccactcccttggctcactctcctccatgggaccttcctcagcatctctgatggtaaaattcaccgcatgcctttaccaaatgatgcctcttgccatggctccattgacaactggctcttcctcagggatagtaatggtgggtgctcactgatgaaccttttctccaaggttacattacatcttcctaagctagccagcatttggcatgataagatggaacgtgcctaccgtggatctggtatacttctctgcaacgaatatactctactttcctataagtttgcagttcccttgcccttggactcatcaccagttccccttgtcgctgtgctgatcaatgacccccttcatgtgagcgccgcttgtatttgctatcaacccattgctactgattcattcatatctcatgatttttcactcgagaacaagacctatgatatcgccttctgtggtgggagctgtatgcactgagtgcttctgggaagctctacatccttgagatcagtgagggccatgaaggaaaaccagaggtttcatgcattaattccatggttgacttggcagaagaaccggtaaccgaatcccatttccaaccttgtcgtgagagtcatccccggatgctgtggcgatatctagttgaatctggtggaagattgttgcaggtgattcggcttttcggttacccattccctctgtcacatgatgatgtccttgaagatccgcgtactctttcatttgtggtatatgaggcagatttgagcaatggctctcgcatgtggagaagggtagaatctttgggaggccaagctctctttgttggcacacatggctccaagtctgtccctgctgtggaatgtggagctcaggaggactgcatctacttcatatctgactacaaccggccttattctgcaaatcctcttggcgactctggcatctacaacatgagaaacgagatgataacgccgttggtgcgtttggtaagtggtaatcgtcactctggcgtctactaccagtggcgacatccgagatggttcttccctgcagatggtgctatataatcagcccctctgcatggccctctttgtgggtttctctcatatgcacatgcaacatgtaaactggtggatgatgattaatgttttgttacttgttgcgtcctgattgaatggtc

SEQ ID NO: 20261 - DNA, 4057 bp, Oryza sativa
  ref <308>: DATABASE ACCESSION NUMBER: AK070583
  ref <309>: DATABASE ENTRY DATE: 2001-12-06
ggtctcctgctccttcctcttcctcggcagcttcgcctcctccccaattccaccgccccgcgcgtgcggcgagacctcggcgccctctgcccctaattcccgggccccgtaggcacggcgtgtacggcctcttgccctagccttctccccccttttcggcatcctcgctcgcgccgccggcgagcaggttttgaggggcgcggcggtcgtcctccgtctcgggttgagtcgaattgaaggtacagggaatgactggctgtagaagagtccaagcctccggctatcagctttactgccctgcttggagttgcctggatagctggattgcaagcttgtgtccacgttaaagtcttgttcttttcgagtatccaaacatgggctggaaaaggaagacacatcatggaggatcatgtcatcaacaacaatcctgtccttcacatggtaatgaattgtctgcgatagatgaggaggtttcccatcttacgaggcttaaatccgagccaagtgagaggactcgtgcatcccttcatgctggaaaaaagaggcatatctcaacattcaagttgttgtcagggagagaatccaactgcttagggattggtaggttctcttcagctgattgctcttatgctcttcgtaaacacctaccagtaaaaggcccatggtgtgttgatgacatggacagtgaagcctacatatctcaattctccgcagatggttcccttctcattgggtagccatatcagaatctacaatgctgagaaaaagtggacgatacataaggacataacctgcaaaaagctacgttggacagtttcagatattgctctttcacctgatcaacgatacctagcttattccagtctgtcacctatcgttcatatggtagatatccagaatggcatgagagaatcacatgccaatattacgcaagttcacgaaggcttggagttttcgaatgatgatgatgggttctcctttgccatattttctgttgagttttcaaaagatggccgagaacttgttgttggaaacaacaatgaatcaatatgtatttacgatattggatcaaacaaagtaacagaacgcattcacgctcattcggctgatgtcaatgcagtcacctttgctgatgaaggtagtgatgttttatactctggaagtgatgatagcctctgtaaggtctgggataggcgctgcaacaagagaggaaaacaagttggtgttttgacaggtcatttagatgggattacatttattgatagccgtggagatgggcattattttatttcaaattgcaaggatcaaactattaaactatgggacatcaggaaaatgtcgtccactgtgaaagactgcacaccaaaagcatatgaatgggattacagatggatgacatatccctcagaagcccgatatttcaagcatccatatgacagtccctgtcaacatttagagggcattcagtgttacgtacactaattcgttgctatttttccccaatacacaggttagtttagatatgctaaataatttctctgatatatgttactgatgtgtcattggtctcgagattttactccaaatactggaattttgtgttgttccataaccatgggatttgatctttagtaaataaataaattcgtaggcaggattagttctggcttgttgttttttctcctctctgcaatatcacatccccttaaatctggcttgagtgcaaattcccatagcctatccttgataccatggtacttccttattttaccctgtcaagtacctcctcagttacactattgaaattgacttgagctgaaaatggatgcaaaggcaaagctaacatggccatttagatggatgatcgtcacatgatgtacaccagctctgtgcctcttgcacaaaacagtctaaccaatgcacctggaaggctaggatctaccaagttttttttttttgaccaggaaaactgccagggctttgcccagcagtgtaatttaaataaagaaaatatttacaaggttacaaagattacatgcggttcacacagagatactataaggtttgtacccaattaaaaatagtttgctttaaaggatcattcattctacacatatgcagaagaacttctttgatgaaaagagatctccatgcctggaaagagggttgaatgttctgaaatatgaagccatttctttgtttccagatgtgccaagctgccaaaaagaaaatttccaggaaacccttctgagaaaatttgattcttgctagggagatcatttggaaaaactccaaattgttattccactcaattcccaggtattgccaacagctgatgctgaaaggacataaaaagaagaggtgtagccttgtctctctgcagttcgcattgcacaaaacacacgtgagatcatcatcttctttggcacaatgtcttctatccagcatatctcttttattaagtctatcacaaaacattagccaggcaaagactttgatcttcatgacacattttgttttccatagccaaatcatgggtctggggggttgcaatgcagaataatttagcttatagaatttcttagctgtgtacttatctgagccccagataaaattccaagcatcccccatccctgattgtaaattcaaactgtccagaaccccctgaagttgcaagaattccgagtaagcctcatccgagaggggtagagcaaaagaatcttctaggggtcttgaacacatggccttgactgaatcagacttatacatagtcacaaaaaagagattggggtagctggtgcatttaaaatcatcattccatagatcattccagaaaagggcagttcttcctgtcctgatttcacattttgctatcccctgaatatgtctacaagagttgtgatgtccctccaccaaaaagaacccttattcatcgtcaggtgtggaactttagagacatagtatgattgtgagattaatttcacccatggtaaatcagcaccattatagaacttgatcatatgctttagaagaagggctgtgttttgaactctcagattgatcactcctaagcctcctttctccttaggcatgcacaccctatcccaggaagctagagatttccttgtcgaagaagggttattacctctccacaggcaattcttacgagctgtgtcaatggccttgatgactgtaactggtagctgcaatgaggacatgtaataggttgcaatgaggatctaccaagttgacctttcaacctttgacctgactggtaccacatccaattcagttctcttagatttatggtgcaatccatgggagtaaaaggctttttctgggggcctatgcgtctaactcttgtgtttttattattagttaatactgtttctgattcttctctttttgcagcacgggtcagaggtatatatatacaggatccagtgaccaatgtgtatatatttatgatgtggctactggaaaaattgttgaaaaactcagatggcatggatcaataatcagagattgttcctggcacccatactttccaacgcttgttagctcttcttgggatggctatctagtccggtgggaagcaacagaggacgacaaggacccctccatgctcaagaccggaaagcaaagaatgcatccagagggatacacattttcgtttgtgttttagaaattcagcagacggcagggtcctcaatgcttggaagatgtattcacgtcgatgctactgtgtcggattagtcattttctctgctttctggttcaagtagcaacgtattcagccgtatagaaattcaccgaatcaaagtacaacattacaagttacaaaggtagagtagttcaatcagtcatttacaaatgtatgtctttgcttctctttttctcccatttgggatttcgacggccttgactagatagatattggtgacgggcaccttgctcgctagtcaggcttggagaatgctccaaaatttgggtacaaatatgtacagttcaaaagatgaataaagtgaggaatcttcaatgcattgtgtttttgttc

SEQ ID NO: 20262 - DNA, 3885 bp, Oryza sativa
  ref <308>: DATABASE ACCESSION NUMBER: AK070584
  ref <309>: DATABASE ENTRY DATE: 2001-12-06
gtggagcttcacatcacaagtcttccttccttccttccttgtcgtctgctagttactccatgtcacactagtctcacacaggagcagcaacaagaagaggaagaataggtggaggaggaggaaggccgttcttggtgcttgtgcagcagcttcttgcactcacacttgttctccagtgaggccattgatgttcctgatgctcacacagtcacaagatcccctccctctgggctggttcattcattcagagaagatttgctgagatgttcttgttggtgtgcttgagctggtagcaagggcgccactggttggtggctccacctccctgcattcctggaatttcttgggatttctcctcctcttgaggcggtggtggttgctgagatgccggccaagtacttgcagatgctcggggaggagaggcggccggagcttcaccggcagcaggcggggtgcgtcaccgggatcctgcaggcgttcgaccgccggtatcccctcgccgcccaccattcccacaatcgccttcttcccccagcccatgcactgtcaagcagtccaagtgttggggaagagcgaacaagatattcatctcagattgttcttgacaagaacatgagtaaaagctggatcgataatcaaagagcaccattaacagtggagttgtcgcaaggatcttattcatcgtcgtcttgttcttcgtcgtcctcccttgatggaaacagatcaggacagcaagacctatcctccactgatcgaatgctatttccggagaagccattcaaaagctcaccgaagctcaagagctcttctgacagtgactgtggagtggattactaccttgatgatgcccttgccaagctctcagcccaacctagctacccaactcttggtataagaaatctcgtaaaggattcaatatatagagatactcgtgatttttcaatcagaactttcaccaaagaggcagaaaaagatcacctattcaattgtggagatccgcctagaatcttgaatgagcctcctaacagtgctatccaagagaaaaacaaaggaaccatggacattgacgaatccctccgagttttagccaagctcaggaatccatctgaatcagtccagcaaccaaggctatcatatgatgctcctcgcttctcgtgtgaaggaagggaatcagcgtcaaaacttagggaggtgccaagattgtcactagacataaaggaaagccctcttaggaaccgcgaaatcgacgtaaggccaaagccaagcatgactgatgaagacaggagaagcagcatcagtaaagattacagtccacccttggagacccagcaagaacacaatgcctgtaaacgtctccctagcgttgttgcgaaactcatggggttggaagacttgccagagcataaggacaatactgcgatatcttcacaggtatccaaatcagttacagagaggagtgaagaacccaccatgctgaggcctttgagcctttcttcccaaaatgaggctactcctaggcagcagaggaatctagatgcaacaatcaagaatgttcctaactctaagttccctgtggaaactgcaccttggaaacagcaggagaagattgtgctacctagaaaattgccgaagggatcaaagggagctcatggaaaagagcaacatgctgcatcagtttacagtgagatagagaaacggctcaaggaccttgattttcagcaatcgaacaaggatctcagggcactcaagcagatcctggactcgatgcaagcgaaagggttgttgcagaacaagaaacgtgaggatccatcgatgccgaagatatatgatggagaccatgataacggagatgtgactgatgtaaacctgagactgaatagcaccagcaacaccaaacaggcacctgaaggaaccccatcatttacaacggaagaagatagcactacagaaagaagcttcaaatcacccattgtaatcatgaagcctgcaaaatctgcagacctgttaagtgatgtaaccgaggattccgctgttggtccattaggcggtttatcagagctaccgcagctgagaacagccaatagtgctgataaaaggaaaagctcaaagaaggtcactagggaagctgtggagcaacataccaaatctagttcaagggcacctacacctcaacaccttgcttcttttgacaagagagcaaatggaaggaatgaagaaattagcaggaaacagaagtctacttcacagctgatgactgagaactcagctaggagacagcagatgcaaagagaaaataatggaagcttgctaaagcataaaaattccactagccctagagtacaacagaaaaaacctgattcagagcggagggccagaccgccaattccctctcccgattcaagcaagaatcaaaggcaatctgtggaaaggagccatttggattcagtatcacccagaagtaaatttagaagaaaacctgctcaagcacaaggtgaagatttccatcaaaatggtgtaagtagaaggacaaggagcctgaaccaggaaggcaatgatatgtccgcaaggtcagatggtagcataagtgttgcatcagagctggatgtagaagtgacaagtacagacagatctgcagaagttaacattttgagatctcagcatggcactcaaacaccatcaggaaggaatcctcaaaaagtgaaaacctcttatgatgcaaacaaggacctgccatctatggatcctgcagcaactattactgagcggcctagtccagtctctgtattggactcttcgtttgatcaggaggaatttttccataccagcaagaccacaaattcatctaatgttgatgatgagcatcacccatcaccatcagaagagtcctgcaagccttctgaaaagaagtccacagagctccccacacaacccaagaacagcaatctcgcaaacatagccagcctccttaagaagctccagcaattgagcgtaaacaaggatgaggcacctcctgtcgatcacattgccttcttgtgcgagacgccaagcccagaccatcgctacgtatccgagattctactggcgtcagggcttctgatgaaagaccttggttcagggctgtcacaaatgcagctccacacatcaggctaccccatcaaccctgacctgttctttgttcttgagcaacgaaaatctgggtggacatccaaacctgaggggatccatcagagcaggagcaccacaaagccagatgatcccaagagagcgcaccggaagctaatgttcgaggcggtgaacgagcttctccttgacaagtttgagaaggaaaccacactcatcactggagtagcagcaagggatccagtgatgagcagcgggcagcagctggtgaagatgatatgctccggcatcgaatgcctgaagacggagagatcgcgcatgtgccaagaagacagcagcgtgatccctgacgcagagatcctcaacaggttggaagggtggtcgccgagcttcatcaggagggagcttccaggcatggtgctggagatcgagaggtcgatattcaaggagctcgtcgacgaggtggtgcgcggcgagtccgccgacggtcagccggcgaaggccggaaggcgcagaaggaggctcttcgcttgacagtcactagtgatggctgctgacttgcattggagtgcgaagcgtgaagcgagtgtaactgtgatactgtacctagtagtagcatgtccattgttgaggtttgatttgtccagagagagagagagagagagaggaggaagagcaatgcagaaacctgaagtaggaatgcaatgtttgaggcacttgcctagttgttgttctgcgataaatattataagtgaaattataacc

SEQ ID NO: 20263 - DNA, 1159 bp, Oryza sativa
  ref <308>: DATABASE ACCESSION NUMBER: AK070585
  ref <309>: DATABASE ENTRY DATE: 2001-12-06
gatgatcacatcataccttcttcctaaccttgcaaaattagggaacaattaattcagctactagtagctgaatttggagctagctaattaacaggatgttcagagctgcgcagctcctcctcagggagacgaacagagctcttggggcagcaacttcgcctgcaggcttcgtcagtggcttctccacggcttccaactctgcgcagaggttggctggcaaggtggctgtcataaccggtggagctagcggcatcggcaaagcgacagccaaggagttcatcgagaatggcgccaaggtcatcatggccgatgtccaggatgacctcggccactccaccgcagcggagctcggcccggacgcctcgtacacgcgctgcgacgtcaccgacgaggcacaggtcgcggcggccgtcgacctcgccgtgaagcggcacggccacctcgacatcctctacaacaacgccggtgtcatgggcgccatgccgcaggacgacatggcgtccgtcgacctcgccaacttcgaccgcatgatggcgatcaacgcccgggcggcgcttgtcggcatcaagcacgccgcgcgcgtcatgtcgccccgccgcagcggcgtcatcctctgcacggccagcgacacgggcgtcatgcccatgcccaacatcgccttgtacgccgtctccaaggcaaccaccatcgccatcgtgcgcgccgcggcggagccgctgtcgcgccacggcctgcgggtgaacgccatctcgccgcacggcaccaggacgccgatggcgatgcacgtgttatctcagatgtaccccggcgtaagcaaagatgatttggagaagatggcggacgccgccatggacgccggagaggtgatggaacctaagtacgtcgctagggcggcgctgtatttggcttcggacgaggctaagtatgtcaacgggcacaacctcgtcgttgacggcggcttcacgtcgcacaaaggatccgacacacgtttgaattagcgatgtgtccaactatagatggacaaatggaccgctcggcccgggcacgaccagacacggaccaatatgaattagtcacatgtgctcctcattggaatagtctgttgtacctccctcatctgtttgggttgtcttatatggctggattaagtcaattttgc

SEQ ID NO: 20264 - DNA, 798 bp, Oryza sativa
  ref <308>: DATABASE ACCESSION NUMBER: AK070586
  ref <309>: DATABASE ENTRY DATE: 2001-12-06
gcctttctcctctcttctcctctcctcccccgtctccgccgctcgcgatccccaccgccgccggcgacgcgcgcgcggcggtcgccgggcgttgtgtccgcgccgccccgacgagccggctcgtcgacggagacggtgcggctgttcctccgtactcgtcgcccgccacctcatcccgcggcgccgtctccctcgatcccctcgccaaagcgcgcaaggaaggaaggctctcccccgccaccgacgccgtccgtccagatctaaggttttgacacaatggggttattcaagggcagcttcacattcatggtgggaatgggatgtggtgtctatgtagctcagaactacaatgttccaaacatcaagaagcttttcaacacatatgttttcatggcaaagcacatcgaggaaacgtatcggaagccaaagaaagatgatgactgatgatttacacagattttcattttggtgcccctggaaatcaacgtgtaactaacatgatacagaaatatgatgttcatgaatggggaagtcggtaaagtcggttctgatcgtcggcaattgaactatggtggcttaaatgctttaccggtgaaccactgtttactactttactatactgcttttaggggggttgttagagagacagaagttgctgtccagatgacaatgactcccttttatcttttgtcggtgctacgaaaatgcacttgacctttttttggctgttgaaatgtgtaggactggaaatccaccactattatcatgtccatctgtatatgtcatgcttagattttc

SEQ ID NO: 20265 - DNA, 838 bp, Oryza sativa
  ref <308>: DATABASE ACCESSION NUMBER: AK070587
  ref <309>: DATABASE ENTRY DATE: 2001-12-06
ggctcactctgctgctctgcttctgcttgcctgtgctgtgctgtgtgtgtggccttcgctaccatccatggcggcgcgaggtctcgctgctctctcctccccggcgcgcgtcggcgcgagcgctacgccgtgctctgggaggcctgtccgtgtatcggctacgccggcagcgggcggctggcggcggcggcggcggtccatggtcgtgcgggccggcgggccgccgagcacgaacgcgctcatcctggcgttcgtcctgccgctctccctcttcgtcggcacgctcatcaccgccgcccgcgtcgccgacgacctcgacgagcgcttcctacgcgagatggagtccaacaaagcgataatggaagagaatgaggacttcgagcaagacggcggaggcgaagaagaggaggaggacgccgagcagccggcgccagtggagaaggagggagttcttgttgctgctgctccgcgcactagaaacaggccaaagagggaggtacagtagagtggaagagcagaaaaagcatctcggtttttcttgttccttatatgtgatcatcgccttgcaaatgcttccgttggattgacaaattatgcaatggatgcaagagccaattaatttagtcaatagtcataggcccaagcattcagaggttagagaaatgattggtgtacgtggcctgtagtttagaacatcagatggaggaatgtgcagccttaagacggctcagctcagctgtgcaggttacagctggagaggagtctgctactagaagaatcgtcctgagttcaaatctgctttgtttcagaatcgtatcaaataccgaaatactacttg

SEQ ID NO: 20266 - DNA, 1170 bp, Oryza sativa
  ref <308>: DATABASE ACCESSION NUMBER: AK070588
  ref <309>: DATABASE ENTRY DATE: 2001-12-06
gactcctcgtcccctcctccacttccacttccacactgctctccccctccccttcctcccgctccggcgaaggcgagcgcgcggatcggcgtgatggcggcggcggcgccctctcccccacccgtcgcggcgctggagcagatgagcaggaccaaaatgttcggcggccacaacctccgcttccgccaccacagcgccacgctcggctgccccatgaccttctccgtcttcctcccgccgtcgccggcatccgacctccccgtgctgtactggctctccggcctcacgtgcaacgacgagaacttcgtcaccaaggccggcgcgcagcgcgccgccgccgcccacggcatcgccctcgtcgcccccgacacctccccacgtgggcttaatatagagggagaggcagacagttgggattttggtgttggtgctggattctatttgaatgcaacaaatgaaaagtggaaaaattggcgcatgtatgactatgttgtgaaggagcttccaaaagttttaagtgacaactttgaacagctgaacacttcacgggcatctatttttgggcactcaatgggagggcacggtgcactaacaatctacttaaagaacactgataaatacaagtcggtgtctgcattctctccggttgtcaatccaatcaactgcccttggggtcagaaagcattctcaaactatttgggcccagctaaatcagattggaaggaatatgatgcaacctgcctgatcaagaagtgcaacaaaatttcaactcctattctgattgaccagggagaggatgacaaatttctggcaaagcagcttctacctcgcaactttgaggaggcgtgcaaggctgtgggagctcctttgactctccgcatgcaacctggatacgaccactcctacttttttattgctacattcattgatgatcacattgctcaccactctcaatttctgaagagtgcctgactaccaagccacatgtaattgaagcaatggagagacaggggaggctttcaatctttctacttactatgccctagcattatttctcagcccggacaatgtcaggtgcctttgatagcctgagtcgaacagtatctccagctggatataagatgaatgatttggttttgcaggctattcaagtacagtataattggatcc

SEQ ID NO: 20267 - DNA, 1346 bp, Oryza sativa
  ref <308>: DATABASE ACCESSION NUMBER: AK070589
  ref <309>: DATABASE ENTRY DATE: 2001-12-06
ggatgacaacaattagtgacggtttttcttttgtgacacatatagtgtaggtttacttccagcttcgtcgattaccagacggcaccggcgtcgcgcgagcgagcttgatcttgcgccttgtgcctgctagctgcttcggcggcggcggttatcttcttccgatctgtaacagccccgatcaagaaaggatccaacccacctaggaggactaacctgaacgtgctaatgagttcaaagctagtaacatcacctctgaaatccatggagcagggccatctagagcaacctctgcgcgatccgcaggcgccggcggagcagcatgacatggggttatctcccctgacgctcctcggcttcgccttcctgaccttcaactcgggaatggcagtgtacagatcagatagagacttggcaaccatcttcttcgtggtcttctcctacgttgacctcgtatcgctcttctacttcctccgattatttgagaagacgccgccggagtcgcctcgccgccaccacatcaagacggcggtgtggctcctgacgacgatgctcaccgccgtgttttcatataaagtggcggccatcatgcctttcccggttcaggtgctggtttgggccatggccgcagcaactgtgcttggagggttctacgcattcttcctccactccgatgaaaaaaagcctattgagggataggcaaaatacttgatagggctttctggctgtttggcatttgtcagacgccctgtgtgtggtaacatctcgatcaaattggaggtcgaaattaaatatatccggtgagaagagatcacgagatcgatcgctacctatatatcacagatagaaatcagagtcctatcgatattttcgccgagcatatataagtagtgctgtcgatggcgagcccaattcgtgctttataaaaacagaacaaaaaaaaaagaatatgagtttgtgtgcgtatcattttttctgggttaattgtattttgatcaatcagcatgtacctgtaaaatgaggtcgtgtagatcatgtgctaccgtactgtgtcctgtttttagtttttcctttttttcttcttccactgtttacatttctacttgtctgcgtctagtcactgtgtgctgttcacccagcacaaagtgagcaagcatgacactgtacccctcttttttttcattcttgaaccctaataagcaccggacacacatatttgcttgtaccacagtattgctagcaagatagatttgccaaatagccaatgtaccttgtgcacaccctttgtgtaaataaggaataattaactatttgccactcttacgagtggtgctaaattatttgctact

SEQ ID NO: 20268 - DNA, 2071 bp, Oryza sativa
  ref <308>: DATABASE ACCESSION NUMBER: AK070590
  ref <309>: DATABASE ENTRY DATE: 2001-12-06
gagaaggcacgggtccaaccgattacggggcacgcgcggcggcggcggcggagtgaccggcgcgacgccgcaggcctgcaatgtgggcattcctgatctccccgccgctccgggatgcccccccccctccgtcgccggtgccgttgagcgtgcttgccccgcggtgagattgtttggttcggccgcggctagggttcgggttgtttggcttggcatttttcttttgctctttggtggatcccaaataaatggctttttgtgagcaagcgtttggaaaaccatagccctgctggtgagatgtgattttcatgaattaggtttgccttgtacaaataaatggattacagtggtggttgaatatctcaacactaaatattagaaatgcatgacttacagaactggctttggcagtatgtaagattccaacaacgagagttgggaatgaaagaaggaagtgaccctgccaactactacaagattttgaagatctcttgaaagagcctaagaaattaccactgaaataaaatatgattatgccattccttgtggtcctggcactgcacctgtaaattctaatccttaccagcattgataactgcacaaagacaacattgaggaaatggcgcaccatatgttttttcctcaaaactgcaacacatgcttgctaactgtgttattgaactgggtgcaagccctttcaagttacctttagtcttagtgaagattgtggaagggtgggagtttcaaatgtctaatgaattcagttctgcagctttatcttattaagttcactattgtgttcttggatgacgtcttggtattacagtctttcaaggcacatgtgaaaaacttggagcatgtcctgaccacactgtggcaacatcaactctgtgttagacgcaagaaatgtagttttgcacagagaagactggagtaccttggtcatgttcttaagaaaaggtggccactaatatgcacaagacataagcaatgttgccctggctacaagatagaattgatatggagttgtgtggttgctagggctaatgggggcactgtcagctcttttgtttgtcaggcattattgaatcatctctgagccacaagctaatctcctcaaaggaaggtgttacattgagagtttggaacagagaagtagcttcagattttcaatgattgaaggacaatccagatttcataaggcttttgaagtcaatggaaacttgagatgatggtagaggttccattcacatgcaaagtgagcacctgatagcttacctggccaagtctctcaattcaatgcatcaaaagttgtctaagagagaatttctggcattgatcatggtcgtatactgctggagaccatacctacagaaagtggaatttgtaatcaggacctgcagccatgttatttataagaccatcagtttctgtatgacatgcccgcaaaacgcaatgacaaaacctaatgaattgcagttcatgatccagtgcaagaaggtcaagagaaaggaatgcagatcaatgccttggcttgtacttcctcatcacttacagtccaagctgtctcagaatgccaacagagtttgtcttcaggaggtaatcagttctgaacaattgtcctttgttttcttcaggaagatgttaaaactggtacataagtaacgatgaggactaacacatctacaaccctttcaagctaccaatgggtaggtcaggatgatttgggaggagcgagaaacctgaaattattatgtctctttgatgaaatatctgggttgaaattcaattttcataagatttagacgttttgtttctgaagttctgttgagaagcaagatagctctttcaacgcctcatggaccaaatggaaaaagctgatgatgaggtaaaaggcgacctatccttttcgtttcgataaagaatgatagctttcagcctgatccagatgtgtcactaaactaggcgtttttaattgtgaatttgtgtgggtgatgcggattttagtacagcaaggtaggctgttgacctgttgtaaaggcatttcctgctgaatgcttgtttgactatc

SEQ ID NO: 20269 - DNA, 1566 bp, Oryza sativa
  ref <308>: DATABASE ACCESSION NUMBER: AK070591
  ref <309>: DATABASE ENTRY DATE: 2001-12-06
gacatctcagggtccgccccaccggccgcaccagcaattctgcaaccgacccgaccgaatccatcctccccgccagccatggctcccctgccaccgccgcgtccgcctcaccggagccaccggcgagtccccgccgcctgctgcctcttcctactcctcctcgctctcgttctcctcccctccgccgccgccaagtcatcccgccgccccatcaccgacaacgagatccgggagaagaagagcgcctgctacaccgacgtcgagaatggattgtggggatgggcgtgcaagtcctcggcgacggagaaggagaactgcgtgctgcggtgcctctcgccggagtgctacgatctcatatacggcggcgacccgcttgaggaaggggagctggactacatccgtggccacgagtacaagtactgcatgcacaagtcttcccttggtgaaagcttggatggtgtcaagggttccttcagctattcatgaagtgcaaggaagtaggaagagtgttctccgagccccatgaattataatacatctgaacctacgattatgggctgtcaacttaatggcctgctcgccacaagagggaaccgtgcttccggcaggacgccgctggactgggagacgaggtcggcgatcgcgctggcggcggcgcgcggcgtggcgcacatccactcgacggggccgacggcgtcgcacggcaacatcaagtcgtccaacgtgctgctcaccaagaactacgaggcgcgggtgtcggaccacggcctccccacgctggtcggcccgtcattctcgccgacgagggtgtccggctaccgtgccccggaggtgaccgacattcgccgggtctcgcagaaggccgacgtgtacagcttcggcgtgctgctcctcgagctgctcaccggcaaggcgccgacgcacgccgtcgtcaacgaggagggactcgacctgccgcgctgggtgcagtccgtcgtccgggaggagtggaccgccgaggtgttcgaccaggagctcctcaggtaccagaacgtcgaggaggagatggtgcagctcctccagctcgccatcgactgctcggcgcagcaccccgacaggcggccgtccatgtccgaggtggccgcgaggatcgacgagatccgccgctccagcctcggcgaccgtccggccaccgacagcgccggcgagggcgaggagccttcactataaccgaccagccgacattgccgtctggatcaccgtacatcgatctcagcctcagcgaacggaaattaagttggagaattgcttagttctttgcatggatcttgctcccccaggctacttttggttcatcagcaacttgtgcatgtttttttcattactttttctttcttcttcctttcttttttttcccttcttttttttgggcctttctctcacgggctttgattctattctatagcacatgtcactgtactctttgattcttggaaaggaacacttgataatgcgttgtatctatgacgaataccatcaccagctgtatggtttgctatttaaaatacgaaatgatttcatttcagc

SEQ ID NO: 20270 - DNA, 2786 bp, Oryza sativa
  ref <308>: DATABASE ACCESSION NUMBER: AK070592
  ref <309>: DATABASE ENTRY DATE: 2001-12-06
gcgcgatttaaccatctccatctccaccgcagaaatttctccctctacgcgcaaagaccgtgcgaagactacgcctcaccctctatatgcgcgactccaccgctaccgccgccagagccaagttcttctccatccgcctccggagtcgtgctcctcgctcctcctcctcgcgtgtactgctgctgtgctggagccgtggtcttccccatacgacgtcatctccagtcgccgtcggagccgaggtcgtccccttccgtctccgccactatcgcacagcaccgctgcccccccccccacccccctggagacgagttcttctccagctaccgctggagccgtgctccacgctcctcctcgcgtgtattgctgccgccgccggagccctggtcttccccagtccgtcgccggagccgaggcccccccccccctcttcccctgccctcgaagctgaggtcttcccatccggcgacgccactgcagtccaccgctgcgctcaacggagccgaggctgcagcgttgtggcgcagcgccgtagtgacgagcagacgcggcaaccgggcgacgaggagcgagcagcaggaggtgagggcgaggagctagcagatcaggccatccctccatgaagggcatcagacgacgaggggcaagcagcagcagctagcagagcaagcggtcgaacctaccctctatttctatcctgtatttgccactgacgcccttggaacaccactgccctgatttcatccactcttggctccatttggaatctggccatcgtcctgcaccctgcttcccattttcaaatcaacttcagcacccacattctcctggaaggtttttgtcctgctcaggaagggggtgtcgccaaagtgaattcaagacagctagcattcaatactttacacaagatccaggagccaccagcaatgcaagtggttgtcttactggtatgttgtgatgatcccagagtccaaggttggatgcttcatatcataaaggagttgtccatgtatttaggtaccatttgttaatatcatgacggccatggtaaagttcataatatgtcaatgtatatagttcattccctatcgttattttacttttcctttgagctgaaatattgcccatggggttagctcatttgtgtggcattggtggtatattctgattgaaatttataattggttgatgtactaaagagccaaaaagctaccctagacctttaactgttaaccttgtatagatttggaaatatattggcaaggactcatgtgacttcactatatcatgctatttatgttgctgattaaaattaaattgaggtgtatcactgtggcaattaagctaagagtaatcagattcctaatgttttgagtttacaacctttttcctttcatcgtgaaggctgcaatttatttcagtaagatacaatgtttctgctttgaggatcaaacccttcttccaatgcaaagaagaaaaagggaaattcagccaatgtgcaggtatagcaggaacaaatgtgtaaatattagatgccttgcccatacaatctctttgagatgtagctgttggtactttcttatgttccatggtgccagtggtatgttctgcaacttgagcaaacacgattttcctttttttttcttctcttctttcacagttgctaatagtcattttctgcacaaagttttaattgcaggctactcaagaacctaagaagttctgtcatgaagctgttgtttttctggagtcccttttggtaacatctattagaggacacttgggacctcacctataaaaaacaagtaaattttgaccattgcttcatattaagtgaatatcctctttatatataccaatgatcaattttggagctcaggaaaatggaaccatggcttcatttccttaaaaagtgcatcggttgaatccacagtgtatattctgcaagttataagcaaggattttgatgctccttatttcttccctgaaaatttcaagtaaagatgtgttttttggaattttgaatatttgcattgtgctgatgacttctaattactaacgatgtaattcataaattttatctatcagcatatgcttgcttagccggtttgttattctttttatttggatatacgtagtttgcttgaaaaatttgatggggctaaaagattatttggtttctcaggaagatgcttgatgctaatgtcttctcgagctttcagattgtaagcttcacaagaaaaagagtgtggctgtggactccaggattacattgaatcttgaaaaggtatgcactattccaatttcagatgatgcatttccctgatttgagatgtttccttttttccaatctaacaaaggaaacctttccttgagggaattccatgaaatatattggtttccagatttcaagattgttaggtcatttcgtggctgccacttcaactgtaggtgtgtgcatagtttagcaatatgacctctttagattaatattgtggtgaaggaaaatatataggcgttttgacaactgttagtgtttctgaaatgttcacacttgctatctactttttacttcaattaaggcaactatgaacaatatttttttttggaattatgtgatgaccatttcctgcaagtgaaatggatgtaaatttgtgttttgtagaccacatgaacttatgtggacacacggtaggacctgtaggacctatatacatctcattggtgatcatgtaaatgctatttttaattgctggccatgaggggtatatttgaagtattgttgg

SEQ ID NO: 20271 - DNA, 2512 bp, Oryza sativa
  ref <308>: DATABASE ACCESSION NUMBER: AK070593
  ref <309>: DATABASE ENTRY DATE: 2001-12-06
tgggagagaagaagaagaagaagaagaatccatggcggccacgagctcggagaagaagacggcggcggaggtcgtcgccatgctggatctgcagcgccaccccgatggcgggttcatcctggagaccttccgcgacccctccatctccctccccaagtccgccctccctccccgctgtaagcttggccattttcatcgggttgcttgatctcgcgttggattgtggattgcttcaattagaggtcatttccacttacagatagctgtaatcgatgatttcgggtccggatactgtgctgattattgcgattggagatatattataatgtagttcagaaatcagtgtgagttcatgattctacggcaatatgctcgtcaagatcatcctagttgtttaattgttgtgtcttttgatcctacttttttgaaataaactggagtaattataatctactgaagacacagaaaaagaaaaggactgttttctttgggcacgaaattctggtaattaaaaagtattagtagaatctgaggcagtaggtgttctacactcagagagtcaaggttccccaaactagtcaagaagtgcaaactattgttatttcctggcagttttcttttgtgtagaaaattcctaaataatgaagtctgacttcttatactttttagcaaaatccaggggtatttggcattatatggctcattctatgtgttagtacaataataacagtaagaacaacatgaatgagattcgaattctgtgtatatcctgcctacactggattgttataatcgatcagattttgtagctcctaaactagatgatttaatttctgataaaaaagcttcatgagttaataaagggtcaaacattagtactccaaacattactgctaggttctgagcttgcggccagatgtatgttctggatcgtgtatactctggagtcttgacatgtctactaactgtccatcaataaacttgtgatgagataataatttctcgcgctccttgactgcttcctttctcttgtaaagtaaatgttagctcttgtaactaagcgtatttgactgctgatgcgtgcaatttttgacttggcaaaattggcctagctgcattttttccccctgaccaaggggcaactatcgctgtctctccttttgtgaaggatacacagcaagagtctggtcagtagtatatcctggtttttacatctaggaagactcaaaaaagggcatatctgtaactcacaggccataggagtatttgttcagaagtattatcaacatgactttgatttgtcgttacttttacatcattatatttgattagtgcaaatttggtcctttgatgctatacacaactctttctcttgctaactgtgcttagtcaatattgggtgctgagtctttaacttctcatttatcctaaaaaaaacacttctaaatttggggttttcacatatcagattagcacaccattgagcatgagcctgacaaacttcatttactgtaacacacagaccagagatggttcataattaacagactcagtcccatgatagtataaaatatcttagagcatattctttttttctttcttttgaattgcaggcaaaagctttgaccacttttagaggttattcatcaatgcattgtgtggtgccgcccactgttaactccctagttaaccgtcataagagtagagtctgcttaacattttagattaccacataatgttaactccaatttcagttcctgtgagctactatagatttataaataaaaataacacattatctctaattctgtcaatgtgtttcattccttgtagataaggtagaccgtgctgtgagcaatgccatatatttcctgctacctgctggagagatcgttaagttgcatcgcatcccttgtgctgagacctggcactactacatgggggaacctctcacggtcagcaaattttaacataaatatcaaattaacataacttcttgactaaccccattttttttcaggtatttgaagtgcatgacgatggacaattcaagatgacagttgttggacctgatctacggcatggccaaaagccacaatacacagttcctccaaatgtttggtttggcgccttcttgacctgcgacatcgagtccttcaccgaagatggaagtgtgtttgtcaaaacgcctggaagagactctgagctgcactactctttcgtcggtgtaacctgtgctccagcattccagattgaagacgacgaaatggcaacacgggagagcatgaaagctttggctcctaaagcagaagctttcatcaactaccttgtgccttcagactgagttttattccactccaagtagctcgctctacgtaatgaactgtatgtaccaagctactgatgtttgcagggcagaaaccctgaggcctgaagcttgcatgtatcatcactgaccagttagtagtatttagtattggtttggtgacatagtttctcactattttttcgg

SEQ ID NO: 20272 - DNA, 2021 bp, Oryza sativa
  ref <308>: DATABASE ACCESSION NUMBER: AK070594
  ref <309>: DATABASE ENTRY DATE: 2001-12-06
gactctcacctctcctctccagattactcttgccctctcctctcctcgatcctaccagcggcgcggcggcaccacaggatgaggcgatgcgacggaggggctcggttggcggcggcaccacatggaggtgaggtgacggagggccactagtcgattggttggcggtggtgatgtcaagtgccactggatccggccgccatgggctcggtggtcgccagatctggccgccctgagctcgggggcagccggatccggccgccacaagctcgggtacggcggacctgcgcggggagtagctgcgacggtgggcctcccaccgcaagctggtgggtttttgagctggcacgacgaggttcccacaactgcacatgcatgatgcgcagatcaaactgaacggaatggaatgacgttgcaatgtgcataggcttgcaatgtgcatgctctcgaagtactggaagtcttcagttccttttctgaaggacaccagcgacatcagtgaacaagcagtggcatcctcactaattcttccatgctgatcagcaaatccaaggtgctaatatgatattatatttttctatccatctttataggaaacaaattgttgtcctaatagtttattgcaaccacatgcatgggactgtttgttaattagtgtagtcaaattactttacaatggactttaaatgttcagtctactctaagtcgatagctatagcgattaagaaatacttgacatgatgtggtagctcattggtatatttatttgtttgcttttgccatgatttttgatttgtacattgcaggttattatactttcatttctattgatctgttacacaccatgatgtggactgaatattttgtttgtgaactatattggtaggcactactatgccttggatctttgttgttacctgtacatgttttcagacagataggcatcagttccagttacatgcacctttttatttcttcataccttgtgctggccatatggtccatatgaagcattaagtgttatttgattataagttattgtaaaggtctttaatttgtgccttctagacttctgttgccttcttgcatgctagtatctgggttgagcactcatagtcatggagtggatcaatgagccactgcatattgaatccgtaacatcctagttgatacgaatgatgttgatatttatgtaactttgaatgctgtccaggaaaaataaacattggaatatttagttaagacttgagttgtcaactgcttccaatcaggggcgacgccaagttaagctagccgagtgcacaggcaccagggaaaaatctaatttttagttattaggatctaatctccaccttttgtgcactccctagaaaaaaatatgtgcaccaccttcagctgccttagaaggctgcaggcagcccatgaaggcccaatttcaaatattaaatcatctaattagcactttttgacagcttattatcgtctcatcaaggactcggcttaattatgttatttgctcattgctatgtagacatgtactaccagatttttcattttggtaagcattttttgtcactgtatatgttacatttacatttatattacatgcataaatgaagtgtgcactcgggtcctccgtgctctagattcgcccctgcttccaattgtctagactttggcaggtataactctatcatattctgccctactttcagtgctctgaaattctgaatttcaagtgtgaaaccagtcctctttttattttgcagaaaaggtggtcatggtcttgagaaaggccaggctttgttctgaacttagagatgagtgagctgcaaaccagttttttttcctgagatagtgttacatgcttgtatcaatatttgaagtgtagagattgagccagagtcagaattctatatagctagtttaggttttctgaactttgatgcttgaaacgtgctgtatattgctccattgacaatgtatggctgtgaattaattgaagctctcctgggaattgttgc

SEQ ID NO: 20273 - DNA, 880 bp, Oryza sativa
  ref <308>: DATABASE ACCESSION NUMBER: AK070595
  ref <309>: DATABASE ENTRY DATE: 2001-12-06
gaccaccgcgacgaacacccgacgaggagaaagaaaccacctgatcgagcccgtatctttgcagccgcaggagaggaggacgagtcgttcgttgggcagcaggaggcggcggcgaagatgtcgtggcagacgtacgtcgacgagcacctgatgtgcgagatcgagggccaccacctcacctccgccgccatcgtcggccacgacggcaccgtctgggcacagagcgccgccttcccgcagttcaaaccggaggagatgaccaacatcatgaaggacttcgacgagccggggttcctcgccccgaccggactgtttcttggaccaaccaagtacatggtcatccgaggtgaacctggcgctgtcattcgtggcaagaagggatcaggaggcatcacggtgaagaagaccgggcaggcgctggtggtcggcatctacgacgagccgatgaccccagggcagtgcaacatggtggtcgagaggctcggcgactacctcgtagagcagggcctgtagatcaccgtcgccatcatcgtcgtcgttgccacagttcaattcgtcagcaacaaattaaacggagacgaatgagagacacacacagcacatagtagatctctatgctatgcatttttctagccaccgtgcatgcatgcatggggattgtggtttaattttcctctcctctttccttgtccacctccgcaagcatgttctggatctcctcttgtacgttctgccatattttgtttgatcccatttcttcatgccgtttttggctaataactttttgtatttctttctgacgtggtcatttcgatttccattggagtttggaaatgtaacaacaaatgtaattaacatgagaaaattcctttgacgccgc

SEQ ID NO: 20274 - DNA, 1123 bp, Oryza sativa
  ref <308>: DATABASE ACCESSION NUMBER: AK070596
  ref <309>: DATABASE ENTRY DATE: 2001-12-06
gactcaagcagtccagcccaagtcgtcgcgcacctcgggcgatccgacctcgccgttgcttgctcagacgccggagacgacgacgacggcggcggcggcggcggggacgagatgacggtgttccacttcctcaactgcgccgccctcaccttcggcccccacgtcgtctactactcggccaccccgctgtcagagtatgacacaattggcacttgtgtaaaagcggctgttgtttatcttggaacagcactagtaaagcttgtttgcttagcgacattgctcaaagtacctgagaatgatagctttgatccttatcaggaattgatgaaaatctttattgggtttatagatgttgctggtctttattttgctttgacacagttgactcatagaaacatctcccagaatcacaagtttcaggcagttggtcttggttgggcttttgctgactcagttctgcaccgtctggcgcctctctggattggtgcaagaggacttgaatttacgtgggagtacatttttcaaggacttgaagcaaatgccaatcttgttatgacgctgtcccttgctgctttaggatccttgatgtggctgaggaaaaacaaacctaggactttggtgccaataatttatgcatgtgctttgcttctggcaacaatgccatctatcaccagttacttgaggagatcattagagtggcagactccaaaggtggttggcttcgagctgttctcctcactggtcatggctttcatcagctggcagctgttctcagcttgtcggagaccaatgtaaggaatgagtttgcaaattgccggagattcacgctcctgagatggctcctgttgtacttccacagaattaggatgcgccttttcagccttgacactatcttttctgggggttcgatcatagaacttattatttagaatcctttttctgtaagttttagtggagaaacacatgctccagtgagttgccattgttaacagctcttataggcattgaactaaaagtatattttgcccctgctgtgcttcttctgtcaaccgcatggcatcatctaaaatgaaagcctataacattcagttttgtcatcagtttatgggaaagtgagtacact

SEQ ID NO: 20275 - DNA, 1837 bp, Oryza sativa
  ref <308>: DATABASE ACCESSION NUMBER: AK070597
  ref <309>: DATABASE ENTRY DATE: 2001-12-06
ggcggcgtctcggcgtctcgccgccggcgggaggtccgccgcccttccaggctgcagcggccgccgcgaccacagatgtcgaccaatgagatctctggcagcaatgagctgtgtgctcaagatccagaggtcatgactttctataatcttcgcggttctgataaaaccacaatcctgaggaagaaagaactgcagaggctgagaaaggaacgcatcgaaaacaagtgctttagaaagaaagagaagataaggaaagctaaggaaattgtggacaatgccctcaagataagagaagaactgcatcaaaagtatctcagagccgagccatggttaaaagaacaggaaagacaacgacttgaaaggaacaaacgttttacaactgagatcattaaccaacctccagattatcgtggagaatgggatccatatgtatcggatgatgagttcgggacatcatttgagctgaagcgtacgggttgggaagttgagaagtttgccttagaccttgctcgaagcacagttggactcgagtctttcactggagagaatcatctattctcttgctctggtactattattgaatttctgaatggtatttgttctgtggtaacatctgcaagtttaattagatgcatggacaaagacgagcaagctgatgaacttaagattaatgtatggttaccgagtggtgaaaaatgtgagggttttatttcaaatgtggatctgtactacaacatttgtttggttacagttcactgtacttctaacctgccaaagaaaagcttcaatgacgacactggattttttgatttatatggcaaccattcgaaagatgttgtagctttaggccgtagttgtgaaccttggagcttgaaggtggcttcgggaaagctaattccaagaagacaccgatttgattgtgaagaacttcttgtttcttcgtgcaagattacaaagataggtgttggtggtcctttgatggattttaatggaaatatcgttggaatgaacttctatgacaagaaagaaacacctttccttccaagtttcattgtgttgaagtgtttacagcacttcaaagaatttgggaaggttgtacggccattgcatggattaagggttggaaatcttcacaaagagtctctcgcttcacttgagaagatatgtcatgagttccctaaggtttgtggtgtgattgtggagaaggtagaaccttcagcagagcattctgagataaaagttggggacatcatcacccatcttgatggtatggctttttccaatgctgcagagttcggtggcatactgctcgataggtgtgtcacacagatgctagaaaaacagaacttgtcagaggactgcaaccagatgataagcctcaagttttctgtgaaaacaagaggtggcatatctgaagccacaacaagaacaatcaacactgacaagtttactccaagtggactcaacaggtggccacttcccaggccgattattgttcggcaatatgctcgtggagttctattctccgaagattggtacagttagcaggactagggtttgttttatccttatacgtagaagtttctcatcatgaaaagtatttatgtgtaaggtggaattacacggatagtgtgaaatgttaataagggtttcaccagaattcaagttgagtagtgaagctgtatcggtggaatttttttgtatggtattaccatgacatcctcatggtaggcacaaaatatagcacctgacttgggaaaggcgttcaattgtcgagttaaaaacatagctgttgtaaccgttaatccgtgatggcgatgggatcgaattcctgttt

SEQ ID NO: 20276 - DNA, 1461 bp, Oryza sativa
  ref <308>: DATABASE ACCESSION NUMBER: AK070598
  ref <309>: DATABASE ENTRY DATE: 2001-12-06
ggattctgtctataaaccccgcctcctcccctcccatctcatctcaactcatctcatctcccttctccagatcaaaagacccttgctttccctcaggatcggccatggcgaccgccgttgcgtcccaggttgctgtctctgctccggctggctcggatcgcggcttgaggagttctgggatccagggtagcaacaatattagctttagcaacaaatcatgggttggcaccacattggcgtgggagagcaaggccacgcgaccgaggcatgcgaacaaggtgctctgcatgtcagttcagcaagcgagcgaaagcaaggttgctgtcaagcctcttgatttggagagtgctaacgagccgccgctcaacacatacaaaccaaaggagccttacaccgccacaattgtctcggttgagaggatcgtaggccccaaggctccaggagagacatgccacattgttattgatcatggtggcaatgtgccttactgggaggggcaaagctatggcattattcctccaggggagaacccgaagaagcctggtgcaccacataatgtccgtctttattcaattgcatctacaaggtatggagattcattcgatggaaggaccactagtttatgtgtgcgccgtgccgtttattatgatcctgaaactggcaaggaggacccctcaaaaaatggtgtcggcagtaacttcctatgtaattcaaaaccaggggacaaggttaaagtgacaggtccgtcaggcaaaataatgctcctgcctgaggaagatccaaatgcaactcacatcatgatagctactggcactggtgttgctccattccgtggctacctacgccgtatgttcatggaagatgtcccaaagtacagatttggtggcttggcctggctcttccttggtgtggctaacactgacagccttctctatgatgaagagttcacaagctaccttaagcagtatccagacaatttcaggtatgacaaagcgctaagcagggagcagaaaaacaagaacgctggcaagatgtatgtccaggacaagatcgaggagtacagcgacgagatcttcaagctcttggatggcggcgcgcacatctacttctgtggtttgaaggggatgatgcctgggattcaagacaccctcaagaaagtggcggagcagagaggggagagctgggagcagaagctatcccagctcaagaagaacaagcaatggcacgttgaggtctactaggatctaagtgtccaaggattatgattgttgcgcagtgaaaaagagaaaacaaaacgcatgatctgatgattcttgtagggtggtgtaaaatcatcattttttttctgaatatgaatcataaaatcacccatgtaattcataagcttctgcatcacatgatgaacgaaaggaagcatgtaacttttgcctgtcactattgcagctggtacctttgctatct

SEQ ID NO: 20277 - DNA, 1324 bp, Oryza sativa
  ref <308>: DATABASE ACCESSION NUMBER: AK070599
  ref <309>: DATABASE ENTRY DATE: 2001-12-06
gtggggtcgatggtgcttcactccccaatccccacagcagtagggtttggagaacttggcgtcgatcgactctcctcctccggtgcggcggccgaggctgccgactgcgagtctgcgaggcctccatctcttcttgctcgcatcctccattgtgagttccaagctatttgctgctcgcgctgcagcctcgacgcacgccgcctgttcgacggaatgcctccgggggaagccccacctccgaccggcgtcgataggatagggggtctgccggatggtgtcctccaacacatcctcggcttcctcccgccgcatgaggccgtgcggacctgcgtgctcgcgcggcgctggcgccacctctggaagtccgtcgcggccttgcgcatcaccaactgggactggaggaaggtggtgcccatggaggagttccggtatttcgtgcaccacctcctgctccgccgcgggcgcgctcctatcgacgaattcgagctcgatctcgccgagctgtccgaccgggacaccctccgcgtgaaccgctggttccggcatgcagtgatgtgccaggcccgggtgctacggctggatatccgtgtgagcaggggatccgagctcgagctagaaaacctgcctgtcgtctcccggcacttgcaaaagctagatctttatggtgtcaaattgatgcacaatttccttgatttctcgagctgtccggtgctgcaacatctagagattgctggttgcgacttgtctgattccaatgccaggaagatctcttccctatccgtaaaacacctaaacatctccggttgcaatttcagcgatactttccacacacacatttatgcgccgaatctcctctcacttggtctagttaattatatgaaccagtctcctgtgtttgagggtataccgtccggaagctttatcacaggccaagaagttggtgttgttagttcaggaacaagattttaatttcgaaatgtactggcaacggtgccctacatttagcaagttgaagactttgttaatcagtgcatgcgcatctgctgttcttgactttgaagctgttagttgcatccttcgacactcaccagttctagagaatctcactcttcagtttcatcgcatgggacatggaccggatagggtggaaatgaaaggaagctatagtcgaatggataggtcatctgcaatatcagaatatcttaagatagttgtagtcagatttgatgagattgatgatttagttatcaagttttgaagttcctctctgcattcagtattcgtaagctaactagcaacactattcattctttctatatttctg

SEQ ID NO: 20278 - DNA, 3582 bp, Oryza sativa
  ref <308>: DATABASE ACCESSION NUMBER: AK070600
  ref <309>: DATABASE ENTRY DATE: 2001-12-06
ggttgtcctcctcctcgccaccttcgcctccaccgattccatttccacccccacgtctcgatcgccggcggacggcggaggcatttccgcccgccgccgccgctccctctctccgtgcggcagcttgaagcgcgcttgcgcttgctttgatttctgatttctgatttgtgagggggacgaggaggaggagatgggcagcgtggggctgaacgacacggtgtcaggggtggtgtcgaggaaggtgctcccggcgtgcggtggcctctgctacttctgcccgggcctgcgcgcccgatccaggcagcccgtcaagcgctacaagaagatcatcgccgacatcttccccgccactcaggacgaggaaccgaatgagaggaggatcgggaagctgtgtgagtatgttgctagaaaccatcatcgcgtgccaaagattacagcttacttagagcaaaggtgctacaaggagttgagaaatgagcagtatggctttgtgaaagtagttgtgctaatataccgcaaactacttgtctcctgtaaaaagcagatgccattactggcaagtagcgcattgagcatcatatgcactcttttggatcaaacaagacgggatgacatgcggattataggttgtgaaaccttgtttgattttaccgtctctcaggtggacggcacatatcaattcaatttggaagaacttgttccaaaactctgtgaattagctcagatagtaaaggcagaggagaaggataacatgctccgtgcatcaaccttgcaagccctttcagctatgatttggtttatgggcgagttttctcacatatcctccgcgtttgataatgttattcaagtagtgctggaaagctataaccttcaaaagatgcaaaatgacaatatagacagtgaagctccaggcaatcggtgggtggaacaagttcttaaagcagagggcaacgccaccatctctaggataccttcttggaagagcatagttgatgacaagggagagcttcatctacctgcggaagatgccaaggatcctaacttttggtcacgagtctgtgtgcacaacatggccaagctgtccagggaggcaacaacattccgtcgtgttttggagtccctatttcgtcactttgataataataattcatggtcttcccagaacacacttgccttttgtgttcttttggacatgcaaatattaatggaaaaccaagggcaaaacattgacttgatgatatcaatactggttaagcaccttgaacacaagtctgtactgaagcagccagagatgcaactcagtgtcgtggaggttatagcttcccttgcagaacaatcaagagctgaagcatcagccgcaaccataggtgctataagtgatcttattagacatatgaagaagacattgcatgtcgctcttggcagcagagatttggaggtcataaagtggaacgacaaactccgggatgctgttgatgaatgcatactccaactgtcaaagaaggttggtgatgctggacctgttcttgacatgatgtctgtgatgctagagaacatctcccgcactccccttgttgctatagcaaccacatctgccgtttatcgtacagcccagataattacttctatcccgaatttgtcatataggaataaggtatttccagaagcactctttcatcagttactcttagcaatggttcaccctgatcatgaaactcgtgtttctgcacaccgcatattttctgttgtccttgtcccgtcttctgtttctcccttctctaaatcaacatctccaaatcagcttgtgaagcatgatattaagaggactctctcaagagctgtctccgtcttctcgtcttcagctgctttgtttgataaattaaaaagggacaaagagtccttcagagaaaaaccacaggatggaagcatgaacagactttcgcatgctgctgacaatgatacttctacagtcaaggacatgccaagctcgcgaagtcgaaggcacagcttcaaagttcctaatttttctatgaaaagggttgcttcattgtctctgaaatctcccatgtccccaaaggaatgccaaaatacctcggccgaatcatgtagtgaaacggaatcaactttgttgagactaagcagtcgtcaggccacacttttgctgtcatctatttgggctcaagcaatttctcctaaaaatactcctcaaaattatgaagctattgctcatacttacagtttgcttctgttgttctcgggatcaaaggcatcaatctttgaggctcttgctccaagttttcaggtggcgttttccttaatgagttattcactagaaggaacagattcattgctgccatctcgccgtcgatccttgtttactctggctacatctatgattatgttcttttcaagggctttcaatgtggcacctcttatcccgatctgtaaatcaatgctcaatgaaagaacaatggatccattccttcatttagtacaagacaccaaacttcaggctgtgaaggactgctcagaagaaacctatggatcaccagaggatgataataatgcactgaagtctctttcagcagtagaactaactcagagtcaatccagagaatccatggcctctacaatcatgaacaacataagagatttaccagattcagaattacaaactataagaagtcaactgctaagtgacttctcccctgatgacatgtgtccaacaagtgctctctttttttgaattaactgtcagaaatccaggttgtgatgaggattctagcaatcaagaggatgtgctgatcaatatggcaaatgacaatgacacctttggggaagtctacgaaaatacagaagctactacagcatctgtgcccacagcaaatcttctgggtatcgatgagcttctagaatcagttgtcactgatgcaccatctcagactgcaagatgctcggtgtcaacggcccccaacatcccattcaaggagatgactaaccaatgcgaggttctttcgatggagaaacagcaaaagatgtccgtgctcctgagcttcaaacacaaaaaccaatcaaatgtcctgccgatcaatcaagctgacaacacgggagcagtccatatttcctctgacgaccagaatacgaacccttttctccagcaaagccttgatggctaccccaaatatgttgctgatggtgaggcactacaggtagcagctgatgatgtgttccagcagcaattcttgaagctgccagcatcaagcccttacgacaccttcctcaaggccgctggctgttgacactccaggggccatgctgctaagacaagacatgtactgattaattgtggacactaaaaagtctgcaattgtattgtaaccagtgtatgagtgcagcctcttcttaattgcaagatgtaaatctcctcctattgtcaatttgtcatgttccgatccaacggctgggaaggaacatcgcattctccctgcttttgtttgtgcaacggtagaggaatagtttgagaagttcaaactatggtacgaaacacataatttaatccatacaaatcgataaccttatttt

SEQ ID NO: 20279 - DNA, 2434 bp, Oryza sativa
  ref <308>: DATABASE ACCESSION NUMBER: AK070601
  ref <309>: DATABASE ENTRY DATE: 2001-12-06
ttggggcggaggcgctcacacgcaaaaaccctaaaaccccagtctacccttccttccccgccgccggcagccgggacatcaccatggcggacgccgtgcagtaccgcctcgagcggatgtccgacgagctcgacgacctcgagcgccggggcctcttcacccgcgccgagctcgccgaggtcgtccgccgccgccgcgacttcgagttccgcctccgacgccgctccccgctccgctccgacttcctcgactacatcgcctacgagctccgcctcgacgccctccgcgacctccgcaagcgcgccatcatacgcgccacccccgacaccaccgaccacgatgctgacgccaccgacaacgacagcagcaagaagaagaagaagaagaggaacaagggcaaggccaagaagtggaagaagtccgtctccgacatcgccggagtcctccgcgtcctcgacatctacaggatggccaccgtcaggtacaagggggacctcgacctctggttccgttacctcgagttctgtcgcgacaagcgccatggtcggatgaagcaggctctggcacaagctattcgttaccaccccaaggttcctgggctctggatctatgcagcagcatgggaatttgatcagaacttaaatgttgctgcagcacgtgctcttatgcagactggtcttagatcttgtccagaatcagaggatatgtggattgagtatcttcgcatggagcttacctatcttaacaagcttaaggctcgaaaggttgctcttggagaggatgtgaagacactgcaaaagaagaataatgatgcaagcacttggaaagaggaaaataaagaactgttcatgtcactgaatgaacaagatgaaggtcccaaggagtctggctcacagggagttgctttggaggggaaggaagacctattctggcagcaagggctgctaatcattcaaaccatataccatggtgctacaaaagctcttccttcaagcttaaccttgcggaagaaattcttagagatattgagtagtgttgacctagcacattctgacgaactgaaggtagaggtcatggatgacctgaagaaagagttctctgacagtgaggactactgggattggcttgctaggcttcagcttagtgactcaactagttccagtaatttgaatagaatggaagctttatcaaataaactgaataaatcaatacaggtgtatgatgaagctgtcaggaggttgccaacttccagaatgtattccctgtatgcaaaattttggatgggtgttctgtttgctgatacagaagattccatctcattgtttcatggcggtgaatttgatgcttcagggttcacttcatgtatactgaaagtctatcaaaatgccgaatcaagcggttgtcttactgaagatcttgcttgccaatatgtgtctctttatttgagacttggaggtttggaggaggcacctggaagattagaggaagctaggaatcttgccaaaaagctctgcaatggtcctctttcacatgctgcggatttgtggaacctgagagcatctattgagatgaagtcacttgctacttctactggcatttcttcgttcagcaaggagaacttgagttctctatttgatctatttaatgttgcacttccaaagttacccatacctgaggctgaggaattgtggcacacggccatgaaattgttttctcatgagaaggtttatttcgaaaagctggtgaaatgtgcaatgttatcattaagttctgctggtggaaatgattgtggagcttcggtttcttctgctattgttggatggattttacaaagagatggtatcaagcaagctagaaagatgtataagagatttctggctttaccacgtccaagcttcaagttcttccagtactgcatagagttggaaacaaaccttgcatcaatcggaaaccaagacagccttgtgaatgctcgtaagctgtatgatgcagcgctcgatctctatccccaggaaagagaactttggaggaactactacaacatggagctgaagttgggaacatcagaaacagcaaatgctatatactggcgcgctcgtaaggtgctcggtgattccagtgccctggacattccccacagctagcaatgtgtgacttgtgtatcatgcaatatcatttttgatctgatttgattactttgttgtttaagcgtatcaagtcaagtagcgcggtggaagaaaattttggctagtctatctgttggatttgtgttatgagcccctaactagggttaaaatttgcatgctctgtatgattgccgattaaaagcttgtacagatacggcgatagtggccgatccccgaaacatactactagctattggtgtttgtgtcaatttagtttgtgccaagcttgccttgacaaagaatttatc

SEQ ID NO: 20280 - DNA, 1161 bp, Oryza sativa
  ref <308>: DATABASE ACCESSION NUMBER: AK070602
  ref <309>: DATABASE ENTRY DATE: 2001-12-06
ttggtgcgaattcgtgtaatcgtgttcttcactgctctgtaaacacagtgtcacacacacacacagggtaaacttgcaatggcgaacatctgtgccaacatgaagcgctgcttctcgccgccggcgctccgggcgtacttcgccgagttcttctccaccttcctctttgtgttcatcgccgtcggctccaccatctccgcccggatgctcacgccggatgaaacatccgatgcctcgtccctgatggcgaccgccgttgcgcaggcgttcgggctcttcgccgcggtgttcatcgccgccgacgtctccggcggccacgtcaaccccgccgtgacgttcgcctacgccatcggcggccacatcaccgtcccgagcgccatcttctactgggcgtctcagatgctcggctccacgttcgcctgcctcgtcctccactacatctccgccggccaggccgtgccgacgacgaggatcgcggtggagatgaccgggttcggggcggggatcctggagggggtgctcacgttcatggtggtgtacacggtgcacgtcgccggcgacccgcggggtggaggcttcggcggcaggaaggggcccgcggcgacggcgctgggcgcgctggtggtcggggccgtgacgggcgcgtgcgtgctggcggcggggtcgctcacgggcgcgtcgatgaacccggcgcgctcgttcgggccggcggttgtcagcgggcactacagcaaccaggccgtgtactgggccggcccgatggtcggcgcggcggtggcggcgctggtgcatcaagccctggtcttcccgaccgtgccggagccggcgccggcgccggcgacgaacgagtcggcgcgccatgggagcgtgcaaacggtggtcgtgtgatgaaatcattctggcagtctgtcaccctgacgaaaaatctttgtttgtcgtgttagaatctttgttgcatttggtttcgtgtagttacatgtagtatgtgtgtaagatctgtgtctttattaggttgtggatttgtggatgtttgaaggaaagaaagcaatgtaatctagtatagtaggcagtttgatcctagtgaattgtgatggactaatggatggtttgggtagtacttttgttaatgggcttcctttgatctaaaatatagaagggccc

SEQ ID NO: 20281 - DNA, 2310 bp, Oryza sativa
  ref <308>: DATABASE ACCESSION NUMBER: AK070603
  ref <309>: DATABASE ENTRY DATE: 2001-12-06
gattgattgagcagccggcggcggcgatctttgcttaaaccctaatctcagacgctgcctttgagagaggagaggggggagatcttcttcttcgcttacggcgggtgcagacaatatggcctcagcattcgggagcacctcagcatgtggcatcaagatcactcctaccgcttttgccaccaagaaacatctttgcctggttccacccccagtcgtttcacttccccggaaaaataggcctcagaggaagtgtaatttcagagtaaatgctgccaaagagttatatttcaacaaggatgggttggctatcaagaagctgcaaaatggagtcaataagcttgctgatctcgttggagtcacccttggtccaaaaggacggaatgttgtccttgagagcaagtatggatcacctaaaattgtcaatgatggtgttaccgttgcaaaggaggttgagctggaggaccctgttgaaaatattggagccaaattagtccggcaagctgcagccaagacaaatgatttggctggtgatgggacaacgacttctgttgtccttgctcaagggatgatcacagagggtgttaaggttgtggctgctggtgctaatccagtacagattacccgtggtatagagaaaacgaccaaagcacttgtgagtgaactccaaaaaatgtccaaggaggttgaagacagcgaacttgctgatgttgctgcggtaagtgctggaaataactacgaaattggcaacatgatagctgaagctatgaacaaggttggacgacagggggtggtcacacttgaagaaggaaagagtgctgaaaataatctctatgttgttgagggaatgcaatttgatcgcggctatatttctccctactttgtaactgacagtgaaaaaatgtcagtggagtatgagaattgcaagttgctccttgtggacaagaaaatcaacaatgccagagatcttataacaattctggaggatgctattaggggtgggtacccaatcctaatagttacggaggatattgagcaggaagctcttgcaactcttgtggtcaacaggcttaggggtgcattgaagattgctgctattaaagctcctggttttggagaacgcaagagtcaataccttgatgatattgctactcttactggaggtactgtcatcagggaagaagttggcttgtccctagacaaagctgatagagatgttctaggaacggccgccaaggttgtagttaccaaggattcaacaacaatagttggggatggtactacccaggacgaagtaaacaaaagggtgacacaaatcaagaaccagattgaggttgctgaacaggaatatgagaaagaaaaactgaatgagagaatagctaagctctctggtggtgttgctgtcaaccaggtaggagcacagacagaaactgagcttaaggaaaagaaactgagggttgaagatgcactgaatgcaaccaaggcggctgttgaggaaggtattgttgttggaggtggctgtacgcttttgcggcttgcatcaaaagttgatgccattatagaaacacttgagaatgatgaacagaaggttggggctgaaatcgtaaggaagtccttgagttacccacttaaattaatagcaaaaaatgctggtgttaacggcagtgttgttactgagaaggtccttgccaatgataacttcaggtatggttacaatgccgctacaggaaaatatgaggatttgatggctgctggtattattgatcccaccaaggtggtgagatgttgcttggagcatgctgcgtcggtggcgaaaacattcatcacatcagatgctgttgtggtggacatcaaggagcctgagaaagcagctgctgctgggaacccaatgggtggatcaggttttggattttagtttagaagaagaggagtaccctttttggcagttggcaaccatttttacactggaggcaggcagaatttcacagttgcatctgagacgttttttcttttcctgtgtgtaattgttgcgtacgtcaatgtggcagatgagaggagtagtaggttatgaatggccagcattatgacagtttattgttgctcgaccttacagaagagctgaaacagtgcaacataatgtttttaaggttgagaattatgcaagctgaagtagttggtaataaccgggtgaggattgtgttgtcgttggagtagatgatgattttactagctagttagatcgagttacaaacatataattaattaattaagggggcattggcagattacaataataaataaattatttacatg

SEQ ID NO: 20282 - DNA, 1395 bp, Oryza sativa
  ref <308>: DATABASE ACCESSION NUMBER: AK070604
  ref <309>: DATABASE ENTRY DATE: 2001-12-06
gtttcgtgcaacgcggttaagttagttgttgttgcgatccatagatagagctaaacccctaactagtaactacccagagagaactgataaggccagtgtcgagctagccagctgacggccgccacagtttgcttgatcaaggctgatcgatcgatcgatggacatcaccggcgcgggcgctatgggaggaggatccacggccgccaccgccgccgcggcggcgggggccgggtggaagacgccggtgtcgatggtgctggtgcagctgttcatcacggggcagatcctgctgtccaaggtgtccatcggcggtggcatgttgatcttcgtgctgcttgcgtacaacagcttcttcgccgtcgtcttcctcctccccttcgcgctcatcttcgagagaggcaagtggagggacatggattggggtgcattcggatggatctttctcaatgcgttcattgggtactctgtgccaatgagcctctactactatggcctcaaggataccacatcatcctattccgttatctttcttaatataactcccctgttcaccttcatcctctcacttatgttcaggttggaggcattcaaacttagaagcatacctggagtactgaaaatagcgagcatactgctttccattggagggacaatgcttataagcctttacaaaggcaagtcattgcatctctgggattctatcatacaacaccaaaatgaacacaagtcagcaaccaatcagctaagaggaacaattctattggttggcagcagcttcacctttgcttgctggtttcttattcagtcaaagattctcaaagtgtatccatacaaatattggtcgtccatggtgacatgcttggttggagtatttcaaaccgcattggtcggaatcatattaaggagagacaagagtgcatgggagctaggatggaatctcaaccttgttaccatcgtgtacacgggggcacttgcaacagccgggaaatatatattgaattcatgggcaataactaagcgaggcccaacctatcccacaatgttcagtccattatcagtcgtcttcactgttgtgttggattcagtccttctaggaaatgatattacaattggaagtcttctaggcacagcattggtgattgtcgggctctacctttttctctgggccaaagcacgagaaatacctaagaagtcaacatagtatattctacacaagtcctggtagctaaacaacacataggagttatttatgtacacaatgagatgtatacagcacagttatttaaatgcgaaagtatcatatacttgagacggatagcttataatgtttgtttatttgttgttaatggatactattgtatttcataacactgttaaaagaaaatattgttgatc

SEQ ID NO: 20283 - DNA, 916 bp, Oryza sativa
  ref <308>: DATABASE ACCESSION NUMBER: AK070605
  ref <309>: DATABASE ENTRY DATE: 2001-12-06
tgccgccgaagccaccacacctaaacccttcttccctctcctcctccgccgccgccgccctcccctctcgccatggcgtcggagaagaagcagtcgaacccgatgcgggagatcaaggtgcagaagctcgtgctcaacatctccgtcggcgagagcggcgacaggctcacccgcgcctccaaggtgttggagcagctgagtgggcagagcccagttttctccaaggcgaggtacaccgtgaggtcattcggtatccgtcgtaacgagaagatcgcgtgctacgtcaccgtcaggggcgagaaggccatgcagcttttggagagtggcctcaaggtcaaggagtacgagctgctgaggaggaacttcagcgagaccggatgcttcgggttcggtatccaggagcacattgatcttggcatcaagtacgacccgtcaactggtatttatggcatggacttctatgttgttcttgagcgtgctggataccgtgttgctcgccggcgcaggtgcaagtcccgtgttggaatccagcacagggtgaccaaggaagatgccatgaagtggttccaggtcaagtatgagggtgtcatcctcaacaaggcccaagcaaacacgtcgtaattggcaagggtttaaccagttatcctgtagaattaagtgagggttcatttgaatcatggaactgtctttcttgaaagccaaatgcactgtcaattttgcctctgttggagttgacctgcgtctatatttccattaaatgcttaatgatatccttgttttaaatcttaatattaaggcagacttggaatcaatccacccgctttgttacctgtatttctgccttatcctgtgtcaggcaaaagctaagtagcaacagtcaaattgttcattttagtgatgttttatttggggtgcc

SEQ ID NO: 20284 - DNA, 3132 bp, Oryza sativa
  ref <308>: DATABASE ACCESSION NUMBER: AK070606
  ref <309>: DATABASE ENTRY DATE: 2001-12-06
gatcccgacagttcagtcaccaacccaccaaaccccaccgcgaccgcgactccgacgtctccgccacgggccaaagtcgaaaaatcgaggggactttcccatctccatcccgcggcgggcgcacgggttggtcggttggtccgtccgtggcgtggactcgaagccgcctcgtcttcctcctcctcctcctcccccctccggcagtggcccaggagggcgcccgcggctactgctgcttccgctcaaagcttcaagttcccgtgcgcttctgcttccccactacctcccgctggtctcggtgcccactgcgcagcgcggtgcttcatctccctctcgctccggggctggctgcagccacaagctagcggcagcggaggactcgcttccgacgagctcggtgtggtgtggaggtggtgtctggcttggctggttggtttgctggacgtaaagcacattcctatttgggttgcgttgcttctttaggtcagaggacactccaaactgccgcaaagtttcactgatacagctctttgtcttcataaagggattatcatacaccttaacactttaatagatcaggatgacagttgagctggaattgatttaacttgcttgcttggatggtttgtgttctgaatttggaatttcatggttatgggtactttaggatgaacacatattgattttagacatcggaccaacttgctaaaacagttctgagtgatgaagaaatggcacggtggttttgtcatagtatctttgttcattatattgatgctaagatatgttatattggatagtccacttgctgaaaaatctcttcagtatgtcttccaacagaataacacaaccccactacattggctggatgttccaaacccgcctgcagttcagaatccacagaacatctctcaagtaatatcaactgaattgttagcttcaaacctttccataacaagaaatttctccgatagagaactgcagtcattgcattcttggaatcatttaaaagacctagtaagtcatgcgcacatcttaccagatggagtagaagcaatcaaggaagctggagtagcatggagggagctaaatgcagcccttgaatacgatgaatctgctgtttctgtcaatggtagcactcatcaaaaaagtaaagagaagcaatgcccatattccattcgaagaatgaatgctacaagatcaggtgatagatttgtcttaaagattccttgtggactgattcagggctcttcaataactattatcggtactcctggtggtcttcttggtagttttaagatagaattaactggggctactgtacctggtgaaccagaccctccaattgtgcttcattacaatgtccgtcttcttggtgataaacttacagaagatcctgtaatagtccaaaatacatggactatagctgacgactggggttctgaagatcgttgcccatctcctggttcagatgctaaggacattgcaaaagtggatgagttagaaaaatgcggtagcatggtgggcaatgatcaaaaacaagcatgggccactaagttaaagtccaatgtttcaagcatacaacctgcctggaaaaagaacacagaacctaagaaatattttcccttcagacaaggatatcttgctatagcaattcttcgtgttggagcacatgggatccatatgactgtagatgggaaacatgtcacttcatttgcctttcgggaggatttggagcctggatttgttggtgaagtaagaattgcaggagatattaaattgttgtctgtgatagcaagtggtttgcctacaacagaggactttgaacatgtgactgacttagaaattttgaaggctccaccagttcccatggacaaacccctggatctttttattgggatcttttctacagctaacaatttcaagcgcagaatggcagttcgcagaacttggatgcagtatgatgctgtccgctcaggaaaggctgcagttcgattctttgttggcctgcataaaaatgaggtggtgaatgaggaactttggaatgaagcacgaacatatggagacatccaattgatgccctttgttgattattatagcctgattctatggaagactatagcgatctgcatctatgggacaaacgtcttgtcagccaagtatgtgatgaaaacagatgatgatgcttttgtccgtgtggatgagatacttttatctttagatcgtgaacatcagtcatgggttactgtacggtcgtgtcaattctgattctcagcctcatcgagacccatatagcaagtggtacataaccccagaggaatggcctgaggagagttatcctccatgggcacatggtccgggatacattgtatcacaagacatagcaaaagaagtttacaggaaacacaagagaggagaacttaagatgttcaaactagaagatgtcgcaatgggaatatggatcaatgagatgaagaaggatgggttggatgtaaagtatgaaaatgatgggaggattttggtcgaaggctgtgaggaaggatatgtggttgcacattaccaggagccaagggacatgatgtgcctatgggacaaatttctgaaaacaaaacgaggaacatgttgcaaggagtaacgggggagtaacaggactaatccgaccatatattttgatggctactgtatagccatggcctgctgacaccaacgacaagctcggcacaacgccacaaccccatgcaagaggagcaggcaacaaagttttaaccttgcttatttttggtggttgcagaatcaataggcaacgaagttttgaatatcattcacagtcatttttgtccgcggggaaagagattgaagtctcaccaccatattttgtagaagatgtaggtttcctatttgggcatataggtagggaggtgttgcttagttgcttgcagtgtggcttcttgtaacatatctttctagaaaaacgtaggatacaccggcaattacacttttagggtagatgcagaggcagtattaccattcttttcctaggaatgcatcctgtatctgatgtaaagctatttgacaactactcattgtacaatccacttcctatccacggcatacctgaactttttctttgtc

SEQ ID NO: 20285 - DNA, 2952 bp, Oryza sativa
  ref <308>: DATABASE ACCESSION NUMBER: AK070607
  ref <309>: DATABASE ENTRY DATE: 2001-12-06
ggttctctcctccctagctgcggacggacttggatccatccatctcccattcattcattcattcattcatgtggccatccatccaccatcttgcatgctagctagctaccctgcaggcccataacgacattattcaattcgaattaattccatcatcatataataatatatatgatgctgagctcgtcggcgtcgaggcgggaggtcggcggcggcggcgccgcctccagcaccaagagcggcgagctgtccctgtccaaggtggccagcgtggccatacgggagtcgtcgggctcgggctcgggcgggatttccaagagcagcgaattgctgtcgagggcaggaaccatggcggcggcgagggaggcggcggcggcggcggtacaccacgaaggatggatggtgcgctacggccggaggaagatcggcaggtccttcttccacacccgctacttcgtcctcgacagcaggctcctcgcctactacaagaagaaacccaaagacaacatggtgccactaaaatcgctgctgatagacgggaattgcagggtggaggatagaggactcaaaacacatcatggacaaatggtctatgtcctgtgcgtttataataagaaagaaaaggagcatcagatcacgatgggcgcgtatgatattgaggatgctctggcctggaaaaagaatatagaactcattatcggtcagcaagaaaatatgacctccaaaaaccgcaaggcctttgcttcaatggactttgatacggaactaggagggcagtttatattctcagaccatgacagcgcagctaaagatgaagaggaacgacctatgttgattcgcaggacaactatagggaatggtccccctgaatcaatacatgactggaccaaagagcatgatatcggtccacccaatcagattgaccccattcaagttagctccaagaagaattggcgcctacttagatgccaaaatggactacgcatctttgaagaacttctggaattcgattatcttgcaagaagctgtagcagagctatgcgagctgttggtgttgtggaagccacatgcgaagccatttttgggctggtgatgagcatggatgtaacaagatatgagtgggactgcagctttcgctatggtagtttagttgaagaggttgacggccacaccgctatactgtatcataagttgcagttgcactggtgcccaatgttagtatggcctcgagacctatgttatgttcgctattggcggcgtaatgacgatggaagttacgttgtgctgtttcgatctacagagcatccaaactgtggacgtcaaaaaggatatgtgagggctttatttgaaagtggaggtttcaagatttctcctctcaagtgtcgcaacggaagaccccgcactcaagttcaacacctaatgcagattgatctcaggggatggctcctcaactactctccttcctttcagtatcattctttgctgcagatacaaaactgtgtagccggcctacgagaatacttctcccaaacagacgaaacacatataactccaaggattcctgtgatggaaaacatggttgacacatctgcagtacagaaagatgacaagaagagtaccgaagaagtagactccaagactaaaacaccagatcgaggacaagcggacagtaaaaacatgggaatcattgatgaagaaacagacgaggatgaggactatcaggttcctgaagctaacatagaggaagatcctaacaaagatgctaagcgtgcagacgaaccaccagaaaagattgatctatcatgcttttcgggcattcttcgttgcgatgcggatgagaaaagccgaaactgttggacagtacctgacagcaagctgtttaaagtccgtagcaagaacttcccgcatgataaatcaaagatacctgcagcgagttacctgatggagcttgcggccattgactggtttaaggacagcaagcgtatggataacgtaggcaggcagaaaggctgtgtagcccaggtagctgctgagaaagggatgcatacatttgttgccaacatacagatccctggatcaactcattacagcttggtgatgtacttcgtgacaaagtcgctgaagaagggatcactgctgcagcgattcttcgatggggatgatgagttccgcaatagcaggctgaagctgataccctctgtacccaagggatcatggatagtgcggcagagtgtagggagcacgccgtgcttgctggggaaggcggtggattgcagctacgtgcgtggagccggatacctggaggtggacgtcgacattgggtcgtcggcggtggccaacggggtgctgggtttggtgtttggtgtggtgacgacgctggtggtggacatggcgttcctaatacaggccaacacctacgaggagctcccgagcaggtcatcggcgccgcccgtctcgctcacgtcgaacccgccgccgctatcgtcccccaggaccttactccccctcctcctgcccttgccgacgacgacaacgccgctgcttcttcctccgaggatgatcatttttccaagaaaaccaactaagctagcacctctctcaacgcacgcactgcaacttatcaatcatttatcttcttgtaatttctaattatttccgaggctcatagcaagctttgttttttttcttttcatctttttttttatctcgttaagttgtttgcaaagtacagctggttttcttctacgtaggaacaaagataaatctagctagtgacagtatttcgttggaacctaatattatagactgagatattttgtttaggcttagatttgctgtctttggctttaagtcagacttttaattaacttacactccctccatttttttaattgacgacgccattgacttttgaacacatgtttgaccattcgctttatttaaaaattttat

SEQ ID NO: 20286 - DNA, 2410 bp, Oryza sativa
  ref <308>: DATABASE ACCESSION NUMBER: AK070608
  ref <309>: DATABASE ENTRY DATE: 2001-12-06
gtcttggactctttctctctcattccacttcttgctcgccgccgccgccgccgccgccgccggcgaaggggatcgatcggatggggacgtcggtgcaggtgactccgttgagtggcgcgtacggtgagggacccctctgctacctgctcgccgtcgatggcttccgcttcctcctcgactgcggctggaccgacctctgcgacccctcccacctccaacccctcgccaaggttgcaccaacaatagatgcagttcttttgtctcatgccgataccatgcatctaggagctttgccatatgctatgaaacatctcggactatctgcaccagtatatgccacagaacctgtatttagacttggcattttaaccttgtatgattactttatatcacgacggcaagtttcagattttgacttgtttactttggacgatattgatgctgcattccaaaatgttgttagattgaagtactcacagaaccaccttttgaatgataaaggtgaaggaatagttattgctccacatgttgctgggcatgatttgggtggcacggtatggaagataacaaaagatggggaggatgttgtttatgctgttgacttcaaccatcgtaaagagaggcatttgaatggtactgctcttggatcatttgtacggccagctgttctgataactgatgcatacaatgccttgaacaaccatgtctacaaaaggcagcaggatcaagatttcattgatgcattagtgaaagttctaactggtggtggtagtgtgttactgccgattgatacagctggtagagttcttggaattcttttgatattggagcagtactgggctcaacggcatttgatctaccctatctactttctgacaaatgtttctacgagtactgttgattatgtcaagagttttcttgaatggatgaatgattcaatctcaaagtcttttgaacacactagagacaatgccttcctattaaaatgtgttacacagataataaacaaagatgagcttgaaaagctgggagatgcaccaaaggtggttctagcatccatggcaagcttggaggttggcttttctcatgacatatttgttgatatggcaaatgaagcaaagaatctagtactttttactgagaagggacagtttgggacactagctcgcatgctccaagtagatccacctccaaaagctgtaaaggtcactatgagcaagcgaattcctttagttggtgatgagctgaaagcttacgaagaagaacaagaacggataaaaaaggaggaagcgctaaaggccagtctaaacaaagaggaggaaaagaaggcgtctcttggatcaaacgcaaaggcttctgatcccatggttattgatgccagcacatctcgcaaaccatccaacgctggttcaaagtttggcgggaatgtggatattctcattgatggatatgtccctccatcatcaagtgttgctccaatgtttcctttctttgaaaatacttctgaatgggatgacttcggtgaggttatcaaccctgaagactatctgatgaagcaagaagaaatggataatactttgatgcccggtgctggggatggtatggatagtatgcttgatgagggctcagcacgcctactccttgattctacaccctcaaaagttatttccaacgagatgactgtgcaagtcaagtgttcattagcatatatggactttgaaggtcggtctgatgggcgctctgtaaaatctgttattgctcatgtggccccattaaaacttgttttggttcatggatcagcagaagctactgagcatttaaaaatgcattgttcgaagaactcagacttgcatgtttatgctcctcagatagaagaaactattgatgtgacatcagatttatgtgcttacaaggtacaactttcggagaagttaatgagtaatgttatttctaagaagttgggtgagcatgaaattgcatgggtagatgcagaggttggaaaaacagatgacaagcttactttgttgcccccgtcgtcaactccagcagcccacaagtcagttcttgtgggtgatttgaaattggctgattttaagcaattcctggcaaataaaggtttgcaggttgaatttgctggtggtgctttacggtgtggtgaatacatcacactgcgcaagattggtgatgctggccaaaagggcagcacaggttcccagcagattgtgatcgaagggcccctgtgtgaggactattacaagattcgtgagcttctttactctcagttctacttgttgtaaaatgtaatggaccggaccatggcatctctttcctttcgtgttgatgttgttgtacacggaggaaccgttaatccatttggatctgagcgccagaatatgctgtttgttgctct

SEQ ID NO: 20287 - DNA, 2139 bp, Oryza sativa
  ref <308>: DATABASE ACCESSION NUMBER: AK070609
  ref <309>: DATABASE ENTRY DATE: 2001-12-06
gggactacttgtgccagtgatccagtccactttcctcccgaccctgcaaaacaagttgctgcaccctgcaccgctggtgcacgcattcatgggcgccgcggcagggaaggcagcggaagacgtcgcggccgcgtcgacgatgacgcgcgccgagtaccggcttgccgttgccgagcaagtcatactcgggtggcactgcgcgcgctcgtccggcgccgacctcgccggcgtatgggactcggacgcgacctgcaccaacgagagcctcctctccgcggtcgacgaggtcctcctcctcgcggagatccacgcgttccccatggcctccgccgctcggcgcagcatgcaggatgccctcgacgtcgccgtgtcatgtctaatggaagaattccttcgcctcaaggtgtgggacgcttcccagatggaagtcaggctcggcgttcgcttcgccgtcgggaagttctcgatgcccgcggcggacagtggagtgtcgctgtcgctcgccttccccaccaccggcagcatcagcacggcgagcaccatcgacgagctgtacgcgtcaggcgggagccagtcgagcagagttggcgcggtgaccatgctcttggacggcgagttctttgatgagctcgatctgatcagcccggcaagcttgtccgtcctccatcagatcgctctccgggtgatccgcgccggctacacgaaagaactgctccacgcattcaccaacgctccctgcgatgttttagacaggttcgacttgtcccaaatcatgcaatttaagaatctactatctccatggttgatctgagctgtgttctggctgtttttcttcgccatggaacaggttcctgacgatccttcaaatggaatgcgctttcgaaaccgaccatgtcagtttcgaggacgcggagtggtggacagcagaggacatgatcaagcggtggatcttggcaacaaagctcgtcgcgaaggccctcgccgtcatgcaaaggcagctccaagcacagagctgcggagcgttcgacaggttcaagaacgattacttcatggccatcgcgaagaacagcatcttcgtcctgctcagattcgcgaacgggttcactaccacggaagcaccggacaagctcgtgtatgtcctggaaatgtacgaggcactgagcagcgcgactccgggactcctgctcctgttcaccgagcaacgcgttgagctcgtctcccggcaggtcgaggttgttctcgccaagctggcgcgcgcgctgagagccatgatcggcggcctcatcgccaggatccgaaaggcagattgtccccagacgacggggagcgccgcgcgcggcgtcggcgtccatccgctgacgcggtacgccatgacctgcgtcgagctgctgtcgccgcaccgcgccgcgctggacctgatcctcgcgaacggcgccggcgagagcgtgacctcgctgggaagcctagtggcggtgctcgtcacgagcctggaacgacacctcgaggagatcaaccccaagctgtccaacgacgacgacgacgcggctgcagcagctgcagcctcgcggcacctcttcctggccaccaacgcgagctacgtggcgagacgcgccgtggacgccggcgtggagcctctgctcggagacgggtgggccgcgcggcgcgggagcctgatcgcgcggtacgtggcgagctacgtcgaggcgtgttgggccccggttgcggcttgcctggaaaccgcggggaggaagccggtgaaagttgccgccaagttcagctccgcgtttgacgaagcgtacgagagtcaggtgcaccgcgagattcccgatcccgcgctgcgcgacgcgctgcggaaggccgcgtcggagatggtcgttcccgcttacagcgcatacttgcagaatcaccccaagctccagaaaaacgtcaggcacaccgcgggcgagctggaccggttgctgtgggagttgttcgaaggagaagcggcggagcgcaacaaattgttgctgtaattttaggacagcgccagattcttttgtaatactttctctatttcaaattagctatatttggctttgtatactgctcatgttaaacatttctgttttgatcattgatttctataaattcatctagttt

SEQ ID NO: 20288 - DNA, 1975 bp, Oryza sativa
  ref <308>: DATABASE ACCESSION NUMBER: AK070610
  ref <309>: DATABASE ENTRY DATE: 2001-12-06
ggtgaagccgcatcaaccaaaactatctgtgttgttgagttcttgcgcgtgcgtgcgtcactagccagaaacttgagtgtttgtgataaacacctagagagcgagaggagagattcctaacagcagctcagctggttgccggcgacgcccacctccccgaaggcggcggcgccgaacgtggacgggagcgtgccggtgaggaggttgccctcgaggaggaggttgaagacggtggcggtgggcgggatggcgccgctgaggcggttgccgtcgaggcggaggaaggtgaggtcggggagcgcgcgcgggccgaggaacgacgggaaggggccgtacagctggttgtaggcgaggttgagaatctgcagcttggtcaggttggcgatggcggccggtacgggcgccgagatgttgagcgcgaagaccgtgagctcggtgacgcggccggtgatggcgtcgcaggagacgccatcccacgagcagcacggtgtggaggagttccagacggagagcgccggcgggttgccgagggccgacttgacagcaaggagagccgccttgtcggacttgtcgcagagggcgccgtccgcctcggttgttgctgccgccgcaacaaggaggacggcgagcaggattgccatggtgtggcagaatggattgctgagctccatggacgccggctagctgaatttggatgacggaattatgtagggaaggagcttagctataaatggccatatggcccgtggcccgcggcccggcgcaaagcacgcgtgtttggcccggcccaagcatggcccggcccaattggagtcgtgctcgtgccggcccggcccgacagccgggccgtgcttgggccgcgccatcggcacgctgggccagcacggcacggcacgaaacaggccggcacggtgggccggcacggcccggcatgctataacggcaggcacggcccgaccgaggcacgcacaccgcagcccagccagccggcccatcacctccctcgcatatataagccgcccccgccgctccgctccttcgcctcctccgctcctcaaaccctaaccctagccgcctctgtctcgaccgcttatctttctcgaccactccgtcgctccaccgcctccacgcctccactccacggctccacttcctccacgcggaccagtggaccacgcctccatcactccgctcctcgccggatctagcaccgacggtcgccggcctaccgctgggggcatgaggggctgagggccgttcttctctctctttttctttcatctccacctctccgacggccacactatcgatttcctcttttttttccaccctcgtcgttgctccgtgagcactttgtcagatccacccccatttccagtctctgttctcgtcttcttgtagatctgtcgatctctgtcgtcaacggcaactccggtgctccggacgcgcaggtcgctgagcggtgagcgccagcggtagccaccgttgaggaaccgtagtgccgtcgatggatgatccatcctcctgcaactttgagttgaggctgctgggaatgcggggtgatgacgaagatgacttggaggaggaacgcgtggaggtcttcggcaacactgcctcgcctcggatcgatgggtcgcagccggagacagagacggagccggacgatgacggtaccggtgccggtggcaacggcgcgccgtccggcttaagtgctagcaacaaacggtccagatctcaggtatggaacgactttgaagagctctatgaatcccgaaatggcagtcaggttcgtgttcgtgctaaatgcaattactgccataaaatcttgtttgcttgttcatctggtggtactggacatttgattaggcatattaagtcatgcaaacctagaaatgctggtgctctgtctcagtctatgctccggtttaatgctgatggttttgttagtcaatgggaatataagccagatgttgcc

SEQ ID NO: 20289 - DNA, 1644 bp, Oryza sativa
  ref <308>: DATABASE ACCESSION NUMBER: AK070611
  ref <309>: DATABASE ENTRY DATE: 2001-12-06
gagttcagtcactcctcttttgaaaaaaaaaaatcagagagaagaagaaatctgtgaaaaatctccgaccaccggacatcgggggcatggccgcctccgcccttctctcgcctgtgcggcctctcgccggaaccacactttccttcggtgttccctaccaaaacaagagaaggatcccaacgatgcgggtctactgcgctgctgatgaaggttagtctaatggtaactggagattggcaaattgtaggagcggtcaaatgttttattttacagtttttttattcttgagtgaaatttcttatacccaggctcagatcttgaggtggttataaacttttgatgtatcttacatgagggactactatttcaattcttttttttaataagtagaagtatttatgtcctttctaggctgtacattgcacaccacatttactttcaaggtacaatagtgtgtctaagttttgagctttcacacactgcgaatggctgtgcataatgcctgcaaaatgtgctgcagaagttcataatgagtcatcacagaactcagtttagcaaaatgtacataggctacatggaatattatggcgcaaatttcccaatccatgtatctcgtacttaagtaaaggactaagtctaagcaattcattgtgggattaggagattgcagattgggctttattttaatggaagacaaacttgtgtttttttttctgagtaaaactatagaactgatcgatatgagtgcattttgtgctttatttgattttaagaagaggaagtcaatgacttgggagtcaatgtggcactatccatgctaaaattttacaaaagtaagttcattcttactgttttcatcttgtatttatgtgcagcaatcattggccttgcgcccttgccttttgatatcaactatatctctatagcttgctctcctttatgtgaacaggagaaatatcgcccttactaccctcaagctgccgttatgtgccaacttgcagccagtactctatgcaagcatacaaaaaatacggcgttgcaaagggtacaatcttgacagcttggcgtctatgccattgtaatcctcttggtggtcatggttatgatcccccaaggtggtttggtgaggaagagttaccaaagcaatgatggcctggtgttagattatatattcgcaaggattccattgcatattgtttaccgatgcaactgtcgcaagcaagggtgttcaggagttctactgcacctgacaaggggaacttatttgtttacagtagtatcgactcatgccatgttgagaaggtgatcagatgttcagaatttctatgaggaggattgttatgataactggtaaatgactttctactatgaacttggaaaccacgtccttagtaacaattgtgctggtttatcagtaccgctgaggaattgtattcccaggaatcctgttgtattagcacaagaatagtatagaattttcatctgataggctaggagcagtgatgccttgtggtactgatgccttggctcttccattcctcaatgtttctttgatccttaacaatctgcaaatcttggttttggagccacttcttccctcgtcctatcaaaagaagcaatgatcattagatataatttgatggg

SEQ ID NO: 20290 - DNA, 2552 bp, Oryza sativa
  ref <308>: DATABASE ACCESSION NUMBER: AK070612
  ref <309>: DATABASE ENTRY DATE: 2001-12-06
gattctgtccccgatcccgtcacgtctcctggaaacaccccacccgcttctcgtctcctcgtctcctcgttcgtctctcgcctcgtcttccccgtcctccgcgcgattccccaaccctccccgaagccgcagtccaccgcaagtcgcctgcctcctccgccccgcgccccctccccccgtgcgccggcgatcgccggtgcccgccaggttatttcttgtggcatggcaaggatacatattggtcttggcttgttctttcatgaatgatgtccttccgttcgaaggacagaaatgtgcaaccacgatttaattggccatggagaagcgaatcaccattatcagcacaactgctcattgatattccacctgaaatagagttatcggactacagaaggttgccaggttcaggaagcgagagcccatctggacttctccatggtgaaggcttcaaggacgaaccaattgctgacttggatattttctttgaaaggctttatgaatatttctgtgcaaaagggctacgatgcattgttaccaaatggataattgagatgcttaacgtactttttatggtatgctgtattgggttctttttcttaattgttgattggaatgccctcggccatttgaaatgtggtgtagaggcactcgaatccggggaaaaaccatgtgatctaatgcaagtcgttaagcataatccattagttccattcacatttcctaaaatgatcactattggatcaatggttatattgacaacttacggtcttatcaacttcctcaagtttttcgtgcaactcagaagtacattgaatattcgtgacttctactgtaacagtctgaaaattacagatcttgagatccaaaccatctcatggcccaaaataattgagaaggttgtcctgctacagaaatctcagaaactttgtgttgtaagggacgtctcggagcatgatattatcatgagaataatgaggaaagaaaattacttgattgggatggtcaataaaggcattatctcatttccaattcgtccttgggtacctggagctggaccaactgtcaaatcccatttgcaaaacaggagaaaccatctgatactcccgaaagccctagaatggacattaaattggtgcatcttccaaagtatgtttgatagtaaattctgtgttcggaaagattttctaacaagcccagctgtgttaaagaagcgacttgtatttgtgggcatttcaatgcttatcctttcaccctgccttgtaatattcccattagtgtacctcattctgagacatgctgaagaaatttataatcaccccagtacagcttcatctagaagatggtcaaacttatcaaggtggatttttagagagtataatgaggtagatcatttcttcagacataggatgaacaacagcgctgtgcactctttaaattacctgaagcaatttccaactccactgatttctataatggcaaaattcatatcttttgtttctggtggtttggctggtgctcttataatcattggatttctgggtgaatctgttcttgagggccatatctttggaagaaatctattctggtatactattgtttttggaacaatagctgccataagtcgaaaagtagtggctgatgaacttcaagtaattgacccagaaggcgctatgtgcaatgttgtccaacaaacgcattatatgcctaagaggtggcgtggtaaagaggacagtgaagtggtgcgaagagaattcgaaacactatttcagtttaccatagtaatgctgcttgaagagatggcctccattttcatctctccttacttgctcatctttgaggtaccaaagcgtgttgatgatattctgcgattcatctcagacttcacgatttatgtagatggggtgggagatgtgtgcagcctaagcttgtttgacttcagaagacatggaaatagaaactatgcttcaccatttgatgcacttaaaacgcttaggagctcccaagggaaaatggagaaatcatttttaagttttcaaagtgtgtatccatcatgggaaccaaatgcagaaggcaaacaattcttaactaacctccaaaagttcaaggaaaagcaaatacggcagcaggctcttgcacaatatcaagcaatggaagcatcaggctttgtggcaagcaccagaggtcacagggatgatatcttccaccaactactccctagtgatatccataaccgtgctgaggccatctcacctgctgtttacaatttgggcccgttaggattgcttgacacagatcaaagaagtcatccatatattctggattggtactacgtctgccatccacctcacttggatagaaccgaggctccttatttcaacgaagtgttccctgagaccagtgagaacacaggttcagcagcatttaaagcatctgaaattgaagaagcaaggggctgggactctgatatggttcccccgcctcgagcagatcgcgatgagtggaactttaaccatgaaagggttcgaagccatatggatgcatcgacatcaagc

SEQ ID NO: 20291 - DNA, 575 bp, Oryza sativa
  ref <308>: DATABASE ACCESSION NUMBER: AK070613
  ref <309>: DATABASE ENTRY DATE: 2001-12-06
gctttttccccttcggcttctcgtcggattgccagccatggtggtgaacaacttcacgggccccgggattgggctggggttcggcatcgggtgcgggttcggcgtcggatgggggttcggaggaatgcctctgaatatgtttggcttgggcatcggtactaattcttgtacattactttattattgtacatcacctacagtatctcaggtttcaattaaagttcttccttcttttaaggtgggggatgtggagttggtcttgggctagggtggggcttcggcaaagcgtatggttgtcagtatcgctcgtctagagtccagtttcagggcattgagtttcagaagaagaccgaaggagatgaagcatcaagccttgtttctccagagcgtgttgaaaaatctcgtccttatggatagtatggttgtgccttataattcacatatgctatgttaccttccttccctcaattgtgccttagttgcatacctgcatgtttcttcggtaacatttgatgcttatgctcagctttgtcatttttgttgtaatcagaatgatgttaatggacaggattgtt

SEQ ID NO: 20292 - DNA, 1265 bp, Oryza sativa
  ref <308>: DATABASE ACCESSION NUMBER: AK070614
  ref <309>: DATABASE ENTRY DATE: 2001-12-06
ggtcgacacgagccgtccatataaatccacgccgtcgccgccgaatctcgcgaaaaagctcgcaaatttctactcggggaagaagaagagccctctccaaaggatctcctcgcccggccggcggcgatggcggccgcggcgccgatgccggttgccggagcggggtggtgggatctcgtgaacggctcgacggcgtggcaggacgggatcttcctctccctcgccgctctctacggcctcgtcgccgcatcctccttcatccaagttgttaggatacagtacagagttcctgaatatggatggacaacacaaaaggtctttcaattacttaatttcattgtgaatggagcgaggcgttctatctttgcagtccgccgccaagtccaacaagtgaaccctgagatctttcagcatgttattcttgatcttccggggcttgcattcttcacaacgtatgcaatgttggcacttttctgggctgagatatcttatcaagcacgtggtctagagactgaagggcttagatcaggtttctacactattaatggtgtaatatatgtgatacaggttctgctgtgggcgttgttgtggcacaatccaaacccatctatgatagtcctttcgaagttgttcattgcaggcctatccttttctgcagccttgggttttctgctatatggagggaggcttttcttcatgctgaagcgttttcctattgagtcaaaagggaggcagaaaaaactgagggaagttgggagagttgccactatatgcttcctttgtttcttggcacgatgcattatgatgtgctttgatgcatttgacaaaaaagctgaccttgatgtgcttgaccatccaattcttaatttcatctattacctgatcgttgaaattcttccttcatctcttgtcctgtttattctgaggagaatcccttcgaagctacggctcgcccagtatcatcccctcaacagtggctaggggatgaaaacggatgaaaacatgaaagctaaaaatatggagaggcctgcaaagtgacacggctgcaagcccaggacatgaaaaaaaaggatgacccatggtctaaaatctctaacccttgttcaaaatgtgtatagatagggatctgaaatctgaagttttcccacaaccttcacctcctgtagctaaccttggtggttcaaggtgctgatgatttcgtgtaaccaattgttcctttgtaacaatggaagcaagtgtcctcgctcttttgagcgagcaagccg

SEQ ID NO: 20293 - DNA, 2040 bp, Oryza sativa
  ref <308>: DATABASE ACCESSION NUMBER: AK070615
  ref <309>: DATABASE ENTRY DATE: 2001-12-06
gattgattccctcctccgcgcagctcgcggcttcgatcgatcgatcgaccgatctcccacgtcgccgccgttcgatcgatccgccgccgccgccgccgccggccggccgggcaagatgccgggggccgtgatcgtgcaccaccacacgcggtacaagacgtaccccggcgaggtcaccggcttcgtcttcttctgctgcctcatcgcctccgtcggcggctgcatcttcggctacgacatcggcctcaccgccgggttgacgtcgacggagtcgttcttggcgatgttcttcccggtgatcttcgagcagcagcaggagcgggtgatcacgaaccagtactgcaagttcgacagccaggtgctgacgctgttcggctcgtcgctcttcctctccgccatggtcgccggcatcttcgcctccccgatgtcccgcgccttcggccgcaagtggaccctcttcgtcgccgccgtcgcctacctcatcggcgccatcctcggcgccatctccttcaacttcatcgttctcctcaccggccgcctcctcctcggcgtcggcgtcggcgtctgcatccacgcgtcaccgctgtacatatcggagatggcgccggcgcagcagcgggggatgctgaacatactgttccagctgatgatcacggtggggatcctgtcggcgagcctgacaacgtactggacgtcgaagatcgccggcgggtgggggtggcgcgtggggctggcgttcgggacggtgccggcggcggtgatcgcgctggggtcgctggccatcccggacacgccggtgtcgctcatcgcgcgcggcgagggcgaggcggcgcgcgcgacgctggccaagatccgcggcgtcgacgacgtgcgcgccgagttcgaggacctgacgacggcgagcgaggagagcaaggcggtggcgcacccgtggcgggagctcttcttcggcggcaggtacaagccgcagctcgcgttcgcggtgctcatccccttcttccagcagctcaccggcatcaacgtcatcatgttctacgcccccgtcctcttcaagaccgtcggcttccgccaggacgcctccctcgtctcctccgtcatcaccggcctcgtcaacgtcttctccaccttcgtcgccgtcatgaccgccgacaaggtcggccgccgcgccctcttcctccaaggtggcacccaaatgatcatctcccagatcttggtgggaacattcatcggattacagttcggggtgagcgggacgggggcgatgtcggagcagtacgcgatgtgcatcgttctgttcgtgtgcgtgtacgtggccgggttcgcgtggtcgtgggggccgatggggtggctgatcccgagcgaggtgtacccgctggcggtgaggtcggcggcgcagagcgtgacggtggcggtgaacatgttcttcacggcgttcatcagccagatcttcctcaccctcctctgccacctccgcttcggcctcttctacttcttcggcgcctgggtcctcctcatgaccgtcttcatcgccaccctcctcccggagaccaagtgcgtgccgctcgaagaggtggcgcacgtctggaggaagcactggttctggcgcaagttcatcgtcgactcccccgaccgcggcggcgccgagatgaggaagaggatagccctagagatgagctagagttctctactaatatactgacgtgcaaagcttttacgcgttcgcgaaaaagagaagagaataaaagcttagctaacatgaacaatgttgattgattgatctatcatttcagttaagctaattgattaattgcctgattatgatagaagaatacacatactctcttcatcaaaaagctcatcatagtatttggataggacataatctataatgaatttggacaggcggcctatctagattatgttgtatctagatactaggttgggttttttttacagatggagtacttttcatagctaggggtgcagcatgggttcactcattgattagttggtaattaaacttgttgccgattctgatgt

SEQ ID NO: 20294 - DNA, 1565 bp, Oryza sativa
  ref <308>: DATABASE ACCESSION NUMBER: AK070616
  ref <309>: DATABASE ENTRY DATE: 2001-12-06
gagtagcggtggcggcatcatcagcagcagcagcagcagcggtggtggtggtcgccgtagcggctgccagctttgacccccacctcacccgcctccggcggcgccgccgctcccgttcctgcgctcgccggcggcgcggcgggtcctcctcctttccctctggcgcgcggggccccgccccctctcccacccccaacatggaagcctctagaaggaggggaagctgctgatactgtgatcgaataattgcccctttttctgttacaagcaaatgtgataatggacaaccttggccatagagaaaatgggaggcaaaggccagaccaatataaaggacttcatacccagtggatgatgccccagacccaaaggcatctgaaggaccatcaaagtatgaatctcttggcactgatgaatgatagagataatgccatccgagaaagggaccatgctctggctgagaagaaggcagccatagctgagcgcgatatggcgtttactcaacgggatgctgcaatggctgagcgtaatgctgcagtcgtggaaagggacaatgcccttgctgctcttgagttagcacgtacaaacggattgaacatgaataacgggaatggattcccccaaggatctctcagcggatcaaagaacatccaccaccacgaccagctttctcatgctcagtcatcaccgctgcaactggcagattctccatatgatcatgctagagaaatgcacatatcagaagcataccctatctcaacagctccagggagtgctggaaaagcaaagaggccaaagaagaatagttcccaagcctctccattgaagaggccatcaggtgtgctccggaaaaccaagaaaccttctggtgactggaagaatgtcgggatgtctggttgtggagatgattctgctcatgcttctgtgatgaagaacgagtggaaggaccaaaaccttggtctgaatcaagttgcgtttgatgattccacgatgcccgcgcctgcctgttcatgcacggggaagcttcgccaatgctacaagtggggaaacgggggatggcaatcatcatgttgcaccatgaacatttccatgtacccactcccagtgatgccgaacaagcggcatgctcgcatggggggacggaagatgagcggcggtgccttcacaaagctgctgagccgactagcggccgaaggtcatgatctctcgacgccggtcgacctcaaggaccactgggctaagcatggtacaaaccggtacatcaccatccggtagcttgctgatgaacgcggatgtgattcaagctggaaagatggggaagatcaggcaaatcttgcttctcctgcattccctaaaccctttgctagggccagtctttgtaaggttgtcattggtttgtagcggatgtaggtagaattttgtgtttaaagttctgtaggttcttctctcccgttctgaactctgaattttctcgtggctctagaacgctgcagcccacgagaattaaaaaatgtaaccgtagtctgcaggtattcatcgtcagatcattgtatagtttgacaacc

SEQ ID NO: 20295 - DNA, 2785 bp, Oryza sativa
  ref <308>: DATABASE ACCESSION NUMBER: AK070617
  ref <309>: DATABASE ENTRY DATE: 2001-12-06
ggccctctgagtctctgaaatcctgaagcttcttcttcttcttccttcctcctcttgctctcttgctcttcctatgctagcactctccatgctcttcttgcccttgtagcattggctccttggtttccatccatggatccacgctaaatgcattgcgaggctgcaaattggtagcattcccttccccgttgcatctgctgcaactatgtaagcaggagtgtctgatttgacacgcctgaatacagcttctcagatcttcagttttgttgtttgtctgagaaaaggagagagagagaggcctcttttgggtccaagaagagaaaaatggaggagagcttcgtgcccctccgtggcatcaagaacgacctccatgggaggctccagtgctacaagcaggattggaccggaggattccgcgccggtatcaggatccttgcgccgaccacctacatattcttcgcttcggccataccggtgatatcgttcggagagcaattggagaggaacactgatggtgttctgacagcagttcagacattggcatccactgcactttgtggcataatccactcctttcttggagggcagcctctgctgatcctcggtgtggccgagccgacggtgctcatgtacacattcatgttcaactttgccaaggacaggcctgatcttggaaggaggctgttcctcgcatggaccggttgggtttgtgtctggacagcaattttgctgttcttgctggcgatactaggcgcgtgctcgatcatcaaccggttcacccgcatcgcgggtgagctgtttgggctcctgattgcaatgctcttcatgcagcaggctatcaaggggcttgttgacgagttccgcatccctgagagggagaacagaaaggcattagagtttgtttcatcatggaggttcgccaacggaatgtttgctatcgtcttgtcgtttggccttttgctcactgcactgcggagcaggaaggctcgatcatggcgctatggaacaggttggctccgtggcttcatcgccgactatggtgtcccactgatggtgctagtatggacaggagtttcctacattccatatggtagtgttccaaaaggaattccacggcgccttttcagccccaacccatggtcccctggtgcatatgataattggacagtcatcagggacatgccaaatgtgccactcctctacattattggtgccttcataccagcaacgatgatagccgtcctgtactacttcgatcacagtgttgcttctcagcttgctcagcagaaggagttcaatttgaggaagcccccatctttccattatgatttgcttctcctgggtttcctgacattattgtgtggccttattggtatccctccggcgaatggtgtcattccacagtctccaatgcatacgaagagtttggctactctcaaacatcaactactccgtaaccgactagtagccacagcccgacaaagcatgagccagaatgcgagcttgagccagctgtatggcagcatgcaggaagcttaccagcagatgcagacaccactgatttaccagcaaccgtcagtcaagggattgaatgagctcaaggactcaacagtccaaatggcttcaagcatgggcaacatcgatgcgccagttgatgagacagtctttgacatcgagaaagaaatcgatgacctgctgcctatcgaggtcaaggagcagaggttgagcaacttgctccaggccacaatggttgggggttgtgttgctgctatgccattgctcaagaagatcccgacttctgtcctctggggctacttcgccttcatggccattgagagcttgcctggtaaccagttctgggagaggatcttgctgctcttcactgctcccagcagaagatacaaggtgttagaagagtaccacaccacgtttgtcgagaccgtgccattcaagacgatagccatgttcacactcttccagacaatgtatctactcgtctgcttcgggatcacatggatcccgattgctggggttcttttccccctcatgatcatgctgctggttccagtcaggcagtacatcctcccaaagctcttcaaaggtgcacatctgactgatctggatgcagcagagtatgaggagtcaccagccataccgttcattgccgcgcaagatattgatgttgcattggcgcgcacccagagtgcagaaatccttgatgacattgtcactagaagccgtggtgaaatcaagcgcctgaacagtcctaagatcaccagctccggtggcacaccagtggcagaacttaaaggaatccgcagcccttgtatctctgagagggcatacagcccttgtatcaccgagttgaggcatgaccgcagccctctaggaggaagaggcagcccaaggaccggtgagacccgatcgtccaagttgggcgaaggatcaacaccaaagtgaagcaagaatgatgcactgctcatatgagctatgcaactacctgaaatcagctatactaatgatttctgtataactatggcgtacggttatatgatgtcttatgatcaagtatcaagtatgagtctatgagaatgtttatgtatatctctagcctagtatatcaccccttcctctttttttggtgtatttcctgatttggagcaccatatgtgtaatctctgaactaccagaatattagagtgactacttggtaaccttttgagtttcatttgctaaattcctgtcagaacttgtggatgattcatactgaaaactatttgtattc

SEQ ID NO: 20296 - DNA, 2506 bp, Oryza sativa
  ref <308>: DATABASE ACCESSION NUMBER: AK070618
  ref <309>: DATABASE ENTRY DATE: 2001-12-06
ggcagtgacacctccaaatctaacatttcgcggttgcattaccatctcttgcctcttgggctctgccaagaatagccaaagcatatgtagccttcctgcctctcgtgttcactcgttcggtcctcttcctccgttctcctcttccccttgccctcctccagatcgaccatcacttgcatgcatgcgcaggcacgatcgaacgcagtagatgcattggctgccagctcgatccgcaccgacgatactccggcgaggcaaagcgcggcgtaaggaggaggaggaaaagtggccgggatggagtcggtcggcgacccgcgggatgggccgtcgacggagcgcgcgttcgaggggcagcccgtcccgccgtggacggagcaggtgacgctgcgcgccgtggtggcgagcgtggcgctgggcgtggccctgagcagcgtgatgatgaacctggtgttcacgtcggggatcatcccgtcgctcaacatctccgccggcctcctcggcttcttcctcctcaaggcctggacgcgcctgctcgaccagctcggctcgccgggccgccccttcacccgccaggagaacgccgtcgtccagacctgcgtcgtcgcctgcgccagcatgacatacagcggtgggtttggatcgtatctgctggccatggatcggaagacggcggagaagacgagcaccggggacgactccagcgcgagcgtcagtgagccggagttcggtcggatgatggccttcttcttcctcgttagcttcgtcggtctcctcgccattgtccccatgaggaagacaatgatcatccgccaccggctgacgttcccaagcggctcggcgacggctcacctcatcaacagcttccatacccctcacggcgctagacaagcgaagaggcaagtctcgctcgttctccggtcgtcgttggcgagcttgttctggtccatcttccagtggttctacaccggaggtccaaactgcggcttcacttccttcccaacgtttgggctcagcgccttcaatcgcggtttctacatcagtttgaacggaacttatgtgggaatcgggatgatcagtcctcacctgataaacgtctcgatgctcttcgggtccatcatctcctgggggatcatgcggccgtacatccggagcaaaagaggaatctggtacgacgccgatctccaggagacgaacttgaagagcttcagtggatacaaggtgttttgcgccatagcaatgatcctcggcgacggcatcttccagctcgtcgcgatctcgctgaggacgatacacacggtgcgccaccaccaggtagcggcggagacgctcaggtccttctccgacgtcgacgccatgccgcggccggtgatgagcttcgacgaccgccgcaggacgcaggtgttcctcagggagcacatcccgagcaccttcgccatcagcgggtacgtcgtcctggccaccgtctccaccgtcgtcatcccgctcatgtacggccaggtgaggtactaccacgtcgccgccgcgtacgcgttcgcgcccgtcctggccttctgcaacgcctacggcacgggcgtcgcggagaccaacttctcggcgcagtacaacaagctggtgatcctcatgttcgcgtcgtggatcgggatcaagaacggcgggatcgtcgggagcctcgtcatctgcggcatcgtgtcgtccatcgtctccaccgcctccgacttcatgtcggacttcaagacgagctacctgacgctcacctcgccgcgggccacgctggtgagccaggtgatcggcacggcgatggggtgcgtcgtcaacccggccgtgttcaccgtcttccaccacttctacgagatgaaccccaacaagacgtaccaggcgccgctggccaagatctaccggggcatcgccgtgctcggcgccggcggcctcgagctgcccaagtactgcctcgccatcagcgccaccttcttcgtgctggcgctggccgtctgcgcgatgcgggaggtggccgcgcacggcaagtggcgcgccgagccgtacatcccgagcgtcaccggcatggccgtgtcgttcctgctggtgccggcggtgtccatcgacatgtgcatcggcagcctgatcgtgttcctgtggaaccgcaacgacaagctgggatcgcaggtgttcgggccggtgctggcgtccgggctcatctgcggcgacggcctcttctccataccgtacgcgctgctcgcgaggtacgacgtcacgccgcccatctgcatcaggttcctcggccgggtgcagaacgacaagctggacgctttcttggcgagtaaggctaaagctggatgatcctgaattcttgatcgaggaagaagtgggcacaattgtttattccgttctttttcttccaacacctgtagattatttagtgatagaactgatcttttcatgtagagcgaaatggactttttgtgcttttcaaacagttgagatttcaatccaacgaacatactatggcagc

SEQ ID NO: 20297 - DNA, 1049 bp, Oryza sativa
  ref <308>: DATABASE ACCESSION NUMBER: AK070619
  ref <309>: DATABASE ENTRY DATE: 2001-12-06
ggggggaaaaaaatcgcatccgatccgaatccggcgagccgaatcaaatcctcccctcgagcaccagcggagcggaggagcgaattcgccggagacgagacccctcgccgtcgtcgattccccaggcgagcccgtgcattcgttcctccgcggcgagcagaagcggtgcgcctgcctgcgatggcggcggagaagccggctccggtgagggtgctgtactgcggcgtctgcggcctccccgcggagtactgcgagttcggcccggacttcgagcgctgcaagccgtggctccgcgccaacgccccgggcgtctaccccgacgagctcctcgcctcctcctcctccgccgccgccgacgtcgacaaggtcggggagcggcttcagggcgtcgggatctccgccgccgatggctccaccagtgcaggggatgcttctgcgtcgaagcaggaagaggtgaagcgcttgcctggtggtaaggtcaagaagaaggataaacaagaggttgtgattgagaagattgtccgcaacaagcgcaaatgtgttactgtggtgaagggtctggaattatttggtgtcaagctgagtgatgcttcaaagaagctggggaagaagtttgctacaggagcatctgttgttaagggccccactgagaaggagcaaattgatgtgcaaggggatatatcgtatgatatcgtggagttcattacagatacttggcctgatgtacctgagtcagccatttttttcattgaagatggaaggaaggttcctgctgcttgatgttttatggccacaaggcagaataccaatggagttacaaatatagtagaaatataagacaagagtatgcctgcagctaaggcatgggccttgcatgagctcatcaatgctactactccttcaaagacaaaaaactgttttctttcatttctggtcttaagttcatcacaactggtgttttatcgaggactggtcccatgtgtatcaactttatcctgcaagttagtttggtattgctaagccattggaagtggcaaatgttttgtgcg

SEQ ID NO: 20298 - DNA, 3538 bp, Oryza sativa
  ref <308>: DATABASE ACCESSION NUMBER: AK070620
  ref <309>: DATABASE ENTRY DATE: 2001-12-06
gcctttctctctcctcctcccctcaccacgagagcgagcgcggcgagctccccacccaccaccaccaccgacggcgactacctccgccgctgccgcgatgtctcgcctcttccgcgagtcccgccgcgactcctcctcctccaacggctcctccgccgccgccgccgccacggcctccaccggcggcctcccctccccgttccccgacctcggcgtccccctctccgccgccgacctccgcgaggccgcctacgaggtgctcgtcgcctcgtcccgcaccacgggagggaagccgctcacctacatcccccaggcggcggcatcggcgggtggtggtggtgggccggcgtccccggcctccgcctcgtctctctcctccgcgaacgcctcctcctccccgtcgctccagcgctcgctcacctccgccgcggcgagcaagatgaagaaggcgctcgggctgaggtcgtcggcgtcgtccaagggtgggagccccgggagcggcggcggcgggaagtcggtgccgccgcggcggccggcgaccgtcggggagctgatgcgcgtgcagatgcgggtctcggagcccgccgacgccaggatccggaggggcctcctccgcatcgccgcgagtcagcttggcaggcgtgctgaatctatggtcttgcccttagaattcctacagcagttcaaggcatcagatatccctgatcctcaagagtacgaggcatggcagagtaggaacttgaagcttcttgaggctggtttgcttgttcacccacttgttccattgaacaaatcagatgtttctgcacaacgactgcggcaaattatacgtggagcatacgatagaccacttgaaactgggaaaaactctgagtcaatgcaggtcctacgtagtgctgtcatgtcccttgctggtaggtctgatgatgggacttctgacggatgccactgggctgatggtttccccttgaatctccatctataccagatgttggtagaagcttgctttgataatgatgatggcactgttgttgatgagattgatgaggtgatggagctcttaaagaagacctggggtattctgggaattaaccagatgcttcacaacctttgctttgcttgggcattgttcaaccattttgttatgtccgggcaagtagatattgagttgctctctgctgcggagaatcagttggccgaagttgcaaaggatgccaaaaccacaaaagatccaaattacagcaaagtgttgagttcaactttaagctcaataatgggttggacagagaaaagacttctggcttaccatgagaccttcaatacaagtaacattgagtccatgcaaggtattgtgtcaattggagtgtcagctgcaagggttcttgttgaagatatatcccatgaataccgtcggaggaggaaagaagagactgacgtagctcgcagcaggatagagacctacataaggtcttcactccgtacagcttttgctcaaagaatggaagaagcagattccaagcggtcatcaagaaaccctacccctgttctgtctatccttgcaaaggacattggtgacctagcaattaaggagaaaaatttgtacagcccaattttaaagacatggcatccccttgcttcaggcgttgctgttgccacccttcattcttgctttggaaatgagctgaaacagttcatagctggacttacagagctgaccccagatacggttcaagtgcttaaggctgctgataaattagagaaggatcttgttaatattgcagttgaagattctgtggatagtgatgatggaggcaagtcattaatcagagagatgccaccatatgaagctgaaaatgcaattgctaacctggtgaaagtttggattaaagaaaggatagacaggctcaagggatgggttgatcggactttgaaacaagagacttggaatccagctgccaacagagagaatattgctccctcttgtgtggagatgcttcggatggttggtgaaacattagatgcatttttccaattgcccattccaatgcatccagttcttcttcctgacctgatgtttggacttgatagaagcctacagctttttgtgtctaaagcaaaatctggctgtggaacaaggaattcttttatgccccaactacctccgttgacacgatgcgaggtaggatcgaatatattgttcaagaaaaaggaaaagccacagaatccacagtaccgaggatcacaaaatggaacaaccaatggcgctgatcccttagcccttcctcaactctgtgtacgcttgaatacgcttcaattcgtgcgaggtgaactcgagaacttagagaagaagataaaaacaggcttgcggaatgtcgagtcagctcaggcagatgttaccgatggattggacatcaaatttgagctttgtcagacagcctgtcaagagggcattcagcagttatgtgagacaactgcatataaggtgacattctatgatttggggcacgttctctgggatatcctttatattggtgacattgcatcaagtaggatcgagatattgttgagagaactcgaccctatactagagaccatatctggtatggtgcataacaaagtgcggaaccgtgctataaccgcattgatgaaagccacttttgatgggttcttgctggtgcttcttgctggtgggcctttgcgtgctttcactcgtcaagactcccagataatagaggatgacttcaaggcccttaaagacctgtttttagcagatggtgatggtttgccagaggaattggtcgataaggcatcctcccaggtcaagaatgtcctacccctcctacgaacagactccgagagccttattgaccgattcaaacgcatgatggctgagtctaatcgatctggagccaagaataggttaccattgccaccaacaacagggcactggagcccgaacgaacccaacacagtcctgcgagttctgtgctaccgttatgatgagacggctaccaagttcctaaagaaaacctataatcttcccaagaagatctgatgaactcgatgtacattttctggaaacaaaatcatgaaacccactgaggaagtcaggatttggaatgattttgtcacatcctcctttgaggaacactaccattgtaaagctaccactgcggagtttgccttatctgaggcgattgatttgaacgggggagttcaattcagcaacttggcccttctatcacatgctgttcagtggcgccaagaaatatgctggtactcttttctttttcttttttccttttttttttgggggggggggattacttacaggtcgatttgtttattattatgattatatgttttaccctaatccagttcttttgctgacctttgccgctgcatgtgtgtatttttccagtagctgtagtttgcaacagatatacccatcttgtgaataagttttgtactggtgtgacttgctgcgttggacttgagtatatcattatgcaaggcatctggttcctgcattcgtgtt

SEQ ID NO: 20299 - DNA, 2198 bp, Oryza sativa
  ref <308>: DATABASE ACCESSION NUMBER: AK070621
  ref <309>: DATABASE ENTRY DATE: 2001-12-06
ggtcgtctcatttactgctacagcgatagtgcgatggacatggcaccatctccatttccagctccgtctccctcttctgccctgccctccattgccccctctcctcagatggaggatggcttgtacgaagtgcgtgatcagtagaaggattatactactgaattaatctcgagttcttttagtggttgggttctttccaacaaggcttacatggaggcaggggcagcagatgaggagacgccactgattcagcagctgcctccggaggaacaatgttcacaatacacatgtgatggaacagttaatagtgacaaaaagcctgcactgaagcagagtacagggcattggagagcatgcttcttcattttaggtgctcaattcgctgaaaccttgtgcttcttcatggtttcgaagaacttagtcatgtacctcacgagtgcgctgcacgaaagcaacatcgacgctgcacaaagtgtgtctatttggatcggcacttccttcttcacaccactcattggagccttcttggctgatacatattggggaagatactggacgacagttatttccctctttattatcatcatcgtaagtgcaacaaaacagatcagtagcaactgaatgatataagctgcagtctcctctgtaatttgctgctctgaagagttgtgttttgtcagggaatgctcattgtgacggtttcatcatcaccattgttcctgaattcttcttactacaattggaacatttgccgtgccacggtctacacagggctctaccttactgccgttggaagtggatgtatgaagccctgcattccagcctttggagccgatcaatttgacagtgctgacccggtggaacggctggcgaagggctcattcttcaactggtattacttctcaatgaacgtcggctcactgctgtcgacgactctgcttgtctgggtggtggccaacatagggtggagcgtcggttttgcgatcccgatgctactctcggggttcggcctcgccctgtttttcgctggtaggaaggtttacaggtacaagaaacagggagggagtccactgacaagggtgtcccaggtggtggttgcagctgtaaggaatcataggctgaaattgcctgacgatagctcactcctgcatgaggtttcaaaagtgactgaagatgattacaggactcaactcaccactcaattcaggttctttgacaaggctgccatcttgtccgacgagatctcgccggcgcagtggagcccgtggaggctgtgcacggtttcgcaggtggaggagctgaagatcctgctgcggatgttcccggtctgggtgtccatggtcgtcttcttcgtggtgaccgcgcagattacgtcgacgctgatcgagcagggcatggccatggacggccgcgtcggcccgttcacccttccggccgcctcaatcgccaccttcgacgtcatcagcgtcctcgtctgggtccccgtctacgacaccgtgctggtgccactggcacggcgcgtcaccggcaaggaccgtggcatctcccacctgcagcgcattggcgtcggcctcgcgctcgccgcggtggccatggcgtactcggcggtggtcgaggcacggcggctggggacggcgccagcgccggtgagcatcatgtggcaggcgccgtcgtacctggtgctgggcgtggcggaggcgttcagcgtgatcggcatgatggagttcttctacgagcagtcgccggagtcgatgaagagcctgtgcacggcgctcgggcagctcgccatcgcggtcgccaactacctcaactccggcgtgctcgtcgtggtggcggcggccaccacgcgcggcggcggggccggctggatcccggacaacctcgacgaggggcacctggactacttcttctggatgatggctgttgttagcgtcctcaacctgctgcacttcttgcattgctcaatcagatatagagccaataacaacacgctgtcgtcttgacatttatacctacactcttcttgggtgcacattcgtcatggttcatgccaaattaagtatactagccgttaacccgtgcgttgcatgggatatttattaacacgctgtaaatattaaattataactatatattgggtatcttatgaattataacgacttggttaaaaaaacacttaacatcaattgctaattgct

SEQ ID NO: 20300 - DNA, 2001 bp, Oryza sativa
  ref <308>: DATABASE ACCESSION NUMBER: AK070622
  ref <309>: DATABASE ENTRY DATE: 2001-12-06
gggtttggatccaatcctacggtgcaagtctggccgatctcaccgcgcgcgcgccgcctcctcccccttgagtcggcgccgcctccaatccgacgccggcttccccctccgtccgccgccaccttcttccccgttccgctcccccggggaaacttcgccctcttcaccctcccccaactactcctgcctccacccccaaggccccaaccaccgaaccctagctggccggcgccgtcgtcaccgcccccgggagatcgtcggagcccggagacgaggaagaagctgtctgccgcgcggtcgtactcgtatcgtgaagcatacatatcgtcagagttaccaatggctacagaaaagaaagtgaacaagctatctgtggctaatttaacttcggatgattcattctatccagttatagttcctggaaactctaagattgagatacaaagccgagtcagaaacttgactgtttatgctatcaaaattcctggcagcgtggcatataatgctatgttgttatattcagagggtcaacaagagaaatgtctagcagtacgacgaagatcagaacacgcccatactctttatgaaatccttcgaaattgctctcacagaaacatcatacagcctatgggagtctgggaagaaatggagacgaacctggcatttattgttttcccttgctctgatggagttgtgacttcaattccaaaagaagctttatttgatgtggaagatgctacaaatgctgaatcttatacatttggtttcagtgaccaaggttgcaggatctttagagagatttgtatggcagtcagatatatcaatgtgctgtatgacgaggagaaaattccattgaaggcactggatttggatgaaagtaaaatcttttatcagtcgaaggctaagggggattatcatgtcctattaactgacatcaagatggaaatttcaccaacgggcaatgtgagaaagaaccggagagccaagggcaaagtttctagcacaggagtaccaactgttgatgacgttaaaactgcgaactggaatggtttgggacaatttcttaaaaagctccataaagacctcaagctgcacatagaattgagccatctttcagaagagctcgggaaagaatcagtaaagtatgaagatttggtgtgggaacctggattgtgggaatcaagcactaaagtgcaattggttagagatgtttattggtgctacaacaaaaacaagaacagaatatctacacttaagaacaaaacagcccttggactcaaaagctttattgacaagttggaggtgaacaagtctagagcaccagacaaacaaatcaatgacgacaacttgtatgagtctctgttttttcttagagtttacatggttgcccacaaagacgatactattaaaggttacagtggcacaatggaaatgatgcatgacaagaaagccattgtaaggttgcttatgatagaacgccctgaatacatggtgacactcatttcagcaatacggaagttaggctggattaggcaatctccattttgcgcatggataaccagtacatgatagagttttacaccccaaatcctgcaaagtgcttgctatctcttaggaggattgggatcccatgcagtttgaacagggactgcaagtttagcagtcttaggtattcactaccatcagatcaaaggtttcaatggcccggatttagtagcagtactgtttgttagcacttgctacagtatgtgctacaggattcatctgctacagtacctgatgaacagtatttttgtgtgatctgagtccttgttatttgatccaacaatgattgtatgacttgctgaggaaaaaaaattggtagatggcaaagtttcaacatgcatcttgcagtagctacatggaggttgtacttcttagttactccctccgtttcataatgtaatactgtccacattcatatagatgttaataaatataaacacatatatatctagattc

SEQ ID NO: 20301 - DNA, 1823 bp, Oryza sativa
  ref <308>: DATABASE ACCESSION NUMBER: AK070623
  ref <309>: DATABASE ENTRY DATE: 2001-12-06
ggaggagaagagagagtgtgggcgctcttaaataggagagaaaaagaaaaccaccgccaccgacatcgcctcgcctcgtaacccccaaatccagcgcctcccttcctccccaataatcgaatccaatccatcttccacgcgcattccggatccgcggaccaagggaggatgtcgtcgtcgtcgtcgccgcccgccgcctccgccgccgcgaggctggatctggacggcaaccccatcgcgcccctcaccatctgcatgatcggcgccggcggcttcatcggctcccacctctgcgagaagctcatggccgagaccgcccacgtcgtctacgccgtcgacgtctactgcgacaagatccgccacctcgtcgaccccgcccctccccacctccatggccgcatctccttccaccgcctcaacatcaagaacgactccaggctcgagggcctcatcaagatggccgatctgacgatcaacctggcggcgatctgcacgccggccgactacaacacgcgccccctcgacaccatctacagcaacttcatcgacgcgctccctgtggtcaagtactgctctgagaacaacaagcgtctcatccacttctccacgtgcgaggtctacggcaagaccatcggcagcttcctccccaccgaccaccctctccgcaaggaacctgaattttatgtactgaaagaagatgaatccccctgcatttttggtccaattgtgaaacagcgatggtcttatgcatgtgcgaagcagcttattgagaggcttatttttgctgaaggagcagaaaatggccttgagttcacaattgtgagacctttcaattggattggaccaagaatggactttattcctggtgttgatggtcctagtgagggtgttcctcgggttttggcatgtttcagtaacaatctcctgcgtcgggagcccctgaaacttgttgatggtggccagtcccagagaacttttgtttacattaaggatgccattgaagctgttcacttgatgattgaaaatcctgctcgtgccaatggtcaaatcttcaatgtcgggaatcctaacaatgaagtcactgttaggcaattggctgaaatgatgacagaggtctatgcaaatgtctcaggagagccaccactggatgaacctatgattgacgtgagttcgaagcagttctatggtgaaggatatgatgatagtgataagaggattcctgacatgaccataatcaacaagcagcttggttggaatccgaagacccctctcaaggatttgctggagacaacattgacctaccagcacaagacttacaaagaagctatcaaaaggcaaatgtcacaggcttcagcgtcgagttagacaacacgctccaatccatagatggtgatgttggctcttgtagagcactgtcagtggctataatcgtttggaagtggaatacgtatactcaagtaatcctttttgtgcatctagtcactcctagatccctaccaacttttaggtttcctcctgtgtaagccggcaaggggttatccaccatatctgtggcagagtcgatgtattcatttgtacctttggttgctcatcctgtgtcattctttcttattgcttcgtcggtgagagatgttcttgttcagtatagatgattgttcaaggaaattatgggctggaagctataatggttgtgagttaagttctttgagtttagtacagcaactagtagtaggctgttagaagcgaaatctgcaaatttcactacttggtagttgtgattcatatgaccgactaatttgtggtaacttgtttgttccatgcgc

SEQ ID NO: 20302 - DNA, 3313 bp, Oryza sativa
  ref <308>: DATABASE ACCESSION NUMBER: AK070624
  ref <309>: DATABASE ENTRY DATE: 2001-12-06
ggtatttcagcataggcaagccactgcttcttgccttcttccatctcggaaatttcgtccctgcgcctgcgcgagaaagcttggtactttttccagggaggaggaggagctgcaggagaggatcccaagagaaacattggaagagaaaaaagaagcgcttcttttgcggttctggcagaagaagcagggaaggggatggtgaagaggcggctgttcttgctgctgttcttgtgcttgttggctgggtcaagaatcgcttccgctgacaccaatccgcaagatgcggctgcgctaagatctttgatgaagaaatggacaaaaaatgtgcctgctagctggaggaagtccaatgatccttgtgcgagatgggatggaattacatgtgataggaactcaagggttacatcactaaatttattcggtatgaacttggaagggactctaagtgatgatatcggaaacctgactgaactgacggtcttggatttatcctcaaacagaggtgttggtggtactctcacaccggctattgggaagttggctaaccttagaattttagcattgataggttgcagtttcagtggtaatgttccaagtgaactagggaacctgtcacaactcgatttcctcggcctgaactccaaccaattcacgggcaagattccgccatcattgggcaagctgtccaaggttacttggctagaccttgctgataaccagttgaccgtaccaatcccaaactccagggaccatggatctgggtttgatcagctacttaaggcccaacacttccatctcaacaaaaataagctgcaaggttcggtcccggattttttgttcaactccagcatggatctcaagcatatactttttgacaggaacaactttaatggatctattccagcgtctattggggtacttccaaaacttgaagtactccgtttaaatgacaatgctttcacgggtccggttcctgcaatgaataacctgacgaagctccatgttctaatgctgtcaaacaacaagttaagtggtctgatgcctaacttgactggaatggatatgctcgaaaatgtggatctaagcaacaacagctttataccttctgaagttccaagttggttcacaagtttaatcaaattaatgaccctcaaaatgcagtcagtaggtctttctgggcaactgccgcagaagcttttcagcaaccccaacctgcaatatgtagtattgagtgacaatcaattgaatggtgtacttgacatgggcaatatcagcgatgaacttcatgtcgatgtacggaacaacaaaattatctcacttgcagtgtacaacagcttcacaggagaaacccttgagcttgcaggaaacccagtctgtggtgattcacttctgtcaagcatgaagccatgcacagacctgacaactgaacctctacacaagcctccttccattgatgtccagtgtgcaaatccatttgtcgaaaccatcgtttttagagctccttcttttggagatgttgttaagttccttccttcgctgcaagccaacctctcaagcaaactaaacagctgcaccccgaacaacctaggcctggtgtactcgaatgatgatgcatacctgaacgtggatattagagcatgcccagtaaaccagaagagatttaactactcccaggtgctaaactgcttcaatctaacccttcagacttacaagccaccagagatctttggaccttactacgtgaaggcacacccttatccattccatgataaaacttctcgagctgtgttgattggtgttgtgactggatcccttctcctcgttattgggctcacacttgttggagtttacgctgtgcggcaaaagaagcgggctcagaaacttgtttctatcaatgatccttttgcatcatggggatcaatgggacaagatattggtgaagcaccgaaaatcaagagtgctagatgcttcacactggaagatctcaagttgagcacaaatgatttccgagagattaacgcaattggggcaggaggatatggaacggtgtaccgaggaaagcttcctgatggacaactgatagccatcaagaggtctaagcaagggtccatgcagggtgggcttgagttcaagacagaaatcgagctcctttctagagtccatcacaagaacttggttggtcttgttggtttctgctttgagaagggagaaaggatgcttgtttacgagttcataccgaatggaacgctaagtgaggccttgtatggtataaaaggagtacaattggactggagtaggagacttaagatagctctggattcagctagagggctagcgtacctccatgaccatgccgatcctccaatcattcacagagatgtgaagtccaccaacatcctcttggatgagaggatgaccgcgaaggtcgcagatttcggtctctccttgttggtatcagacagtgaggaaggccagttctgcaccaacgtcaagggaacactgggatacctggacccggagtactacatgacacagcagctcacagcgaagagcgatgtgtacagcttcggggtggttcttctagagctcatagtggcgcagccacccatacacaagcagaagtacatcgtccgggaggtgaagacggcactggacatgggagaccaaacgtactgtggcctgaaggatgtgatggacccggttcttcagaaaacaggggatctccgtggtttcgcaaggttcctgaagctggcattgcagtgtgtcgaagatctaggaaccgaccggccatcgatgaacaccatagtgagggagatcgaggtgataatgcaggacaacgggatcagaaccggcatgtcatcgacgagctcttcgttcagcatcgactcgagaacgatgatggccgcgccaaagtacccatactccaacgcatcgacatcgtcgacggcgtttgatatggatagcagggcctttgagtacagtgggaagttcccttctgaaggcagcctgaagaacaggggcacgtaggagggtatggtcagtcaggtcagaggtgtacagcggatgaaaggcctgttcagaatagcagattttacgaagtgtgaaaagaggatggggctgcatatttataggatatttaaggatcaaactacactgtacagaggtcatgaactttacaattcttttgtcttgtgagaaaagaaagagcaattctttttcttcgaaatagcgtataaaagttaaccatgtaattatgtaacttacctttgctcaatgataaaatcatcagagttgtttgtatattaacatttgg

SEQ ID NO: 20303 - DNA, 2165 bp, Oryza sativa
  ref <308>: DATABASE ACCESSION NUMBER: AK070625
  ref <309>: DATABASE ENTRY DATE: 2001-12-06
gatacgtccccatctgtaaactcactcgttcgtcggaggcgacggccatggcttcgccggagctcgccgccggcgatggcagctacaacttccacctccgctccctctccgccgcatccagggactccgccgcggccgccgaccccgcctccgaccccaacctcctcgaatccgtgaggagggtgtgcgagatgtgcaaggaggccaagggggccagcgacgagatggtggcccgggcgttccctgtgatgagcaagctgttccagcgctgcgccgccgcgccgacccaatccgtggcctccagcggcgtgctgctactcaccattctgcagttcttcctggactttggggaggcagtcctgcatgatgctgatggtagcttgaggaccttcttccgctcttgcctaagtagggagttcgctgatcctattgtcgcagaacgtacacttgaattcctgatagcgaataagacaaagatcctgagctcttttcccacattaattccacagttttttccattgttgctgaagctaattgcatcaaatggtgagagattggagaggaagttctcagaagtgcttccgttaatgatgtcagcaggatcttttcttcctctcttcctgtcccttatggatcttccaatgttagtggtagcattggaaaaggtggaaagaagttctggaactctcatcggtagtagtatagctactatacagaagagtgctgctcctgagatgctacttgcactaatggatgaagcatacactggttctgctatagaagatgccattggcaatgcaggttcggatgatagtggtcctctagaccttgctgacccgatgttccttgatcttctaaaagatgagaatgatggtattgctgcaaaacattggacatctcctacgatatcttcaaccttacaggcagcagttaatagcccacaatcggacagattgaaacagtcactgaaaatggcacctcgttttcttacattatattttgctacagcattgcgggacgttaacgactcactcctatgcgctctgattcctgtagttatgtcaagatatgcagcaatgttccctgacaaagtatactccttcgaggtgaggaaaagactttcagatttcatattggctgcattccagcgctcccctgacatcattgcactgctaaagaagcccattacagacagacttggggaggctcatgataatcctgcaaagactgaattagcattgcatttgtgttgggccattggtgagcatggagctggaggaaaaaatcgcaaagatgtagctcgtgaactgtttgaaaatttggagttgctgttatatgaaaatctggctaccagtcgtttgggattaagtcaggacacaggatttgatcctatgggtgcatcttctagaaaatcatctcaagctaggctcctctgctttgtggtgactgccatagcaaagctagcaacgttccataatgagttgcttccaagagcacgtgtatcattggccaaggtcgctcgttcccgaacctcggacaggagagtgtggcaacgtgcttgtgactatttaggtctattgaatgaaccggccatttgtttatctgtactaggaccatccaccgcacaaggaaatggtcctggtattgtcaactggagtgaaggaggaacaaagatggtagctcacattccgttctacctgttagctgaacaaaaaggtgcaccgatccatgatttttcgtttgacgatctcgtccccacggaatgatgtactttcatgagtgcaatggattcatacaatgattccctcgcggacatcatctgtgctgactgccgaggcttttggtggtaatgtcatgaatcatgaagatccaagtggcgtctcttatgagtttatccagttcattattcagtctaaaggcgagctaagttgctttggatgagaccgtatagtttctgggaactgaaatgtttgttcatggggtgaaggttatggcagaagcactcgagtatttccatgtagggattgtcgtatatatgtaatcttttgaagggtaatcagtgatgtaaataataagagtggcataaattttatcaaggagtattaaattgattgtgctgttttttgggggatatgcgacagttctgatagaatactgttgaaggc

SEQ ID NO: 20304 - DNA, 786 bp, Oryza sativa
  ref <308>: DATABASE ACCESSION NUMBER: AK070626
  ref <309>: DATABASE ENTRY DATE: 2001-12-06
gtccatccacccatagctatctctagctagcttgcacattcttcattcttcttgcaatcagagctagagaaaaagagtttgagagagatctaagagatgtcaggggtttgggtgttcaagaacggggtggtgagattggtggagaagcagcaggcgacggcggggacggcggtggcgggagggaggaggaaggcgctggtgcacacgccgtgcgggcaggtggtgtcgtcgtacgcggcgctggaggcgcggctgacggcgctcgggtgggagcgctactacgaggacccctccctcttccagttccacaagcgtggctccctcgacctcatctccctccccgccgacttctccgccttctcctccgtccacatgtacgacatcgtcgtcaagaaccgcgactccttccgcgtcgtcgacgcctaaattgacctatgtataggctcgcatgcatgcaaggtagacgaccatcaccttgcatgcatgcaggctatcattctctcttcgtctccgtcttcgtctttcatctttgttgtggtgtgtgtgaatttattatacttcttatgactgtgtgtgtgactgtgtgagagttcatggagagtgatgagtagtggtatacatatgtgtcgtcgctgatcgatttggtttattaccttgtgggtgggtattaattatcagcagtgtgatatatcaattgcttacttgtatgtgtatcatgtacatgagtgagtgtggctgatgcatatatatagaggtctttaataattatgtactatatatttgtgc

SEQ ID NO: 20305 - DNA, 3171 bp, Oryza sativa
  ref <308>: DATABASE ACCESSION NUMBER: AK070627
  ref <309>: DATABASE ENTRY DATE: 2001-12-06
gccttggccgcggccgcagagaataactggagattcgccgtcgagcgaatgcagcaggctatagcggcgtagcggcgacgaccgccgacggggatggcccctgtggcgacggtcttgacggccgccatgtcctcgtaggccgcctctgcgcagtaggcgccggcggtgccgtcgcttcgactacggaggttcgtagctcgcgctctacgccttctagatccggaatgattctaggggatctgcttgtattctgcatcttgcgcgtaccacgttttttatgaaattattgacgaatattttaggtctcttcagtttctgcgtgcttacttcaagtttcggcatggagatgtatttgggttttcgcgttgatgttctttgtattgcttttaggtctattgctgatggactgacatctgattgtttaaagtagctagtgcgtatttattcatcctcaatgatgagagatgcattactgaagattttttcctaaaaaaaactgaatgtatatgtggcaaaggcatatccaagtgggcttttaattgtaaatatgttcattgcacttctggtccgcattagtgtgacagcaaacaacacaataagcatattacttttgatctgattgatagaccagacagctgtctgatgcttctattgcctatctcatgcttgattatagcatatttgcattgtggtcttgattgtaaggctgtggttgggattcactagtttcacatacttggaaagaattcttggagctacctttctgggaaaaccctttaataaagcaattctaactcttatccattaacaaaaatgccttcagttgggtgtaaaaatttatgtattttctgcttatctgactataacgtgttatgttttcttggacgtttttatgattggtgccccaattttcaccatcatattttctgaaaacatctgtggtgttttgatgaaatgcaggttgtcagttgtgttaattcttcagtcatccgaattgttgagattccatattgtttggtcataacataaccagtatttttatttctgtcattcaaaactctattgtgctctttattgcttatttatatctaatcaacacttgatatagtgccagcctaaaagtaaactagaaacctactaacctagtgatggcacattgttgtcttgtggccacaaaaggatttccttttttgtcttagcaggtgtgcttgtggcaggaagtattttgacgaatttgttgagttttttcttttggggtttacattgtaaacttatatgtgatttgcaggtttctggaccaaggtccttattgtggattagatttggatgattttaaaactctttaaacacaggatgcagaacagctcaataacagaagcgctggaccctggaggtattcctatttccatgttgatattaatgcagcttgatttttagtgtcatcattttttcattgaaaccaattggctcggtagggctatctccaatgctggtggaatatgaagtccggagcatattgcttagtttaaatttgttgtggtgaatagcgaggaaatcagctctttatgagtttgctcaagattgattgaagccagaccttttggtgaatattatcaaggacagttcatatggctagaggaataaacgcagccacacataaattatctacctgtaggagaataacccctgaggattgacaaggaatcaaggtgatattttgctacctaatgctcttcaaatagttagttgaattttcttccgcctattaagaaaatgcattgcatcatattttgtggtctcctcctccctagtccctaatgctgtatgcgtgtggattgtgattagtgttatggcaatgaggagaaatgaaaggccggtcttacggctgcctcccattcccttcccgattcaattagtctctggtatgggacgggatggtagtagcatgatgtgcagttcggcgaaaggttctctgagccattctttctttacctccacttatgttcagtacactttatttcgtgttctttttagggtaaaaatattgcaggttattagggtcctcattcagtgtgcagatatacaacaatgcacgcacgttggaatttgcatagtcttgcgattttgttcttgcatactcttccagaagcattgatagcttttgtcgaactcctgattttgttcatagtttcagttatttgctggttatgggcccttccagccagccttcctctggattcttgttcttcgttactatcatcactgggcatcataggcggggctccgccgtcgctgttgctctctgatccctagggtttactttcccctcctcctcgaactctagggtttttccgctcgctctccgccaccatgacggccgccgagacgcaggaggagctgctccgcaagcacctcgaggagcaaaagatcgagggagatgagcctatccttgaggatgacgatgatgacgaggatgatgatgatgacgaggatgacaaagatgatgatgtagaaggagcaggaggtgatgctagtggaaggtctaagcagagtaggagcgagaaaaagagcaggaaagccatgcagaaacttggcatgaagaccatcactggtgtgagccgtgtcactatcaaaaagagcaagaacattctgttcgtcatctctaaaccagatgtcttcaagagcccaaactcagacacctacgtcatcttcggtgaggcgaagatcgaggatctgagctcgcagctgcagactcaagctgcagagcagttcaaggcacctgacctgagtaacgtcatctcaaaggccgagccttctgcagcagctcaggatgacgaggaggtcgatgagtctggcgtcgagccgaaggacattgaactggtgatgacacaggccaccgtgtcgagatcgagggcggtgaaggcgctgaaggctgctaacggtgacattgtcactgccatcatggagctgacgaactagtggaatcacgaaacgttgtggtggggatggaacttgtgggttaaattttaatgttgagggcgcattgataggatgaaccctcctccttggttatgctatcttgagagcggtaggtagtgttacgaaacttcaaggcctatatcatcctttgataagatcgactgtttgctatttaatatgcctttttcatcc

SEQ ID NO: 20306 - DNA, 1648 bp, Oryza sativa
  ref <308>: DATABASE ACCESSION NUMBER: AK070628
  ref <309>: DATABASE ENTRY DATE: 2001-12-06
gctcgctcgctattcacgcgaccacgcaaaccgaccttcctccgtcgctcggccagcggccggcgccggcgcgcggggtccacctgaggcggccatccccttcccaggctctcaagccaggaatccgctcgccgtgcgacttaggcggagttacgagagggcgctccctgccgtcgcgaaccaccatcgccggcgcgggcggcgccgaagggggccgcggccaagacggcggccgatcagcttgagagattgttgtcatggcagcgaaacaatctggtgactactcggccgcgaaaggtgatgcgcattgttatcaactcttggtcgaggttcatgccccattacatccctgatgatgtgatgttcaacatcctgtcatggctgccatccaagtctctcatccgatttaagtctgtgtgcaaggcttggcatgccatgatatccagcccgtgtttcactgatgctcaccttgagtgttccaagagaaacccatcgatactcatggtccctggtgcttatgagaagcaggaggacggtgagaatatcgccttcatgatggtcctctataagtaccatggaggtaaaacaatggaactggtccatatgcagaactttccgctaggcattggtgtatggactcgccctgtgcactgtaatggtttactcctcattcccaccatgaacctcgaaatgatgatctgtaacccttcaacaagacagattgttttcctaccaaaagtcagtggcaacatttgcacaggcacaagggctggatttgggtttgatcctcacagcaacaaatacaaggtggctagatctttctatcaaagggatagtgaaacacaagaattagtctgcaagtttgaagtgcttactctgggcactaatgcatggaggcaaactgaagatccaccatatccaattgatgctttaactccagtccatgtgaaaggcgccatctactggatagtgtgtagttcactttgcccagatccacctaatgcattcctccgattctgtttgactgatgagaagttcagtttgtttccgtgtcctccatccaatgtaaagtctgtccgtttcacagaggtggagggtgaactgtgttgtgcttgctttttcagtgagacgctagcgctggagatttggaactgcagtggtgggcagaaccttgaatggactcgacgctatgttatacagattccacctgatgttgttatgaagtaccctgtagaaagaccccctttaattgtttttcgtgaaaaaatgttgctgctggcattcaaaaaggtctacaggtatgatatcgaaacctgtagaatagtagaattagcttcaaaggtttcagacttcacctgctatgaaccatatttggagaaggaagcaagggatttgcatctatttaattatgctgagagtctagttccaattagagaattttgagaagttacttctgtctgttagtgtgagcttctccacaacttgtaatgatccaaggtagggagaagtttgttttttttggttgcaagtgtcagccaaggttcattttcattgaattcatctgtgctactattttactgtaacaatcaatttttctttctagcggtattgaccatgaaacgcaataagtatcatgtgaattgtcctc

SEQ ID NO: 20307 - DNA, 1026 bp, Oryza sativa
  ref <308>: DATABASE ACCESSION NUMBER: AK070629
  ref <309>: DATABASE ENTRY DATE: 2001-12-06
ggaggagaaccttagccctcgagggcctcgagccctcccctaccttgttctacctcctcccatggaggtagaacaagttctatctatcacctccaaccccaaggtagacagtatcaccaatggcgacaatgtgatcatcatccctagtgtgagcacggaggagaaggagcacatcaatggagctgcagagacaaatcatgttgtgatgatcaccgctgcttccatggacagaaccgacggcgacgacaggacgatgaaggaggaggagacggacggcatcgcaatcgccaggagcgcctcctccaacggaagccggcagcaagacaagaagcggggcgcgttcggcctcttccgggcgatgttcatgtccttcaacggcagcgccagcatcaagaagagggccgccgccgccgccgccaccatgggctatcagaagaaggccgaggcggccggcggcggcgcggcggctgacgtggagaggtcgtccagcgacgtcgcgtcgtggaagaacctcgtcgacggcatgcgcccgctccgcctccacggccacctggagtactacccgccgccgtcgccggacaggagcgatggcacgagcatgaccagcagctactcgtccgcccaggacctgcaggagcttgtcaatggccatggaaaagaagacgaggaagaagaaaagaattctctggagacggaggacggtggatgcagcccgaatccgatcgacatgcaggccgaggagttcatcgcgaaattctacgagcaatttaggctgcaaaagtcggactcattcaacaaccgagcctattgatcgatctcagtgttttgatcttgaaattagcattcttcttctcttccgatgtacatggcggatggggagcaagaaaaatccattgaaatgaagtcatgaagaaaagtatatacctcaatgtcgcgtccataatcacattcgctgtttcttctccatgtaatctccgtccttcaaagaattaatggtattcgctagatttcagattcttgaaaagt

SEQ ID NO: 20308 - DNA, 1022 bp, Oryza sativa
  ref <308>: DATABASE ACCESSION NUMBER: AK070630
  ref <309>: DATABASE ENTRY DATE: 2001-12-06
ggcacggcctagctacccaccccccaccctacctctcctccgccacccgtcgccggccggcatctcgctcggagccagcgcgccgcggcggccggagcccggagggacaacgcaacgatctctctctagctagagctagagctatagcttagctcagctaattataatacatagctaggaagaattaacaattaatggggaagcgcagtgcgccccggtaccccgacgacggcggcggcggcggcggcgggatttgctgcgtgctgtgctggtgctgctgcttcctgttcctgatcgtcgcggcgctcgccggcgcggcggcgtacgccctgttcctgtacaagcccaaggcgccgtcctactcggtgagcaacatgtcggtgtcgcagttcgacttcaactccaacgacctgacgctctacaccaagctggtggccaccgtgcgggccgagaaccccaacgagatgatcggcatcatctacggcgacggctcccgaacggtcgtctcctaccgcggcacgccgctgtgctccggccacctccccaccttctaccaggggttcaagaacgtgacggtgatggagatctccatggaagggaggcacggcttcgggtcggggctgcagagcgcgctggaggagagcgagaaggaagggaacgtgccgctcgacgtgttcgtcagcgtgcccgtgtcgctgcggttcggctcgttcgacgtccgggaggtgagggtcaacgtgcactgcgcgctcgtcgtcgacagcatctcacccaagaagaagcccaccatcaagtccgccacctaccagggcaacgtagagttctgatccattgcatgcatcgaacatcaatgccttcattaatttcatttaattgtttgttttaatttgttattaactttgctgttcagtggagttggggagaaagtatgtttgtgatgtaaacactgtagtaagaaatggttccaaactaaaattcctttggttgaagttatatgcagaatgcagagacatcttttgatc

SEQ ID NO: 20309 - DNA, 1981 bp, Oryza sativa
  ref <308>: DATABASE ACCESSION NUMBER: AK070631
  ref <309>: DATABASE ENTRY DATE: 2001-12-06
gatcgtcttcgttagcagtgagagtgacagacgacacatagaaggttttcatggagaaagtactggtgctctccttgatatgtatttcactctgccaaggatgggtggtgcaatctttagaatatgatcatacagcaagtattgagtgccttcgcgatccgatgaagccgctgtacaacggcggcatcatccagaacggcgagttcaacagcggcctcatgggctggtccacgcaccgcgacatcaaggccggcctgagcagctcgccgtccggcaacaagttcgccgtggtgcagcgcgccgactccctctccggcgccgccgtgccgtcgcgcagcgtctaccagaagatccagctgcagggcgacacccactactcgctgtccgcgtggttgcaggtgtcggccggcgccgcgcacgtgaaggcgttcgtcaagacgcccaacggcgagcgcgtcgtcgccggcagcgtctccgcccagtccggctgctggagcatgctcaagggcggcatgaccgcctactcctccggcccagggcagatcttcttcgagagcgacgcgccggtggacatctggatggacagcgtgtcgctgcagccgttcacgttcgacgagtgggacgcgcaccggcagcagtcggccgccaaggtgcggaggagcaccgtcagggtggtcgtccgcggcgccgacggcgcgcccatggcgaacgccacggtgatcgtcgagctcctccgggccggcttcccgttcggcaacgcgctgaccaaggagatcctggacctgccggcgtacgagaagtggttcacgtcgcgcttcacggtggccacgttcgagaacgagatgaagtggtacagcaacgagtgggcccagaacaacgaggactaccgcgtcgccgacgccatgctcaagctcgcccaaaagtacaacatcaagattaggggacacaacgtattctgggacgaccagaactcgcagatgaagtgggtgacgccgctgaacctggaccagctgaaggcggcgatgcagaagcggctcaagtcggtggtgacgcggtacgccgggaaggtgatccactgggacgtggtgaacgagaacctgcacttcaacttcttcgagaccaagctggggccgaacgcgtcgccgatgatctacaaccaggtgggcgcgctggacaagaacgccatcctcttcatgaacgagttcaacacgctggagcagcccggtgaccccaacccggtgcccagcaagtacgtcgccaagatgaagcagatccagagctaccccggcaacagcgccctcaagctcggcgtcggcctcgagagccacttctccaccccaaacatcccttacatgaggagcgccctcgacacgttggcgcagctcaagcttcccatgtggctcaccgaggtcgatgtcgtcaaaggacccaaccaggtgaagttcttggagcaggtgctgagggaagggtacgcgcacccgtcggtgaacgggatgataatgtgggcggcgtggcacgccaagggttgctacgtgatgtgcctgacggacaacagcttcaagaacctgcccgttgggaccctcgtcgacaagctgatcgccgagtggaagacgcacaagacggcggcgacgaccggcgccgacggcgccgtcgagctcgacctcccacacggcgactacaacctgacagtgagccacccgtccctgggaacgaacgccaccgtccgcgccatgacggtggacgccgcgtcgttggcgtcggagcgcctggtcaacattaaggtctaggagagtgtgacacgtacattgtcctcgtgctagcgtgctcgattttttttttgtcaaacaattttgtacttgtttttatttccttttttgcttaattagtgaataataattggatcacttggttcagcttaatctatgtcaggtcagttatacgcctagccactgcattaatatcgcacctaactttaaaactt

SEQ ID NO: 20310 - DNA, 1991 bp, Oryza sativa
  ref <308>: DATABASE ACCESSION NUMBER: AK070632
  ref <309>: DATABASE ENTRY DATE: 2001-12-06
gactaccctcgccatgcttccggtgcttcctcttccctcttccttgttccaagataggaatccaataagctgtcctgttagttttcagtttttcatccaaaaggtgtagattaggaggtgaaaatgaaggtgcaagtagaggactagaggttccttcaggttttctacttgccttgcgcttgcagattttgcagagaaggatatcctatcaccttgcaaacatggcgcaggctctgagtttggggttgcttcttgcgtttctggcaattcaatcctgcatcgccattgagctgactgatcacatcgacttgtggcctatgccaacgtcggtgagccatggaacacaaagacttatgtcagcaaagatatcacaatgtcaatggagggaagcacgtatcctgacgggaaagggatcttgaaggatgccttccagagggtagttgatttaatgaaactgaaccatgtcgttgatggtgcaaacccaagttcttttgtactcactggtgtaaatgtagttgtccattcacctgaagatgagctcaaattcggagtagatgaatcatataacttatctgttcctacagcaggatatccattgcgcgtacagattgaggctcaaacagtatttggagcacttcatgctttacagacatttagccaactgtgttacttcgatttcacatcaaaacttatagaactcatctcggctccttggagaatttctgacacaccaagatttccttaccgaggacttcttattgatacctcaaggcactaccttcctgttacggtaattaaaaaagtgattgatacaatggcctacagtaaattgaacgttctccattggcatattgtggatgcacagtcatttcccattgaaataccttcataccctaaactgtggaacggttcatattctttttcagagagatatacgacgtctgatgctgtagacattgtacgatatgctgaaaatcgaggtgtaaatgttatggctgagattgatgttcctggtcatgctctgtcatggggcgttggctacccatcattgtggccatcagatagctgcaaagaaccacttgatgtcagtaacaacttcacgtttggagttattgatggaattctttcagattttagcaaagtttttaaattcaaatttgtgcatttaggaggtgatgaagtcaacacaagctgctggactgcaacaccccacattaagaaatggttggatgataaccaaatgaatgtgtcagatgcatacagatattttgtgttgagatcccaaaagctagcaatatcacacggttatgatgtcatcaactgggaggaaacatttaacaattttggagacaaattggaccgtagaaccgtggttcataactggcttggagaggatgtagcaccaaaagtggttgcggcagggctgagatgcatcgtaagcaaccaggataagtggtacctagatcacttagatgccacatgggaggggttttacacgaatgaacctctgaaaggtattgacgacccagagcagcaaagtttggtcattggtggtgaggtttgtatgtggggcgaacaaattgacgcatcggatattgaacaaaccatttggccacgtgctgcagctgctgcagagagactatggactcctattgagaagattgcagaagacccaagattggtcacgtcaagattggcacgcttcaggtgtttgctgaaccaaagaggggtagctgctgcaccggtggctgggtatggccgtacagcaccatatgaacctggtccctgtgtaaggcaataggatattcatagcaagatgaaggtagtatgaacagaggataaactttgttcaggattcacttttaccaagtgtaacatcagcatctcaatattcagatagttcagtggttagactattgaatatcctaagttaacctattatccctatttttcccctcttccaattttcaacagaataattttgaggattc

SEQ ID NO: 20311 - DNA, 1763 bp, Oryza sativa
  ref <308>: DATABASE ACCESSION NUMBER: AK070633
  ref <309>: DATABASE ENTRY DATE: 2001-12-06
gctctcccggtcgcgccgccatctcctctcccaatcgcgcgcatccgacctccttctttcccaatcgcgccgccttctccacccccggcgcgcgagcagccttctccacccccggccgcgccgccgcgttcccaactccatgtcccgtcttcttccctgaaccgcgccaccgccgtccctgccctcactccgtaccccgcctttgtctccaggctgcggcgacgcggccccaactcctggatgcagtgtctcacagctgatgatgtaatcaggaaaattactgaattttttcaatccactgggacccgacgatttgtcacacaacggcagtgagacaatcagtggagatggagcctgcaaatgcggaggacagtgtcgccaaagccctacggtaccgcgatcaattggtaagaaaccgaacccagtccagaggaatccatggcgtggttgaagaagatgaaggagatggccatcattgcttgcccgaactccatggcagcaattcgttccaagtggtggaggatgcatcctcggctgcacgtcgtgggcgccgcggcgggcatgatggtggacgtgggaagagacccaccacacaatcgattagcagtgcaccatcctcggcagcacgtggtggtcgaccgaggaaggcgccatacaagcagccacggccatcgagcagtggagctgctaccggggtaacggccagtgcagacaatctctgcgcagaaggatttgtcgacagtgagacatgtaatggaagtggaatgaaggagtttgacaaagcagaatggtctaccacaaacactaggatattttgtgaactatgcgtagaacaaatcgaagccggcaataggcctatcgggataatgactactagggggtaccagaacattgctgtcaagtacttgcagaaaacagggctacgacacagcaagatgcaattgaagaaccgatgggatatactaaaagccttgtatagcttttggcttggcctcctcaaagatacagggcttggatgggatagtacacaaggaacagtttcagcaagtgataaatactggaagcaagtcactaagggtcattctgaatggaagaagctacaacatggtcccccggattgtgaagatttattgagtcaaatgtttgctgaggttgctgttgatggttcttctgcttgtgcacctggagaggatgttggaggggctggtgtacaaagccttgatgacacaccagtggacatctcattgcatagatacacaacgaataacaaatcagtgaaacgagggtgtattaccactgaaaatagtccactgaagaaggttaagaaccccatggttaaggtgatgaagaatattcagtccactttggacaccaattgtagtattgccaacaaggtgatgcaaggtgaatttaggtacaactctattaaggaagtgatggacttggtagtggagtgtggggcagcagaaggaagtgccgagcatttcatggctacgcaattatttgtgaaatcttttcacatcgtgacgtgttcaagacttttaccaccaaggagggaaggctcagttggttgaagaggtggtgcatgaaggaaggcttggagtaggatagtgctaattatttatatgcatgaacttatcatctttgtttaaattttgcgagacaatatgtattagcaagacaacttctatttatatgcatgaactaatgaattgcccatgtaatatgacgctttaatttgaatgcatgaacttttatgtgcc

SEQ ID NO: 20312 - DNA, 2058 bp, Oryza sativa
  ref <308>: DATABASE ACCESSION NUMBER: AK070634
  ref <309>: DATABASE ENTRY DATE: 2001-12-06
aaaaacccccccgcttccactgctcgccggcgccgcgcgcaacgccgcgcgatgaacctagtacgctgaagagtccagattcgtagaatggcgcggcctataagagcacgagcaccccccccgcgctcggttcagtttacacgcggcgtccaccgagagagaccgacctccaagaagagcaagaagcgagtggggaacgggggattaacaagaagctcgattcctcgctgctcgtgaaggaatcgctccccacgacgacctggacgtgtaccgatctgacgtgggttcaggacttcaggtttcttgagttcttggttgtgctgttcatggtgtggttcggttccacagttcttggtttggtcttcccgccgagaatctgatgcgagattcgtctctgggttcttggtttgtttgcctgattcgatgatttcatgctaatgaattggttgcattcattgtttcagcggttcgacctgcaagaatttcgccttccctgacgaatttgatcgccttcccgcgttctgaaaccctcacgcattcagagaaaaaatggcttctgagtgggactcaccatgccagttttgtggcaagaacttcaagagaagaggtgatctgctaaatcatgagttgacttgcaagtacatttcggatgtgcatccgcaaacagaatcttcaggagatgctcaggctcgcaaggatattttgggatttcatataccaaggcaaaagcgaacagttcccgcattcccagcttctgattatgctcagggtggcatcaatggtgcaacaagtgaagtgaaagtggattgggatcccgaagaagagactgatgttttagaggctctcttgcttctcagggagcaacctgcctatcctggagaagagacattttctgatgatgaaccgggtgctggtaatgtagacgatgaaccagctgctagtaataatccagatcaggtgctgaagatgtgctctgacaagggttcatctcctgtggaatgttatggaggtgatgagaggagggtcggtgcgtgcgccattgcgggggtggaggaggatgatctcagcccaaatgttggttgtcgaggggtcaccgattgtgttgatgagtctgatgtgattcaaaagcaaaaaaggaagcctgatcttagcgttgccgatctcagggaccttgttgagatgaaacagcaaaacatgaaggctgataccaatattcatgaccaaggacatccttctgtgatgcagatgcaaaaaaatgagcttagtcttgatctactgcctcacaagaacagttcagatcacgaggtaccaacccttagtgtcagctctatggatgatcccgatggcctggtttccactgatacaaactcagataaggagacggagactgtcaatgttggtattgatatcaatattcctgagcagagagaatcttcagtgacgcggatgcaaaacgagaagcttggtctcaatctgctgcctcgcaatgacagttcaggtcatgaggtaccaatcctcagtgttagctctaccgatgatctcaactccctgattcccactgatacaagctcagataaggatacaaactcaaatgtagcagacaggttaggccactgtcctgcacaagagtagtagtggagtccttgttgcggtgaaaaaggaggtgcaggcctagtgtttctgatcaaactcttgaagtgaaacctgagggtgaattctgaactgcagcaatgaagggtggttcagtgtgcgcctacgttttgtgttttgtctaactgatgatggttttttgattcattggtcttcatattcatcggtctgaggtgaaagacatgatttttgtctactggtatatagttacaggctataatactcatactatctttttgtttcgtaagcaacaaatgtacataccttttatgaatggcaaagtccatatagttcctgtattctttccacacttgcttccatagtgaagctgtgttgttcacatagatgcaagtgatgaacattttactactaatgatgtggagttctaatgcattttactttggcttt

SEQ ID NO: 20313 - DNA, 1623 bp, Oryza sativa
  ref <308>: DATABASE ACCESSION NUMBER: AK070635
  ref <309>: DATABASE ENTRY DATE: 2001-12-06
ggttttctcaggtgatagggtttaggattacccccaacgttttatttttgtaaagaaaataggggattgctcgatgttgtctgtctatgtagcagtatgatttctggtctggaatgcatgccatagttgttctagatttattttagataatgagtagttgactctagtagtttagttagccttgcaacgatctctgattgattcagagttctgtgcctgaaattccttgttggctatttatccttttctgggtgtttgttgtttcaaatagtttccaagtatttcttttgagagaagaacttgagattttgtgggaagcaaatgcttttgattagtgcctacaaattgacgctaatgtttcctttgttttgcaaaggaaagcgcatgtacaatcctcatgtatttttattaatttttcccttacagaggtcgagaaggtggtggacaaaatccaaggaaatgttccaaaagttgaatgggacttcgaaggaattcactattttgacgatggccccctcactgtccagtacctcttcgtcctggatgctctgaacttctgcttctggccagataaggatctgagctatgaccatttggcttctggactaaagttagccttagagaaagataagacagcccttgatgcagatcgtctccagagttacactgggcctcagctccgccaactgctgaactggccacgcccactgccaattgaggaggaaagagtacggcttcttcatgaggttggtatggaacttgaaagaagctttggaggtgaagctgcaaatctagtgaagtctgctggaaactctgctgctactctaatcgaacttattacccgtcattttcctggttttcgggatcattcactttacaaaggacaccaggttttcttgtataagagagctcagatatttgttgctgatctgtggggtgcttttaagggacaaaactatggcgagttccacgacatcaagtccatcaccatatttgcagactatattgttcctgctgtcttgagggagcttggcatactgaaatatggctccaacttatcttgctcaattgattcgagcagtgagattgtgcctggaagtgaagaggaagtggagattcgtgcttgttctgtatatgccgtggaaaaaatgagagagctcatcaacaagaagtttggaaagcagcttctgagcattgacatcgatctatggctctggtcatgtggcgttcagaacatggcgttgtcacatcaccgcaccctctcaatatattactgagagccagcagctgctgctgggcgccccctccgtccagtgtattgttccagcaactctctactactagtagctgctatagctactgaatttttgtccctcttgggagtgcacaaaagtgcacgctattgtagacttgttggttcgtccagattctgagacaagaaatctttagaacagctcaaagtttccagttgacctgtagggtgtagtagggtgtgcaattggatgcacttggactagaattcagaaccattctgtagagtactgtgtttttcattgatcttgccaaaccattctgtagagtactgtgttattctcaaactcaacaactgcaaagttcatcagt

SEQ ID NO: 20314 - DNA, 2675 bp, Oryza sativa
  ref <308>: DATABASE ACCESSION NUMBER: AK070636
  ref <309>: DATABASE ENTRY DATE: 2001-12-06
gggcgtaaaagaaacagaaatctctcgtctcgtcgtctccgctccttgcgccaagacgagtcgcgggtgaacaggggaggggacgccggacgccgatctccatctggcgagcagagcaacggaggggaggtgcgccgatctccatctggcgagcagagcaggggaggggaggggaggggatcgggcgaaatttgtgaaatctttcagttgatgaaatcttaaaatcatgggagaaaatactggcgataatccaaacatgtcaattcttcaaagaattgccacaagtgatgttccactggtgaaagagtatggtctgcctggaattattggtgccattctacttgctgtagttattcctatcatgctttcttccatattcaacaaaaagggaaagaaaagagcagtacaagctgatgtgggtggtgaggcaggacttgccatgcgaaacagtagattttccatgttagttgaagttccatgggagggtgccaccacaatggcagctttatttgagatggctagcaaaaaataccctcgacacaggtgtcttggcacaaggaagctaatcaatagagaatttgtggagtcacctgatggcaggaagttcgagaaattgcatttaggtgaatatgaatgggatacctacgcagaagcatttagtcgtgcatgtaatttttcttctggtctcatcaagttgggtcaccaacgagatagtcgtgctgcaatatttgctgatacaagaactgagtggatcattgctgctcagggatgctttcgacaaaatctaacagttgtaactatctatgcatctcttggcgaggatgcactggtgcattcactgaatgagacacaggtttcaactctgatatgtgattcaaagcaacttaagaagctacctgcaatcagttccaagttgcagagtgttaagcatgttatctatattgaggatgaacctgttgaggctgaggtactcaatcaaatgaagcactggacaacattttcttttggtgaagttgaagaattgggtaaaacatcacatacagatgcaagattaccttcaagcactgatactgcagttattatgtatacaagtggaagtacgggtcttcccaagggtgtaatgattacacatggaaatatggtggccacaactgcagctgtcatgacaatcataccaaaacttggcacaggggatgtttatctggcataccttccgctggctcatgtctttgaactagcagcagagactgtcatgttagcttctggtgctgccattggatatggctcagctctgactatgacagatacatcaaataaaataaagaaggggacaaaaggagatgtttctgcactgaagcctactcttatgatttcagtccctgcaattttagaccgcatcagagatgccgtgtttaaaaaggttggtgagaagggtggtctgaccaaaaagctgtttgacattgcctataaacgaaatcttggagctattgaaggaagttggtttggatcctgggcaccagagaggatgatatgggataacatcatttttaaaccaatacgttccatgcttggtgggcgcattagatttgttctttgtggtggtgcacctctatcgagtgacacacaaagatttatgaatatatgtcttggtgtaccagtaggtcaaggctatggattgacagagacttgtgctggagcagccttttctgaatgggatgacacaagtgtgggccgtgttggtccaccccttccttgttgctatgtcaagctcgtttcatgggaagaaggtggctataaaatttctgattctccaatgccccgaggagaggttgtagttggtggatacagcataacaaaaggttatttcaacaatgaagcaaaaacaaatgaggtctacaaggtagatgagaggggaatgcgctggttttacactggagatattggccagttccatcctgatgggtgcctcgagatcattgatagaaaaaaggatatagtaaaacttcagcatggagaatatgtgtctcttggcaaggttgaatcagctctaactactagcaattatgtggacagcataatggtttatgctgatccatttcataattattgtgtggcgttggtagtgccggcgcaccaggccttagagcagtgggctcaaaattctgggattaactacaaaaactttgatgagctgtgccacaatgatcaagccattaggaggtccagcaatctctatcaaaggctgcaaaagcagcgaggcttgagaagtttgaaataccagcaaagattgtgttgctgcctgaaccatggactccagagtctgggctggtgacagctgcacttaaactgaagagggagcagataaagaccaaattcaaagatgatctgggcaagctctatcactgaatcagctatgatgtctgctggggcaccattatggatgaaataatctatgttcttttgctatttgtcatccgcaaggctctcttgacgggatgacctgctcactaaattcagcgtgtagtcaataccccgaatgctagacccgggaaacgactgggacgtggagcagtgtaattatgggatttctccgtgccttgttaggataataaatttctcaagaccggattaacctgcttctgttcttctggttaataatatatagttgcatgttc

SEQ ID NO: 20315 - DNA, 2649 bp, Oryza sativa
  ref <308>: DATABASE ACCESSION NUMBER: AK070637
  ref <309>: DATABASE ENTRY DATE: 2001-12-06
gagtggagtagcttgctggggcttttcccctcgcagcgcaggccgctgcttcttcttcttcttccttccaaattgcaaatcgcaatgccaaagccgtcgcggcatccaatcttctccttctccttcacctccacaagctaggagtaataagctactagtatgtactagttgttgcttgttactagtactagctagctactggagtactcctagtaggcagtaggcatatggacccgtaccggtcatcgtcttcgtcggcgagcagccccgccgccgccctcgccatgggccgccgccattactacctgcccgccaggcccgcgcgacccatctccttcgaggactcccccgactgggccgacgacgacgtcgactccatccacctcgcaaccgcatcggcgtcggcgtcccttcccaccaccgcttacccctctccgagtccgacgccctcctcctcctccgccgcctgcagaggaggagagcgcaaggtggccggtgccaccctggtgtggaaggagctcagcgtctccctcactcgctcacgctcaggctcaggctcagctgaccgccgcgtcgtcaagagctccaccggctacgcgctcccaggcaccctcaccgtcatcatgggccccgcccgctccggcaaatccactcttctccgggcaatcgctggccgcctgcgccccgccgagcggatgtacggccaagtcttgctcaacgccaccaacacacgcttgccttatggatcttatggttttgttgatcgacacgatgtgctaatcgactctctcacagtacgggagatgctatactactccgcgcacttgcagcttccgggcctattctcctcaaagacctccatagtcgaagatgctatcgcagccatgtccttagctgactatgctgacaacctcattggtggccactgttttatcaacagcctcccagctggagaacggaggcgcctcagcattgcaagagagctagtgatgagaccacacgttctgtttatcgacgagcctctctatcatcttgacagtgtttctgcacttctactgatggtaacattgaagaaacttgcgagcacaggatgcacagtcatcttcacaatgtatcaaagcagtacagaagtttttggacttttcgatcgaatctgcttgctttcaaatgggaatacactcttttttggagaaacattgtcttgcctacagcacttctcaaatgctggctttccatgtccaatcatgcaaagtccatctgatcacttcttgcgggcaatcaatactgattttgacagaatcatagccatgtgcaaaaatttgcaggatgatcaaggggacttttcatcagtgagcatggacacagctgtggcaatccgtacgctggaagcaacatacaagtcatcagctgactctgttgctgttgaatcactggttgcgaaattgatggagaaggaaggtcctcacttgaaaagtaaaggcagagccagtaatacaacacgaatcggtgttctcacctggagatcattggtaataatgtcaagaaatcggaaatatttctggagcagatttgccttgtatatgcttcttgccctctcagtcggcaccatatttaacaacgctggtcattcattatcatctgtaatggtaagggtttctgcaatatttgtgtatgtatcatttgtcatccttctaagtgtttctggagttcctgcccatattgatgagatcaagatatattcccatgaggaagcgaatcagcattcgagtacaatggttttcctgctagggcacttcctgtccagtattccgtttctatttctggtcactatttcgtcatcgctggttttctacttcctgataggactcaggaatgagttcaacttgtttatgtattttgtggtgaccatgttcatgtgcctgttggcaaatgaggcacttatgatgattgttgcttacatctggctcgacacttacaagtgcaccttaactctcatttgcttatacgttatcatgatgcttgtgggtggatattttcgaatccgagggggtctaccgtgcacagtatggaagtacccattgtcgtacgtttcgttccatgtgtatgcagttgagggtttgcttgagaacgagtatgtgggcacatcgtttgcggtcggtgcgataaggacgataccaggtgtccaagcagttgggggctcatacgacatctcgtcttcagcaaacgcaaagtgggtaaatctgctggttttgtttgtgatggcagttggataccgtgttgttctctacgtgttgcttcgtctgaatgtaaggaaacacatgaggttgcttggcagctggtgctgctggagctggacaccgcaaagtgactactactccagtaactagtgtgccgtccaagtagcctctgtctaatgaatgaatccaggtgactcaactgactcctcgtctgccatgtaccatcatgtagagtacaagggggcgaaatgcatgcacatgtatattcattcttgatcatgcttacatatgccgtactgtgtctgtctatgtatgtttgtactatgtatcacagacggacatacagacggtttagtttggggattgaattgaagatgatattatcttgttgtcctgagtatgtatatgttcc

SEQ ID NO: 20316 - DNA, 1834 bp, Oryza sativa
  ref <308>: DATABASE ACCESSION NUMBER: AK070638
  ref <309>: DATABASE ENTRY DATE: 2001-12-06
gagtccgtcaccaactactccctcctccccgccgcgccgccgcgccacagtcgtgggcgaagcggacaccctcggcgacgatacttatggccgccgccacctcccaatccttcctctcgccggcgcccaacccccttctccgcccgaggatcctccccttccccgccggcgggtccgtgtccctccgcggccgccgccccgccttcccgtccgtcgccgcggcgtccacatcgatggcgtcctcggagagcgaggagaggaaggagaccaagctgtggggcgggcgattcgaggagggcgtcaccgacgccgtggaagggttcaccgagtccatctcctacgactggcagctctacaagtacgacatcatgggcagcaaggcccacgcatccatgctcgccgcgcagggtttgataacggctggcgataaggacatcatcttagaggggcttgatcaaatagagaagctgattcaggatggaaaatttgagtggcggacagaccgggaggatgtccatatgaatattgaggcagctctgatcgaaaaggttggtgaaccagccaagaaactgcatactgctaggagccgcaatgaccaaatcgtgacggatctccgcctgtggtgccgtgatgctattgacaagattttgttccgcatcaaacagtttcaggtgtctcttgttctgttagcttcaaaatatgttgacttaatagttcctggttacactcacctgcaaagggcacagcctgttttgcttccacatctcctcttatcatatgttgaacagttggagcgtgatgctggacggctggtcaactgcagggaacggttgaatttctgtcctcttggtgcttgtgctttggctggtactggacttcctatcgataggttcaaaactgctaaagatttgaagtttacagctccaatgaagaacagtattgatgcagtatcagaccgcgactttgtattggaatttcttgctgccaattcaattgctgctgttcatctttcacgaattggtgaagagtgggtcttatgggcatcagaggagtttggattcctcacaccaagtgactctgtttcaactggaagcagcattatgccacagaagaaaaatccagatccaatggagcttgttcgtggcaaatctgctcgtgtttttggagatctcatgactgtcctcaccctttgtaaaggacttccgcaggcctacaaccgtgatttacaggaagacaaggaacccttgtttgacagcgtgaaggctgtattaggaatgcttgaagtatgtaccgagtttgctcaaaatatctccttcaactcaaaaagaatacaaagttcgctgcctgctggctatttggatgcaacaacactagcagattatcttgtgaagaagggcgtgccgttcagaacctcgcacgagatagttggaaggtctgtagctctatgcgtctcgaagaactgtcagctcgccgaacttggactagacgacctgaaatctgttcaccccgtttttgagggcgatgtgtacgagtatctgggagtggagaacgccgtaaacaagttcatatcttacggctctacaggctcggagcaagtaaaaaaacagctcgaggattggcgcactcagcttggcattagttcataaatggtcgagaagacctcgaaaatccgattattgtggttccagtttttgaaagtgggtcggagtgtcgtgaacttcttttatggacgacagttcgctgttgctttaatttcagaacgatcgatgcacttgtattgggaaccattgttctgctgaagtattgatctgaataaaagatgtgcttcgttgtc

SEQ ID NO: 20317 - DNA, 1557 bp, Oryza sativa
  ref <308>: DATABASE ACCESSION NUMBER: AK070639
  ref <309>: DATABASE ENTRY DATE: 2001-12-06
ggccggccatgaagacggctcatcagggggcatggtcctcctcgacaggtggtgcctcatcgctgacctgcccaacgccagcaccggcgtgggcaccacgagcaccggcttgcgcatccaggcgaccttccaccccgcccgcccgccgcttctctcccgcttctgcgtccactgccccggcctcgacttccgccgcgtggtgcctaagatcatcgcctccgacgccgatctcgtcctcctctgcgtccccgtcaaccccgacagcatcgccaacgcacgaggtttggactactttgtctacaggccgcgcgcccatcggctagatctgctcccgaacccgcaccccgtgtacctccacgactctatgactgccctcctcagccgccaagacggcgcctggtatgcagtcgccgccctgggtcttggccccccggtgtacaaaggcggtgcgcccgttagctgggatttctacctccacctctacagatccacctccagttccaaaggttggacctccaagcggttatcggtgaccgagttcatcagagacaagtttatccctatacctgcctctgtcgacaggctgtaccacgagacagggaagaccatcacggtcggcggcgagggtggcaccgtcgcctgggtggacctctggcgtggcatcttcctctgcgacgtgctcgatgagttccctgcgctccgggacatccctctgccgtgcccagcgaggagcaacaggatctcttcctgatgcaatatgaccccagctatttccgggatgtgaccatcagccgaaacagagactctatcaagtatattgagatggaaatgtggtcaccaaaagagccgatgaataccaccagcactcctgtttcttatgtggattgcgtgctcaataacacaaggaaatcccaggtaatccgtgacgactggaaggccacaacatggagcatgccaatgccggtgattggttcttcgtgcgagcactggcaccgtgactgtgaggttggtgttaaagacatcaccttgggtgccagcaacccatgtcgttctaacttgagcttcagcgagatcgtggaaatgttcaaggaacttccaatggtaaaccccaccataagcatggatgatgatgttgttttcttgctttctagaaccagtcccagtcccatggacaagttgcatttggtgtttgctattgatgtgaggaagaggacgctgcaaggattaaccaagcttgatgtccagccgcagaactccgtttgcatggtcaccttatgcaccagtgagatttgcaggtatctgaggaatattacaggtaacttctctacactggcaattcatcaccttgtgtttttacatgtgaccatatgtatgaatgcaatgcttgccatttttaagatctagggaattattgtttttgtacctttcttgtttcggtagggtctagagctaaattcaggaggcatgccttgtcgccttgatgacagtgtgatgcatggaagactattgatatcagttgttttgtacattgttgtcaaagttatatatcagttaatt

SEQ ID NO: 20318 - DNA, 1243 bp, Oryza sativa
  ref <308>: DATABASE ACCESSION NUMBER: AK099148
  ref <309>: DATABASE ENTRY DATE: 2002-08-28
gagggtttgcggcggcggcgcccgctcacctcctcgccggccggacggcgcgaggaggaatctctccacccccacactcctcgcgccggtgcccctccctccccctccatcctcctcgcgtttcgcttcccctcttcgcactactccgactcccagccggaagcgccggtgtcgatggcggacgatgccggtgccggtcgcactcgcagtcgcagggatccttccgatcgccctacgcgttcaggccaatttctaatcagggctttgctacgaggcgaattggaggagcgcactgcagacgcaaggtttatcccacttacaccaataatggaggatctatttgtcagcggcattgaagagattcccgaagacacttctgtgcatcaccagcaaactgatgagccaccaccatcctacaacaccattaggaggggtgaaggcacattaatggctgaactgcgtgaggctacggagcaactacgtttgtctttctatgccaacacagatgaagaaactcgggcacaaatgaaacagttttgggatgaagaattcaatgcaatatctgaagaagcaactattgagagaggtttagagtggatgcgggcggaggttgttgaggcattcagtacacacagtggggctaatgtggttgaatatgagcttgaagatatttctcaccagtgtttgatttttgatgattgtgccaagtcttatcatcattacaatttcataatgaagtcgaagtgtcctgattctcatttggagggttcttgtctcttttttgctgaagttaaagttgtggatggagagaaacactatttttgctgtcccctacaacctgatgacgacggtcattgtcacggatgccaaaactctggaattgatcttaagcatccttcagacggtggctacgaggagggcaacgctgactctggattcccttttgatccaatttaatttgatggatgaaaattcagaaatatgtactaaattgagcagcgcctgaattgagttgtgtaatgaatgctcctacataaaccttgtgttcatgttcaaactggctattggtattgtgttttattcggtagcattagcaatctattagcaatatgttgcatgttcgtgtctggagtacgtgcgaaatgctcatgggcatgactattatttcttacgtgtgaaatgcttgtattgtaaggtcgccaggtttgtgattgagatgtccatccttgcaccctgttcctgc

SEQ ID NO: 20319 - DNA, 3618 bp, Oryza sativa
  ref <308>: DATABASE ACCESSION NUMBER: AK070640
  ref <309>: DATABASE ENTRY DATE: 2001-12-06
gatccttgatcctccactctctcttcccctttcccatggtcagtgcgagctgcaggtaggcgtcgcctctgcgagaaggcgcaggcggcggtgtgcacggcgtcctccccttcccgattccgcccgtaccctcctcctccgtggcctgtgcggcctggcgccggcgtgcgcacggccggcgaggaggtttggtgggggatcgatcgacgcggccaacctccttccatctgcctccgtctcggttcgaatcgaaaaaaaaattaggggttcagttgaaccccggcaatccacgttaggttgtggaagaagcagccatggatccctcagggctcaacctgcaggggaatcctgctgagaaccaggagagctggacctccggcgtgtcagttgggaggggcaccccaaatttgggtgttgggacggccgtggcaggccggagctgcccgtcatcaacattgttcccggggtcctccctgtcgtcgacggcgttgctgaataccatgcacgagggctcctttccacagacagccttggtggcgggttccgtgagcagcgccgatgagcagcatggtgcgccccccgtacggccatcctacaaccttcctgcaggatgcacgcaggtgccgataagtattctggtgttccacaggaggctgacggggaggggatccaggtgccggtcgccgcaatctcgtagctttatgcctgctcctgcactgtccggtgtctcagaggcagatggagcttatgggccgattcctcaaagtgatttcttgtcgcttcgaggtccatctgaagtttttcctggtgatatggcaatgaatcattcagaaccggccacttcatatgggtacaattcagagtatgcacctatgcatcttcagccaaatggcttatacactgaagcttccaacactgaaagtgaaagagaagctagccaactgcaacaatcagcggaagctgttatctgtgacagcctcagtaagttggaatcggctatggagaaaattcagggtcaaaatcctcaagaatcaagtggcttagttgcagagggttccgctgatgataacattcacaagtaccatcagaaagctaaaagggccaggacacaaatcactcacagtgacaaaatagacttaccaacacaagctgtatctgcatgcaaggaaaaaacaataactcagatagagatgcagattgcagatgctgagagaactgaagcactcaagggtgaggatgccccagcacaaaagctgaagactcgaaggagaaagcacaggcccaaggtaatccgtgaggacaggccagccaaaaagcaaatggccacaacatcagaagaaaaacctctcaatcagaaacccaaaagaaaatatgtgcggaagaatagaaaccccagttctttggagaagtgcgcagaaccttttagtgaccattcaatttctagagaatccagaactaccgttagaagcagcattgcatcagttcgaagaaggctgcaatttgagttcggggagcacggggtgcagagggaccaatcatcaatgaccaattcatggtaccaaaaccaggagaaacctgttaatgctgagagttctttgtgctcagtgactaaatcgtccgtgcaggttgaacatggacaggaattacacatggaaaattcaccagaagggttgttttttggcatcaactccaaactgaacaaaattttagatgagtacatacatttgccagaagccgcaccaaaaccttcagagcaaatcccactggctgcttctggtcatgttagcgaggaactagcaaggaaacaatatgatgtgagacacactcatgatcctgattctacaagttataatatagaaaggagtggtctgatcacaacgaaagggcacaaaaaggacctagacctgaactattctaacacaaatggttttcagatgtattgttcggctagtttgttaccagaaatggactccacaaagggcagtatgactaaggtatcaaaaatggacaagaacaaaaaacgacattatggaggtgagtcctccctagctggcacacagagctccattatcatgagaactgcagctgagatgctagcagtttaccaagcttgtggtattaaaaagaagcgatcggcccgagtccgcaggaattcctttctttctgttatggatcttgagaagaatacttcacaagaatcaacaagattgccgcggtcatgcatggaggccctgtatgagagttcctacataaaatttatgaccaagaaacgttcacagaaggcacggctcaactctcccaattccattcaaccaaatatagatcagaaaaacaggttttcatctgaaacagttttttctggaggattcaatggattgaaaagatcagaggaaactttccagaaaactttacctcagattccagatgataagaggatcaaccttgacattcattgcaaagtaccagtagaaagctcaccaaatacatcaacgccaccatatatggattaccttcaaggagttacatcaaagtttagatactttgatttgaacactgagcaggtgcataaaactgagatgcatttgtctcaaaccatgccctctctttcttctttaggagcaacaaattatctaccgaatgctctagtcccatatgttggtggggcggtggttccatatcagacacagtttcatttagtcaagaagcaacgccctcgagctaaggttgacttggattttgaaacaacgagagtttggaaccttctgatgggtaaagcagctgaccctgtagatggaactgatgttgataaagagagatggtggaaacaagaaagagaagtttttcaaggtcgtgctaattcattcatagcacgtatgcgcctagttcaaggtgacaggcgcttttctccttggaaaggatcagtagtggactctgtagtaggagttttcctcacacagaatgtagcggatcatctttccagctctgcatacatggcccttgccgcaagttttcctacagggtcacatggcaattgtaatgatggcattgctggtcaggacaatgaagaaatcattagcacgagtgcagtaggagacagaggcacatttgaattcttttataatgggtcaagaccagatataggattaaattttgagttctcaatggcctgtgagaagatccacatggaaccaaaggacaatactacagttaatgagttaactaaaggtgaaaattattctcttcattgcaaagaatcagctggaagtctttgtgaccacgagacagaaatagatcataaagcaaaatcaatatcagatttctctgcagtagaattaacagcatgtatgaaaaatctacatgcgacacagttccagaaggagatatcattatcccaaagtgttgtaacttcagagtcaattcttcaaccaggattacttttgagttctgggatggatcatgctcgtagaaattttgttggtagcattagtgacacagcttctcagcaggtgggaagcaattttgatgatggaaaatcattaacaggaaatgatgtcacagccaatgaaactgagtaccatggaatcaaagcagcagcaacaaataattatgttgtagatg

SEQ ID NO: 20320 - DNA, 2234 bp, Oryza sativa
  ref <308>: DATABASE ACCESSION NUMBER: AK070641
  ref <309>: DATABASE ENTRY DATE: 2001-12-06
gagcagcagcagcggcggcggcgggggatccagcatggagccagcccgacgatccaccgccgcgtcggacggcggcggcggctcgtcggcggccggatcggacggcgaggacgacaggtacctcagcgccagctccgcgctcggcacgcccagctccctcgccaccctcctcccctcctccgacctctgggatcaccagatggacctcctcctcctcgacgaccccgtcgccggcttccccaaggcccaccagctgacccgcctccatccgccgccggagccgccgcggcccgatcctcccgcccccgccgcggccggcgacgccgttctcccgcggccgccggagccggatcccacccaggtggacaaccttgatgacaatcatttatttgatgatatggttcaagagatggaacatattcttctcaattcaggggagccccatgaaagtgcatcttttacagattatcgcgcaaataattcttcccaagctcatcatttcagagatggaagcaccactgcctctacttctggtacagatgatgcttatgtatatccccttcctcaccatccttcaaaaattgattgggtggaggttgtgggagcaaagcaaagaacaggagatgtttcttttggtgagcgaatggttggggtcagagaatatactgtttatttgttaaaagtcaagagcggagaagatgactgggaaattgagaggcggtaccgtgaattttatgctctataccaacaactcaagctcttgtttgctgagaaaggtttcagtctgcctcctgcatggagaaacgttgaaaaagaatcaagtaaattatttgggaatgcatccccagacatcgtcaatgagagaagtagtctaattcaagactgtttgtgttctttgcttgtctctagttatccatttggaacacccactcctctggttagttttttgtcaccagggagtcctgcttatgagtatagcttgttaaaaactcttatcccaagatctttgcaaaggctaagcagtgattcacattccaaaggctcaagctgcaatggaacttcacacaaagattctgcctcaatgggcaagactatatcacttgttgtggaggataggcctcggaagtccactagacagttgttggagttacaacactacaattgtgctggatgccataggcatttggatgctgggcgaacaatgctgcaagaaattgtccaaacaatcggatggaacaagcctcggttttgtgcttacactggccaattgttttgtgcttcttgtcacacaaatgatactgcagttctgccagcaaaagtgctacaccactgggatttctctttatatcctatttcccagttagcaaaagcatatttggattccatctatgaccagcctatgctctgtgtaagtgctgtcaatcctttcctctttgcaaaggtgccagctctgcttaatattatgagtattcggaagaaaatagcagctatgcttccatgtgtccaatgtcctttccggaattccatatttagaggactaggagctcgaagataccttcttgatgggaatgacttctttgcgctccgtgaccttgttgatctttcgaaaggggcttttgcagcgcttcccgttaaggtgcaaacaatatcaaatcggatacttttacacatcacagaacaatgccttgtgtgctacgactctggcgttccttgtgctgctcggcaagcttgtgatgatccgctagcactcatctttccgtttcaggaggatgaagctacaaagtgtggttcgtgtggatcaatcttccataaacaatgcttcaggaaaataagcatatgtccttgcggtaagggtgctgccagcaaaggcaggaaaatcgttgcgcttgaacaagctgtgcgtgacgatgcaagcagaccatcaactcagttgatccaaccctcatcgttctcctcatcatctggttttttctccgatatcatctcaaaggctaggccagataaactttggaaaccaagaaatagcagccctgtaattcttatgggttctttgccagatacgtctacatgagctcagttgtatgttcatgttccatttatattgttgtgtttttcgccacataaagtgtgtgcctttgagattgtaagagatgccgtggagcatttttaattcatattgttttgtacgtaataaaatgtagcatttttgtgcgtttgtttgcatcaaacgcttc

SEQ ID NO: 20321 - DNA, 2028 bp, Oryza sativa
  ref <308>: DATABASE ACCESSION NUMBER: AK070642
  ref <309>: DATABASE ENTRY DATE: 2001-12-06
atccccaaatctctcgcccccacccatggatcaccaccaccaccacctgccgccgccgccgccgcggtcgccgatggagaactccgcgtcctccaagccgcccaccccggcgtccaccccgtcgtcgcgcctcgccgccgcgccgtcctcccgcgtctcctccgcggcgccgcacccctccccgtcctcctccgcgcccacgccggcctcgcggacggtctacagcgaccgcttcatccccagccgcgccggatccaacctcgcgctcttcgacctcgccccgtcgccgtcccaccacgacgccgccgccgccgccgcctcccccggcgcgccgcccccctccggatctaccccggcctcgtcgccctactgcgcgctcctccgcgccgcgctcttcggccccaccacgcccgaccgggtggcgtcgtcggcgtccgcgtgctcctcctcctcctccgccggggcgtcgcccgtgggctcacccgccaccggcaacatattcaggttcaaggcggaggtgccccggaatgctaagcgcgcccttttctccgacggggacgacgagggcgtgctcttccccggggtgttcacgacgaggggcactggccccaggaagatccctaggtcaccttataaggtgctggatgctcccgcattgcaggatgacttctacctgaaccttgtggattggtcttcgcataatatccttgcagttggattggggaattgtgtctacttatggaatgcatgcagcagcaaggtcaccaagctatgtgatttgggggtggatgacaatgtctgttcagtgggttgggcacagcgtggcactcaccttgctgtagggacaaaccaaggcaaagttcaggtatgggatgccactcgttgtaagagaataagaaccatggaaagccatcggatgcgagtaggtgctcttgcatggaattcatcattgctttcgtcaggcagtcgtgacaagagcatccttcaccatgatatccgtgcccaggatgattatattagtagacttgctgggcataaatcggaggtctgtgggctcaagtggtcttatgataaccgtcagcttgcatctggtggtaatgacaacagactttatgtatggaatcaacactcggcgcacccggtactgaagtatactgagcatacagcagctgtcaaagctattgcgtggtcacctcatcttcatgggctgcttgcatctggtggaggaactgcagatagatgcatacgattttggaataccaccacgaatatgcacttaaattgcgtcgacacaggcagtcaggtctgtaatcttgtatggtcaaagaatgttaatgagcttgttagcactcatggatattctcaaaatcagataattgtttggcgatacccaacaatgtcaaagctcgccacattgacaggccatacatatagggtattatatttagccatctccccagatggacagactatagtaactggcgctggtgatgaaacgcttcggttttggaacgtgtttccatctcccaagtcccagagttctgacagcctaagtagcatcggggccacatcatttgttaggagctacatccggtgacactgagatgtggtaatctaataacacttggctcataagtcataacactactgcagcagagtgttgatgatcatcaatatcattccatttgtaccacttgcatcaccagttcatgaaccatcaaacctagccaaattttagagatagtaggatgcagaatggtgaaactggctcgcagacctcggagtggctcatttgctgaatgctgtatatatttattcattggctttgtaggagcgaagatggcaaacactgaccatccgcaatgtaccattgataagttcacggcctcctgtttttgtttttgctgagtcaacttggagctggagctcttatgtataccatgctagggcttaacaacattggccaactcatgatgctcattgcatccaagttggaatatgctaaggaagctggagaatttctggtgc

SEQ ID NO: 20322 - DNA, 2189 bp, Oryza sativa
  ref <308>: DATABASE ACCESSION NUMBER: AK070643
  ref <309>: DATABASE ENTRY DATE: 2001-12-06
gcccagattcttttgctctctttttcttttgatgagagagagaaaggaattccccatttcagttgggactaatttcgagttccaatccactgttgcgcaggtatgtggatccaagaatttcttggccgagccgatctggaggtagttgcggctaggtcttgcgcaactggaggcgaaggggatctgctccatatggttgtggatcatctcatctggatgagcaatattgcaaaagcgacaacaacttgggtcttagcccgtttggtaatgtacccttatctatatagaaaaaaaaaaaatcccttctctggaagaaaaggggattcattttgactggatcagtgggaagcgatgcgcatttttcttcaaattttgagtgagtgttcctacacaaatttatgctatggttgttgaatcttttagcccatgtcaacttgtgtgggtagttgttctaaaaaaaaaaaaacttccgtgggtagccatttttctaatcttgaaggctagggggaagagatgtgtactccagtgcaaggaaaaagcatccaccttgactcgctgcagaaaattccatcatttctttaatagtgaaaaagaaaaaaaaaacagaacagagatgaccttgattagctgcaggaaacttcctttcatgagtcctcactcgttttcccaacaactcctctcatcatataatagttcatcagaattgtttcttgccacttcatacgttgatagtattcctcctttctgaatctttgatatttttctatctggaacaaggatgccaagtttcacatcttcaacagatttgtctattcgctttgcaaccacagaatcctcttcgtacgatagccacagcttctctgatgaacccggtaatgtctcccactaaatacaacttctggaggacatccctgaagatgcacacgatccaacagatatcggcacctggattcagagggcagacttgcagatgctccaactgtttgggaaagaattggtggcattgattgatcgaagcattcaagaaatcaaccgcgagcacggccaagctcgaggagcatctgaaatgcgtcgcctgctgaagctagctgtcgtgattaccatgctgccaacctcgcctgatctgttgcctgtcatactgcgtctgtacgcgacgctcgggactttcccgatcgaccagctaaacggcatcaccaaagagctcaggaagtgtgtaaggaagatcttgcgacgggtatgttcactatctcaaactcaaagtggcctgtaccatgtagcgcagagaggtggcgttcacaagatcactctgtacgtgatgaactacgtcaagtttttgtgggaacatgacagcgtgatcaacaatattattgcttatcaagctgatggggagagcgagaacggtgaggaatggacgcaggtggattcctttgtgcagcacttcatcggacgcctcgacgccttgctcgagaggatggcgaggcatgaatcgatgatggggctggaatgcatttccttgctgaacaatgcccatttcatattgaaccggcttcgcaagctagaggtgaagtctgcactgcagcaggattggattctcaggtacgagaaccaggtcaagcaccagatcacaagataccttgagctctcatggctacccgtcatgtcttgcttggatgctcatacaccgacgcaagcactgttcccttgctttcatctacccctgacgactaggttttacgagatgctggagagcacttgtgcagagcaacagaactggagaattgaggatccgaaacttcggaacaatgtgaggaaagctgtttcatcccatgtcgtccaatgttatcaggcacacttgcagaagaagggtatgaagctccataagtatatcccccaggaaattgagaataagctgatggagttattcgaagggtagactgcttgctgcaaaagttagattatatatagaaccagaatcaaacccctgttaatgctcactacaacagtttttgattatttgtacaatcagaaccagtgtgaaatttctggtaatgcactttcctcttgtgtactcttgtattcgtgttcaggatggcgaaatattttactatgttctttccctgttttttccccccaaaatgcaagtgatttaagaagcctctgcatcagaatcatctagaaaacaacatttg

SEQ ID NO: 20323 - DNA, 2146 bp, Oryza sativa
  ref <308>: DATABASE ACCESSION NUMBER: AK070644
  ref <309>: DATABASE ENTRY DATE: 2001-12-06
ggcgcgcgcggcgcgcgcggcgtccccgatgctcgaccaccaccgcacgagggccggtttatgggcggccgcgcccgctccatcctacgctggctccgtcaccaccgctcccgccgcgtctcctcctcttccttccatctgaccaccaccggtgacgacaccgtcaaggatctccacgacccgcggcgagaggacgcggagggcgacgggtgggaggaggtccacgagggccccgagtccgaccccgaggagtacattgcgttggtgtcggaggacgcgggcacgcacctgccggtgcgcacggagccgcgacgcatggatccgagcaagaaggaacctgacttcttcactgaatatggtgaagcaaaccggtataaagtcagtgaagtcattggcaaagggagttatggtgttgtggctgccgctgtcgacacccagaccggcgagcgagtggcgatcaagaagatcaatgatgttttcgatcatgtctctgatgccacccgcatccttagggagattaagttgctccggttgctgcgtcacccagacatagttgagatcaagcacataatgcttcctccttcaaggagggaattcagggacatttatgtaatctttgagctaatggagtcagatctccatcaggtaataaaagcaaatgatgatctcacaccagagcatcaccagtttttcttgtatcagctgctccggggaatgaagtacattcatgcagcaagtgttttccatcgggatcttaagcccaagaatattctagctaatgctgattgcaagctgaaggtttgcgatttcggccttgcccgagtgtcatttaacgataccccatcagccatattctggacggattatgtggcaactagatggtatcgtgccccagagttgtgtggctcctttttttcaaagtacacccctgcaattgatatttggagtgtaggatgtatatttgcagagctgcttacaggaaagccactctttccagggaaaaatgttgtgcatcaattggatctcatgactgatctacttggcactccttcagcagaatcccttgctaagatacggaatgagaaagctcgacgatacctgagcaacatgaggaaaaagcctcgggttccttttactaaaaaatttccaggtgtggatcctatggctctccatttgcttgaacgccttcttgcttttgatcccaaagatcgtccaagtgcagaagaggccctgacagacccctactttaatgggctagcaaactctgaacgcgaaccaatagcacagcctatctcaaagcttgagtttgagttcgagaagaggaaattggccaaagatgatgtccgggaattaatttaccgagagattttagagtatcatccccatatgctgcaagaatatttgcgcgggggagaccagatgagtttcatgtatcctagtggggtggatcgcttcaagcgtcaattcgctcatttggaggaaggagtttcaaagggtgaaaaatccagtccacagcttcggcagaatgcttccttaccaagggaaagagcaattggtaacaagcatggagatgacgagtaccacgcaaagctgaatgtaggcgagaagccatgccatgcatcagtgacagacggcattagcaaaccgctcatgagtgctcggagcttgttgaagagtgaaagcataagcgcttccaagtgtattggtgaaaaaccaaagcaagacagagatcaggaggattcccttacagagagcatggacgaaacagctgatgaggtctcagaaaaggttgctcaactgaaaacctgatgattcccgtcaaggtcacagaatcgatcggagttagtacaacagcatgtgtatagatgcccttccccagaagacgagaatcccagatcaggacggtcttaaccatgataaagagtctacaactaataataccacaagttgttttggtaacctctgttgtactgtaaatttttcccccttcagttttgtgttttgacagcaaacaactgtctaactgactggttagttcctcgtcttttcctcgatgggacaatcaccgatcctgtaaaatttcctttcttttgatgacagaatcatacactgtttctatgatatattctaaaattttgcagtcaat

SEQ ID NO: 20324 - DNA, 1666 bp, Oryza sativa
  ref <308>: DATABASE ACCESSION NUMBER: AK070645
  ref <309>: DATABASE ENTRY DATE: 2001-12-06
gtttcttcttcttctctcgtcgtcgcgtcgcgcgcgggcggcgaggcgagggcgtcgcgattcctcctctttcaaatactcccacggcgaggaccgcggcgagggcgcgcgggccattgctgctgcttcttctgctgctgcgtgtgtgtgggtgagacctgagaggatgggagcggaggcggtgagggtgctggtggtggacgactcgccggtggacaggcgggtcgtggagctgcttctccgggcgcactgcggcggcggcggcggcgccgccgccggcgaggcggctccgttccacgtcaccgccgtggacagcggcaagaaggcgatggagctgctcggccggcggcggggggaccgggaccacctcaccccatcctctccggcggcggcggcggcggccaacgatcaagcgatcgacatcgtgctgaccgactactgcatgccggagatgacaggatacgatcttctcaaagccatcaaggcgttggggtcgccgaatccgatcccggtggtggtcatgtcgtcggagaatgagccccagaggatcagcagatgcttgacagccggtgccgaggatttcatccttaagcctctcaagatgaacgatgtccagcgcctccggaaatgctccggcgccaccaggccgaagtccgccgtcgccggagacgatgaccggtgctgcaacacggccaagaaggcggcggcggcggccgcagccacaccggagcagcagcagcagcagcagagatcgtcgcacctggcaggactagccatggtgatgaatgcatccagcttcgaggtgtcgcactacttccagctcatcttcaagctcatcctgctcgcctacgccgtgctgtgcctcagccagctcctgcacagatggtccaatggcagcagcctcctctccctgtggtgcgcatgaattcaagaaattaaatcaaatcgacgatccagaaggctggattgattaatttcccattatcgatgaaaaaaattgaaaaaaaaagagagatggatgaagactcagtggcatagcgtggatttatccgaaactgaaacctcttcatcaagcaagagtgcagctaaggtggactaattggatgcatgatgatctccatcccagctaagcatgggggttcttaattaattcagctataatataattttcaacagccatgcatgcagcagcagctaagatgtgatctttctaggggtagatttgttacttatttgttcttaaattctcaagaggattctaaccaggttattaattattttcagagttttttaagtggtactatactactactgctacttagattattttgctgagagagaaaagagtagcagtacagtagcaccacaatttgctcatttgtataaaggggaacgcatgatttgagtgggcatctggtgtcgtttttaatcctgatctcgatttgatacgctgatgcaactgtccggagaagcttctgcttctctctctctcccaagatgtgttttttttttcttcttttttttcgctctctttctctctgggtgggtggacgtagacgtccacctgctctgcacctcacgctgaatgagttgaccggatctcccgtattatatatcgtaatcttgttaaatgttaagggagaaaggagaacagtgtatggtgatc

SEQ ID NO: 20325 - DNA, 1134 bp, Oryza sativa
  ref <308>: DATABASE ACCESSION NUMBER: AK070646
  ref <309>: DATABASE ENTRY DATE: 2001-12-06
gtcatcgctcagagaaacacacacacaaggcacacaggattgagggagaagaagataaggagagagagagagagagggggagggagggaggggtagcaaagcaacttagctagctttgccagccatggcgaggagctctccttgccttgccgtcgctgtgctcctccttggagtggtggtggcggcgattggagcctttgctgatgaaggggcggcgagcggttggggactagggcatggcgcccgtttcctcagcaggcgaggccgtgctgcgtatgagaagtcgtcggagccagaggcaaagcctgcgtcgcagcaggagccgaagtcggattcttactcgcaggcaaagcctgggccaaaagatgagcccaagccggagccagaggcaatgtctgcgtcgcagccggagtcgaagccggcaacttactcggagtctaagcccgaatcaaaggcagagcctgaatcaaaaccagagccaaaggcagagtccacgccacaaccagaagcaaagtcagagcctaagtctgagccaaagccaaagtccgagctatacgcagaaccaaaatcagagcccaagtctgagccacagtcagaaccaaatcccgagactaaggcggagccaaagtctgaacccaagtctgaacctaaatcggagcctaccccacagactgaaccaaaggcagaatcgcaaccagaaccaaagacagagccaaagtctgagtcgaaggctgaaccgaagccagagcgaaagtcatactcaaagtcaaaaccagaaccagaatccaagccagaagcaaaaacagaaccacagccagagtctaagcccgagccaaaacccgagtcagccccaaagaaggaaacgccttcgtcggcctacccatgatggagatccatggagatcgagggcatcttgcttgctgcacgatttagctactgatgagattattttgctgagggtcggagcactaggaaatggccattggccatttctggaataaataagtgacgacctagctttattctttgctttatttccctcattctttcatgtttttttccggatgtgccactgcgccagctggtgtaattcacttatttcttatgtatctatatctatgccattttttttct

SEQ ID NO: 20326 - DNA, 1072 bp, Oryza sativa
  ref <308>: DATABASE ACCESSION NUMBER: AK070647
  ref <309>: DATABASE ENTRY DATE: 2001-12-06
gctagccacccccgcctcccccattctccccgccgccgccgccgccgtctcgccgccgacgaggagatgggtcgcgtgatccgcgcgcagcgtaagggtgcgggctccgtgttcaagtcccacacccaccaccgcaagggccccgcgaggttccgctccctcgacttcggcgagcgcaacggctacctcaagggcgtcgtcaccgacatcatccacgaccccggccgcggcgcgccgctcgccaaggtgacgttccgccacccgttccggtacaagcaccagaaggagctgttcgtcgcggcggaggggatgtacacggggcagttcgtctactgcggccgccgcgccacgctctccatcggcaacgtgctcccgatccggtcggtacccgagggcgccgtggtctgcaacgtcgagcaccacgtcggcgaccgcggcgtcttcgccagggcgtccggcgactacgccatcgtcatcagccacaaccccgataacggcacatccaggatcaagctcccctctggtgccaagaagattgtccccagcagctgccgtgccatgatcggtcaggttgctggtggtggcaggactgagaagccgatgctcaaggctggaaacgcctaccacaagtaccgcgtgaagaggaactgctggcctagggtgcgtggtgtggccatgaaccccgttgagcatccccacggaggaggtaaccaccagcacattggtcacgcctccaccgtccgccgtgatgcacctcctggccagaaggttggtctcatcgctgcaaggaggactggtcgtctcagaggccaggccgccgctaccgctgccaaggccgacaaggccacttagagtgttacttattgttgctactatccatattcgctaccatgcttatcatcgctagattaaaggacatgtattccagtatggtcgtgctttttgcttggtactctggtcacatttgtgatgaatgttcgcagttttcgtggtcatggtctggattctacattccacctaaagaagtttttacctggttatttaatccttgagttgttgaattagctcatgg

SEQ ID NO: 20327 - DNA, 2047 bp, Oryza sativa
  ref <308>: DATABASE ACCESSION NUMBER: AK070648
  ref <309>: DATABASE ENTRY DATE: 2001-12-06
gagctacggtttttttttctctttctttctcagcttcttctccaactcctctctcttcttcttcctctagtcctctcctgcctgcttcgtctactcctctcccaactccgatcccctcctctccgcgctcccggtggccggacccgtccggcgacgacgatgagccgctcgccggcacggcgccctgctcagatctgaagagctgcgagaatccgaggcttctcttgctggtttagctccggcggcggcggcggcggcggcgatggaggaggaggtggaggcggcgaacagggcggcggtggagagttgccacagggtgctggccttgctgtcgcagcagcaggaccctgcgttgctcaggagcatagcttcagagacaggagaggcctgtgccaagttcaggaaggtggtctccctcctcggcaatggcggcggcggcggcggcggcggcggcggtggtggacatgctagaggcaggatggccgggagaagcaggccttcggcggtgctgagagagaagggattcttggagagcagcagcggcggcggccagctggggatggtgatgtccggtgctgccactccgtctactagctccgccgcgcatttgcgcaaccggattggcggaggcagcggcgtgccaccggattcgttgcgggggctcgatttggtcagctcgagcagcaagggtggtgctcatcagttcgatcctccgaagctggtgcagccgttgtcggttcagttccagttcggcgctaccgcgcataggtacccgttccagcagcatcagcatcagcagaagttgcaggctgagatgttcaagaggagcaacagcgggatcagccttaagtttgatagccctagtgccaccgggacgatgtcgtcggcgttcatgtcgtcgcttagcatggacggcagcgtggctagcttggaagggaagccgccgttccatttgatcagcggcccggtcgcgagcgacccggtgaacgctcaccatgtgcccaaacggcggtgcacggggagaggggaggatggaagtggcaagtgtgccacaaccggaaggtgccattgctcaaagaggaggaagttgcgaattaagaggtcaattaaagtgcccgccattagcaacaaaatagcagacatacctccagatgaatactcatggcgaaagtatggtcagaagccgattaagggttcgcctcatccaaggggttactacaaatgtagcagcgtccggggctgcccagcgaggaagcacgtcgagcggtgcgtagacgacccggcgatgctcatcgtgacgtatgaaggtgagcataaccatactcggctgccaacacagtcagcccagacctaggaaacctgtagtatttcacgcgagccattcagaaaatgcagaggctccaagcttttgctcggggacggtcggaccggtcatgtgaaagtaggtcagcaaactgtgaaagtaggagtaacaaacagggaagccatctgatgagagctatagtgattcgcttgggtccttaactgagctacaagccatgtcgcatttctgctatggtctcaatgttctactgtccaaagtggggacatacacaacttgttctctcttttatgagctatggcactatcagattaagagagaatggaggaagaacatgtgattggatagtgaccggcaagatttgctcaaagaagggagggattaggtttgaagatttcaaaggaagattgacaaaaggaagtgaacaactgaaacatcgtgtaagcctggaaaaggataagcaggatttggcttttagcgtgcacaagtttacttgcaatgacttgcctctgtatgttgcttttgctttattgaaagatcaaaattttcttttggcagaagaatcattcagcattaaagctgtttctacttgctaacatactgacacacttggaccatcagggtttttttttccaggtgttagctgttgggtatgatttctcagtcgtacttctgcttttgtgtaaagcattccatgttatgttaatgactttgacatcaactgcc

SEQ ID NO: 20328 - DNA, 1036 bp, Oryza sativa
  ref <308>: DATABASE ACCESSION NUMBER: AK070649
  ref <309>: DATABASE ENTRY DATE: 2001-12-06
gatatgtgatcagcgacgtacagtacagatcgttcgcaataaagttagacttctcgtctctctttgtgcttgtgcttagttgtccgtgctagaagacggcaatggcgtcgacggatcccatgacccgccgcttcgccgtcgcgtgcggcgtgctcagccagtacgtcaaggccaactcctcgcagccgtcgacggcggcgccggtggctcaaggtgtgagtggcctcatggccgccgccgccgccgccgccgcggcgcctgtggtccaggaacccggatgcgaggtggacggcggggggcagcagttcacgatcttctacgccgggaaggtggtggtgatcgaccgctgcacgccggccatggcggccgagctgatgcggttcgcgtcggcggcgcagggcggcggcggcgcgccagaggcgccgcccgcgctggtggacatgccgatcgcgaggaaggcgtcgctgaagcggttcctggcgaagcgcaaggccacccccgcctccgcgcggtcgtcgtacgtcgtccgtgctgcggcggcggaggaggagcagccgccggcgaagaaagcgaaggcggccgtggagaggcgcgaggattggctcgcgctgggaagccttggacacatgcactcgcgctgatgatcatcgccacgacgtcacgtctgcgatttgagaattgagagctcgatcgattgatcgccatgtggtcacccggtagccgatgctgcaaggccggtcgagttggaagatggttctcgtcgcattaacggccttgagttgatttcgccgagcctgaccttgagttgattaccatggaagtatgaagatttcgtgattagcagttaccctagttatcgcggcgtataattaagcacggtcactgaagcgcaatggccttgagtcggtagatcaggactagagaggggtgtatggatctgacaagtactgtagtatattgtatcccgtttgaattttttttcgattcctatggggactgaattgattaatgatataaaattccttcgactgttctg

SEQ ID NO: 20329 - DNA, 1607 bp, Oryza sativa
  ref <308>: DATABASE ACCESSION NUMBER: AK070650
  ref <309>: DATABASE ENTRY DATE: 2001-12-06
gaatctctcttctccctctcggcgcacacccagattcccgccgactccggcgcccctctcgccgccgcctgcccccttccttcattctctcctcctcctacgtaaataataatccacctaagaccaaccgattatgagctctctatgcccgtttgccaaactcgcctctgctggcgccacatgccccgtaaaatcagacaacaaaaccacctcatgtcctgtcacagccaacaatcacaccgacgacgacgataatgaaaaaactggcaatgctaacaccgatcctcgtgtggtgccagcaaagtgcccctttggctatgactccaacaacaccttcaagcttggcccactcagctgcgtggtctgccacgctctgctacatcaaagcagcaaatgcaccccgtgctcgcacaagttctgcaaggcatgcatattgcgctttaaggactgtccattgtgtggtgctgacatccaagggatcgagcctgatgatgagcttcaaggccttgtcgaccgcttcattgatggccatgcccgaatcaagagatcacatgctgcaggcgatggtgaagccgcaagtgacaagaccaaggtcatttacgagcatgtctccatggagagaggagcttttctggtccagcaagcgatgagggcttttcgcgcacagaacattgaaagtgcaaagtcaaggctcagtatgtgtgcagaagacatcagggaagagttgaaatctaaagaagacaaccaagaactgtgttctcaacttggagctgtgttaggaatgcttggggactgctgtcggaccttgggagatgctccttcagcaatcacttactatgaagaaagtgctgaattcctctcgaaattgcccaaaaaggatctggagttggtccatactctctcagtttcactaaataaaattggagatctttgctattatgatggggacctccactcagcaagaagctattatgcgcgttcgttggacgttcgcagaagtgcagtaaaagaacactcagctgtggcttcccaggtcattgatgtagcaacttctcttgccaaagttgcggatgtcgatagaaatcttgggaacgaaagcatggcagttgagggttttgaggaagcaattaaatgccttgagaatttgaagctggaatctggagaggccagtcttgagcagcggcgtctctcggttctcgactttctacaaaaacaactggatgacaagtgatatgcacggttctttgaagagcacactcacaggatatatgtactatccataacgaggatcagctccagtagtctctgtgatgcatatggaagggagttgctccagaatgaatggtaactggtgtgtatttgaggtttgctgcgacacagaataaatactttcaagttgtatatgtttcttgtgtctgccacgggcggagacctctttgagtcaagatggccacctcttaagccctgaggcaccacggagacgaaacttctcggaagtactggttccttgttgcctctgccgtgttatgtgaatgttatcccactgtatatttattgatgatataatataagaaaagaacagcacagatgttttgtatcgccctatc

SEQ ID NO: 20330 - DNA, 641 bp, Oryza sativa
  ref <308>: DATABASE ACCESSION NUMBER: AK070651
  ref <309>: DATABASE ENTRY DATE: 2001-12-06
gagacggccgactacgtggccgcgctggagatgcaggtcaaggccatgcgcgccctcgccgacgcgctcgccgccgcgcagctctcctcgtcaactccgcagcaggcggaggccgccgccgacgagaccgagatggagaggtgagggtttcgtggtcaatcgtgagttcatcacacgatcgatgatgctggattcgattcgatggctcggaaattggaacggctcggggaaaaaataagggcgattaattagtggattattattgcgagagggtttgggatttgaggagggtaattgcgatgattgatgctgctgataatgctgctgctgctgctgctgctgatgatgatgatgatgacgatgatgatttgtaaattcttgatacttgtataagtaatgctgctctgctcctctcttgtttttttctccttgattcttgaaatgtttttctcctcctgatttccaaatcatgttggggattcctgatttcctgtttcatcttgattagtagtattatgctgtgattggggattagtgtgttttgccctgtgttaatcagggattatatgttctctctttttttttttttgcttgcgaagaattggagagaaaaaaatgtgaattctctcaaaataggtatt

SEQ ID NO: 20331 - DNA, 1719 bp, Oryza sativa
  ref <308>: DATABASE ACCESSION NUMBER: AK070652
  ref <309>: DATABASE ENTRY DATE: 2001-12-06
ggcggattcgatcgcctccgccctcgccctcgcctcgcctccgcctcgctcgccacccacccccgcacatacaagcgcgacgaggaagaaggggacgccgacctccaagaacccaccccaacccccccgagggtgggaggaggaggagggaatcgaggccggaggcgccggatatggggggcaatccggcgatgcgggccggattggcgttggtggtggtggtggtggcggtggtggtgggggatgtgggcgcggcgttgccgaggttcgcggaggcgccggagtacaggaacggggaggggtgcccggcggcggtggcgggggcgggggtgtgcgacccggggctggtccacatcgcgatgacgctcgacgcgcactacctgagggggtccatggcggccatctactcgctgctcaagcacgcgtcgtgcccggagtcgatattcttccacttcctggcggcggcggacggcggcgaggggtgcgggggtggggtcggggagctgaggaccgccgtggcggcgtcgttcccgtcgcttcggttcgagatctacccgttccgcgctgacgcggtcaccgggctcatctcggcgtccgtgcgcgccgctctcgaggcgccgctcaactacgccaggaactacctcgccgacctgctccccaagtgcgtcccgcgggcgatatacctcgactccgacgtgctcgccgtcgacgacgtgaggcgcctctgggagacgcgcctgcccgccgccgccgtcgtggccgcgcccgagtactgccacgccaacttctcccgctacttcaccgagaccttctggtccgacccgcagctcggcgaccgcgtcttcgccgggcgacgccgcgcgccctgctacttcaacaccggcgtcatggtcatcgacctccggcggtggcgcgtcggcaactaccgtcgccgcatcgaggtgtggatggagctgcagaaggagaagcgaatctacgagctagggtcgctgcccccgttcttgctggtgttcgccggcgaggtggaggccgtcgaccaccgctggaaccagcacggattgggcggcgacaacgtcctcggcagctgccgccctctccacaagggccctgtcagcctcatgcactggtccgggaagggcaagccatgggaccggctcgacgccggcaagccttgcccgctcgaccacacttggaaatcatacgacctctacattgcagagggtgattcatcttcagcatcagcaccgttcgcattgtcatcatcggcattgcctgcggcggcattttcttggtagacagctaatgagtatacacaataattctttcattgaggttgccttgtggagctgtgtgtggtgatggaattgctttgcaattcattgccacagccatcacagctgccaccacaagccagctgccgccttcggctgtacaggacagtgaaggggaggggcggcacactgcggtggcgcacaaagggaagatggagaatagaggaagcaaattcttgttcatttgtggtacaattcagattgattcgttaggcttcggtttggaggtggctgactttggggggatggaattacttgattggtggtgtacaattcttggataggataaaggtttcatttttttgtctattagttcagaatccacatgtttgttcgctgaactcgcataatattgattgaattgatttgaatcaaaatgagttgatcc

SEQ ID NO: 20332 - DNA, 3691 bp, Oryza sativa
  ref <308>: DATABASE ACCESSION NUMBER: AK070653
  ref <309>: DATABASE ENTRY DATE: 2001-12-06
gctcctctcttctcctccccacctctcccccctctctccttccttctcccctgcgccgcgcccgcctccgcctccgcctccgcctccaccgccgccgccctccctgcacgcagatcagggcgcctctgcctccgcccacgccgccgcagacgcctcgccgacgtggggggctctcggcgccgccgcctgcacctctgactgcctgcctgactcgacgcctcgcatctcctccgccgcctgttcgacgggtggcggtgaagggaaggcttggacgagtacgtctctgagcgacctgcgacgaccgacgagcgccgccgccgccgccaccgactctgccggggacggtagccccgggataggaggagggaggaggcgctgccgagttggcttcttcgccgcgcgtatgtgatttgaggcggcggccggagctggggattcgcgcgggctggacgacgacgacgacgacgaccaccacgccgtggatgcctccgccgccgccggatcggagggacttcctgtacagggatggccgcaggcacgacggcgaccccctcccaccgccagcccccacgccgccgaggtggcgcgactcgccctcacctcaccccgccaccgcccctccgtgaccactcgcggcggctataagggtttcagccggtacggtggtggtggtggtggtggcagccggagggacggccgtgacatgcggggttcctaccggaggtcgccctttaggggatacgggagcgacttctccagaaaccaccaagaacacccgcctccgccactgaggaggtcgcccctgagatcagttgctgtaccgatgtcttatgaccctcctggtgatagggctgataggggggatagagaccatcatcaccgtgtgactccttggcggccgctgcgccggagggagagcagatctgatgctgcagacgctgctggggctggacctgtgcctgttggacaggccgctgcagcagcggcctcagagaaggacgtttcagctcggtcctcagccgtcgcggctcctcaggtctctgaggaggaggcaccaaggaagaagcctcggcttggatgggggcaaggtttggccaagtatgagaagcagaaggtgcaaggacctgcagagtctgctgaagctgttgccgaaggcagcccaactgccaccgaacaaaagggaatcacccatacaccagcacctgcgccttgtgtgtccccagtggcggcaccatcacccacgccttgtgcgtccccagtggcggcaccatcacccgcgccttgtgtgtccccagtggcggcaccatcacctgcaccgccatgtaaatcaccagtccctgaagataaatcctgtgaactgacagcaaatacagtcactgaatccaataaaaatatcccaggacctgacgttcaggcttgcaataacgaagtccccactaagttagatcagcttgagggtgatcccattgattcgcttgcaaaggtcctttctgaactggtgcaacatgaagattcctgttctggggattcgaaaagactgtccaatgtcagtaagttattgttactgaaggaaagcattagcaaagagctcgaaaagacagaacttgagattgactccttggaaggtgaacttaaatctgttaatgtggaagccagaaatagaacactcaaagatccacctacagctgtaacttatgcacaaaatccttcaccttcacctgtgaaagaacaaggagagctgaccccttctcccaagatttctatggagcaggatgctgatgtaaaaggctcagagctcatggaaatagagacagctcaagctcataatgcaaaagcagtttcttcagaagagagtgttgcttgtcctggagttgctctgggtcaggtccctgccgctgctgatgttatcccatctgatccatgtgggaaaactggttctggaattgatgtcgatattgagcagcgcgaagagaatccatgccaagaaacttttaatgccatgaaagcagatggaagcagtgacttggccacaaggccttgctcttatcgtgaagttaaatataacttaatggatcaaattattgctgcgaacaggagtgaagccaaaaaaaattctcaattactatttaagcctgtgccagctgatcggtccaatcttgatttattggcatcaagctatctttctagccaaatgaagaatgatgtaattatcaagaagaagcatgccatacttaaaaatcgacaaagattcaaagagcagattcttaccttcaagttcagggtgctgcgtcacctctggaaggaggatgtgcgacttctttctgtaagaaagcagcgctctaagtctcataagcgcacagaccagagcaaccgatcatcacagagcggatctcagaggcaacggtcctctaatcgctccagattggctgtaccagctggtaatttaagcacatttcctatcacagaaatgtcaggtgtagcaaggaagctgttttcagaatttcagctcaagcgttgcagaaattacttgaaaatgcctgcactgattgttgacgaaaaagagaaggcaggtgctaagtttgtgagcaagaacggtttagttgaggatcctgtttcagttgagaaggagcgagctttgataaatccatggattcaggaggaaaaggaaatttttatggagaaacttgcaacatttggtaaggatttctccaaaatatccagtttccttcagcacaagacaactgctgattgtattgagttctactacaagcaccataaatctgatagtttccgagaagttaagaaacttcttgatcttcggcagcaacagcaacctgccaacaattacctaggagcagtatctggaaagaaatggaatcctgaggcaaatgcggcatcacttgatatgcttggggtggccacagaggtggcagcccaaggccttgaatatgtgaatgaagtgaagaaaaattctgcgaaatctatcctgaggactgtttgtggtgttgataattctaccaaaggatccgagaaggattgtgttggggatgtttctttgcacgagagagaatctgtagctgctgatgtcttggcaggcatatgtggaactctctccccagaaggcatgggctcatgcattaccagttctgctgatcctggccagaagatagggatcatctcaagaatggagcatcttttaactcctgaagcagataaaaactttgatgatgacggcactctctcagatcaggagtgtgaagttgacatagttgattggaatgatgatgagaagtcaagttttattgaggctatgaatagatatgggaaggatttcgctcgaatttcgtcatacgtgaagagcaagtcatttgaacaatgcaaggtttttttcagcaaggctcggaaatcacttggtttggatctgatccatcaaggtgctgctgatgctggtttccctacaggtgatgccaatggaggaaggagtggtacagatggagcctgtattgctgagatggattcagctatctgtagtgcacagtcatgtcctaaagtggagatagatgcatgtcctgtttctgatggagaaattcaaggacataatcctctttctgatattgcctctaggcagccagaagctgacaaatcaaacatgcctgatgttgtggacataaatgtcgaggaaggtgaaagc

SEQ ID NO: 20333 - DNA, 780 bp, Oryza sativa
  ref <308>: DATABASE ACCESSION NUMBER: AK070654
  ref <309>: DATABASE ENTRY DATE: 2001-12-06
gtgctggggccccatccaccacgctccgccgccgtcgacgacgacgatgagccagagccgccaccgtggtcctggaccaccgtggagccactcccgcaattccactccggcctcgtcaccggctacgccttgcacccggatgggcgcaccatcttcatttccatcgaggattgcgttacgtttggcacgcgtaaatccaccttcagcttcgacgcggggcgcctcgagtggacccgcgtcggcgactggatgctgccgttcgagggccaagctcactacgaccgtgagctggacgcctgggtcgggatctgccgctacggtgaaggaaccgggcatctctgttgctgcgacgtccctccttcgcccgccgccgatgctgcttgtaccaccaccttgcctgcctggaagttttgcaaggaggtgatgttcaagaagggcttcaccgggtactggggggctacgctcgtgtacatgggcgacagcaggttctgcctggtggattgccgggtgcctgatgactgtgacgtccgcaccaccctccgtgtgctcaccatcacctcctttggtctcaagtatgataaggccggtgaactggtcaccactcggtaccgtgcttacgcatcgatctcataccagattgctggcaaatttaagagactcgaggatcctatagcattctggatgtaatttatttatgatcatgcaaaactagttagtagtatcaggtgttattgtcctactcagttttattatatatatatgtgagcatgcaattttggc

SEQ ID NO: 20334 - DNA, 1687 bp, Oryza sativa
  ref <308>: DATABASE ACCESSION NUMBER: AK070655
  ref <309>: DATABASE ENTRY DATE: 2001-12-06
ggtggcgaccgccggaggaggggaatgggaggagggctagcaatgccggcggcgcctagcaagcgcgacggagccggcgcgccgcggcagaacatgtgatattattggacagaccaaacgaggatcttaatgcctatcttgaggcgattgataagttgactagtgtcgaatacttttttacttccaagataagatgtagagttggtaatgatgttcacgaacgtgttaacgaattgctttctaaagcaatccatgggttggagaatgaattccacaggctgttaaccaaatgcagcaaacctgtagatcttgagaatattttcaactgtctatcaagtcttaatcggcaattgtcaagtgaggaccttattggcccatcagccggtgattattctgaagcaccgctaaaacagtatgctgagtgcactcttcctacactcgttgatccctgttacttgactttgctctcaaagttagcacagaaatcaattcaacttgattgccatcagaagtttatggaaatatacagagaaattcgtagttcaactttggaacggactcttaagcgcttgggagttgaatatgttacaaaagaagaaatgcagcaagttgaggctcagagcatggaagctaaaatcgccgagtggacacaattctcccgaattacagtaaagttgcttttcggcgctgaacgcattctgtgtgatcaagtatttgaaggaaagtatacatggaaagaccattgttttgctgaagtaacagctaaaagcctttcaattctactcagttttggagatgctgttgttcaatcccaaatattgccagacaaactatatatacttctagatatgtataaggcaacattggaacttcaatccaaggttgatgcaatctttgagggtaatgcatgctctgaaaaccagaaatctgcccttactttaactaaaagccttgcacagactgcgaaaaagacaataggtgatttcatggaatacattctgaatcactcggtgacgagtacgactgttgatggggctgtgcattatatgaccagctatgtcactgattatatcaagtttctttttgactatcaatcatcaataaagcagatctttggagatccctgtgttgaagatgaaaaagatactgatgtggtctctcaaattgttggtgcaatacatgctctggagaccaatctagctatgaaggcaaagcaatacaaggaccttgctctggggcacctctttttgatgaacaacatccattatattgtcaagtatattggcagatcagaattgaaggatttattaggtgctgattggattgaaagacaacgaaggattgtgcaacaacatgctactcgatatagaagagttgcttggctaaaggtattggagtgtctatcaactcaaggtctcacttcatcagtaggctcttcaattgatgtcactcaaggaagttttagaaatattaagaacagtacaacctccagatctgtgatcaaggagagattgaaatgtttcaacatgcgatttgaagagatttgccagaaacagatgaactggggtgttcctgacagagatttacgagattccctaattcttatgattgctgaaatattgttacctgcttatagatctttcctgaaacactttgggcctcttgttgagaacagccacagcgcttt

SEQ ID NO: 20335 - DNA, 1513 bp, Oryza sativa
  ref <308>: DATABASE ACCESSION NUMBER: AK070656
  ref <309>: DATABASE ENTRY DATE: 2001-12-06
gattccaatccaaaagtataatcaagcaaagcagctcgatcgagtgttcgactgatcaccagttggagctaatcgatcgagagagagagtatgacggtggaagtggaggcggtgacgatggcgaaggaggagcagccggaggaggaggaggtgatcgagaagttggttgagaagatcaccgggctggcggcggccatcggcaagctgccgtcgctgagcccgtcgccggaggtgaacgcgctgttcacggagctggtgatgacctgcatcccgcccagcagcgtggacgtggagcagctgggggcggaggcgcaggacatgcgcggccgcctcatccgcctctgcgccgacgccgagggccacctcgaggcgcactactccgacgtcctcgccgcccacgacaacccgctcgaccacctcgccctcttcccctacttcaacaactacatccagctcgcccagctcgagtacgccctcctcgcccgccacctccccgccgccccgccgccctcccgcctcgccttcctcggctccggcccgctcccgctcagctccctcgtcctcgccgcccgccacctccccgccgcctccttccacaactacgacatctgcgccgacgccaaccgccgcgccagccgcctcgtccgcgccgaccgcgacctgtccgcgcgcatggccttccacacctccgacgtcgcccacgtcaccaccgacctcgccgcctacgacgtcgtgttcctggcggcgctggtgggtatggccgccgaggagaaggcgcgcatggtggagcacctcgggaagcacatggcgcccggcgccgccctggtggtgcggagcgcgcacggcgcccggggattcctgtaccccgtggtggacccggaggagatccgccgcggcggcttcgacgtgctcgccgtgcaccacccggagggcgaggtgatcaactccgtcatcatcgcgcgcaagccgcccgtggcggcgccggcgttggggggaggagacgcgcacgcgcacggccatggcgccgtggtgagccgtccatgccagcgctgcgagatggaggcgagggcgcaccagaagatggaggacatgtccgccatggagaagctgccctcctcgtaggcaggcatcgatgactgcttccatcgcttgctacctcaccagctcacctgataaatcacctcagttactatcgattaatcatttaccatgcattaattaagaagaaaacatatataccataattatctaccagtaaaacaaatctaatagtagtatttaataatctcgttggtaattaactgcagtcatgcatgaatgcatgccatattgcgtcgctatctttttttcccatgatgagactgatgagagagagagagaatatatgtcgctattgagtgttactgcttgattactgtactagtagcttattacaatcaaccattgtctctgttgcgtatttatgagtgtaagtggttaattttctgttgcagcataattaagttacctgtat

SEQ ID NO: 20336 - DNA, 1686 bp, Oryza sativa
  ref <308>: DATABASE ACCESSION NUMBER: AK070657
  ref <309>: DATABASE ENTRY DATE: 2001-12-06
gatcgggaagggcagattaagatcgatgcaacaagcagaacggctaatccgcagcgttggacgacatgcacgtacgatcgccggcaaggtccatggacacctccctctccatcgccgtcgcagccgccgccgtcgtgctgctgctcctcgtgcggggcgccgatgccgagatcaggacgacgctcatcgtgtcggacgctcggcctctcattctgttcgagcagtttggcttcgagcgtggcgggaaggcgaccatctccatacgccgctcgttttggaatctccggcgggggtcacggcgcaccgcggttgaccccagcctcatggggttcgtcctcatctccggaacccagttcccgaagatcaacaacgcgtccgcgtacgcggccgccgacccgggggacaacggcgacgacggcgggggcagttactgcgtgctgacgagcgagtacgccctcccggtgctccggctcggcgacgtcccgcccggcggcgtcaccaccaccgtgagcatcgacgacccagaccagtacgccgtcgtgttcagcaactgccaggacggcgtggaggtcaccgtcgacgtgtacaccgagatgtacaacgtgcgggacggcatctccgacgggcccagggactacctacccgtgggcctgcggccgctgccgaccatctacacggtcgtgtcggaggtgtacttcgcgttcctggcgctgtgggcgtgcgtgtgcgtgcggcaccgcgcgacggtggagcggatccacgccgtcatgggcgcgctgctgctgttcaaggcgctcaagatggcgtgcgcggcggaggactcgtggtacgtggagcgcaccggcacgccgcacggctgggacgtggcgttctacgtcttcggcttcttcaagggcgtcctgctcttcaccgtcatcatcctcatcggcaccggctggtccatcctcaagccctacctccaggagagggagaagaacatgcttatgatcgtgatcccgctgcaagtggtcgagaacctgttgctggtggtgatcggggagacggggccgacggggcaggactgggtcgtgtggaaccaggtgttcctgctggtggacgtcatctgctgctgcgccgtgttcttcccgatcatctggtcgatccgcagcatgcgcgaggcatccaagaccgatggcaaggcggcgctcaacctccagaagctcacgctgttcaagcgcttctacctcgtcgtcgtcggctacctctacttcacccggatcatcgcgtcggcgttcctcgccttgctcagctacaagtaccagtggggcgtcaacgtggccatcgaggccgccagcctcgccttctacctgttcgttttctacaacttccagccggtggcgaagaacccgtacttgtacattggcgacacggtggaggacgcggcggtcgagcgtgagatggacgacgaaggtcgattttgagcgccctcgtggatcgtccatatgatttttccccccaagttttatgcgtttcattagttggctagctgcgttaattgtgtacgactatatgtttcgtgctcgatcggagcgtcaggctcgcggattggcgtgtgcctgaaacggtgatgatgtgacgactggtgtgtctctcccttttgtacaagaaggcatgctcaacggatcgggaaattagcaacaaaattgc

SEQ ID NO: 20337 - DNA, 2430 bp, Oryza sativa
  ref <308>: DATABASE ACCESSION NUMBER: AK070658
  ref <309>: DATABASE ENTRY DATE: 2001-12-06
gggaagaacacatagttgctcaccggtttcagttgaaaagaaggggagaaaataaaaagctcaccggcggcttctctcctctcgccggtcgacggcgcgatgctgcgcggattccctcaggcccggaggctcctcaggtgatctccatctccccttgttcttcttcttgtcctgcgcaaccgatgggcgggttcttgatgcgccgtcgctctgggtatggggggttttggtttcaggaggatggggttggagaaggaagacgcctacttctggaagcagatgggcaagggcatgctctgcacctacgcgctcttcggcgccgcctggctctggaacgaggcctctcccctcggctggtggacgctcaagccgcgccccaaggtaatctcttcttgtagttagggtctagggatgcatatctgaagatatgatttaactggaaccaagcctatacaatcagtttcttggggggttttctttttcagaatttttgaatacagataactctgagcatggaggattaggtattttgcagatgtttctgtaatgttgattgcacaatcgaccagcatattttccttagtgatgtatgatgacagttttatacaaggagggcctgtaaattctcatttggttataatatttactgttgataaaaacagtgagttgcactgaaaaatatgcgacatcattgggagtccaattaattgataacgagaaggaaaaaccctaagcataatgctgatcctgcagtttatctatgaaaactttggcagcctttttgatctgtaaagacgacgtagaagttgaccgtgcagtgttgttaattctgacattcctctcacagtttgttttcctatctcctatacatcttaatagtgttgttgaatctttcatcttatgtttaggaaatttctaaatcttatttactctgttgaaagaagtaccgtaagcacattgagatattagcacattactgttgattagggaagcttatttatttgaatttattatcttaggtagaactcacatagtcgcaccgatatcccctgtctgattcttcttgcataatactagttgggtgtgagaactctgaaatgagattaattaatagcatgtgtatatttttcaaattaaaactgaactctgaaatctgacaaggtggaaacgaactgatgtggcattttgttttattgtaagatatatgtgcagagaaataaattcatcctgtttttatacccaattactgaaacatcttggttaaggaccaccagtagctaatgccaattcatcctgattctgaactctagtcaagtattcatctttcttttaagaagtcactgttgattttggcaaatcaattgatgagaagcatgttctgtattttgatggtatgctattcaatgaattttctggctggctggatgcatgaaacatagcatacggtagcctcctaatcgtccatatgccacattatactttactgaaccaacaattatagatcttcatttgcaattcctaagcacctctgatatgtatcgcctatatccatctcaattcccaaccatgaaatggtaggatgaaacataagtgcataaacattagaatgatatatctttttaaaaaaatgtattatagttgtgtagaaacaaatagtttgccattgagatctcagaaagatataggtatttttgttaccacgtgagctaaagctcttttgaaacattgtggctaacagcctatggccatatatgtgctaagaacctaacacttctttcggcttactcttattcaagttatcctttctgatatgttatcttccatgtttctcaggaagaaagagaaatggcccacctttacgagcgcaggatgtttccatacccaggtgatgaagaggcagttgaggagttcataaaaagtggaggtgctctaggcaccacaattggacccaaaggttttgctgattccaacatggactctgataacatgcagaaacaattgcagtcaaaaaagtttgaccaagaagcacagaagctctggtttcggatgaggaatgaggtcgtacaagaactccaagagaagggattcgatgttgaatgaaattttacttctacataaacagaaatggagtaaagctgaagtatgtgcaaattgtttcagcttgttagccgtctaggaaattaggagcttagaatgcacgcaaaatgttaaaacacctactttgcaatctggagattttttttttttaatttgagaaagcaatctggagaatctagagagtttactattcaacttcaatttggtcttgttgggtcattgcattccatcagttacagattttgtaccttaaagatatggtatcagttaccagtatctcctcgcgtttcagttttgaagatcatattgtctggtttctataaattttatgcc

SEQ ID NO: 20338 - DNA, 1387 bp, Oryza sativa
  ref <308>: DATABASE ACCESSION NUMBER: AK070659
  ref <309>: DATABASE ENTRY DATE: 2001-12-06
gcgattttatccctttgagttcgatgcgaatttggattcgttttcgagtttatctctccaaactaaccgtcggattttccggctcaaatcctctcgtttggagtccgatctccctcacccatgcctatataaagcatcccctagtcgtcctcttccgtttgcctcaagtccaagccgccgccgcggaaaccctagcgccgacgccaccgtagccgcttcagccgccgctatgatcgtcaccgccgccttccgtcaccactgtcagattcgccaggtggaggagcatcccgtccgccccttcgcagccgccgaagaccgctggagagtcgccgccgtcgtcaagccgagccatgtcgccgtcggagttcgtcgccggtcattttctctcatcgattgtcgtcgccgtcaccaccgtttccgatgttccgtaggagagcgtttacgttgaggaaggttcagaagcatttgaagaagctcaaggtggggagccttttccaattaattatggccaaagatgactttattttcctatgggttataaattgattggcttgaaccttatatattggtttggttcagctaaatgctatatatataattgtttagccatgcctagaaacattagctcattaatgggatgaatcacactacattattatttatggttatatataatggtagctcacgatggttaatcgtgttatgataattaattgataattaaaacccgattaaaggtgggttatgagcacatggttttgatggtcgtgctcatgacaattaaggaccagttcgcgagctactgttgtgaaacattaaccgtgccaaccacaagccagtgtgggcaacagcttgatgaggacatccctagcagccactcttccccacctcctaataaacgtgcatctgatatagtgggtccaattacaaggagcagagccaaacaattagagaaggaaattcactctcaggtgaacgctaaccttgtgttaactaatcaaattactttggatgagcctatgcttttgagtacttgttttaatgttcttaggaatgatggagtgcacgaacggacatgggatgatgatggtttctaccctccaaatatatggactaaggagcctggacgtgcatagcaaagaggaaccattcagctgctatacatagtaaataaaaccttcaaattgttgtttcgcatgtggagctgcatgcaaatgaagtccaaacatcaagagagctccactaggccatgaatgcaaggattattgtgacttcctactgcatgttttcatttatgtttttaaagactccactagtgctatatatagccatgtaatagatgacaaggggactttttggctgccaatttagaaatacaaactatttg

SEQ ID NO: 20339 - DNA, 1601 bp, Oryza sativa
  ref <308>: DATABASE ACCESSION NUMBER: AK070660
  ref <309>: DATABASE ENTRY DATE: 2001-12-06
gactgtctactgctccctccctccatcccttgctcgctcgcgccacaacgttatcctctcctcgtagatgtggccacagtttttgcagccggaacgagctgtccaggctactactcctactagccatctcccacccacttatcacgaggctaacccgcatgggcgcgcgccaaggaggcgggaggagtagcacaccgccaccatcaccagcagcagcatggtgcagctgagccgccgccggcaccgcgagcacgctccatagccctctgccatggcggcagcttccgtcctcctcctcctcccttcccccttcctccgtccgtcgtccccggcgcaccgcgcgcgctgcggcattgccaccacgacgacgacgagcacgagcgggaggagggggctcttcctcttcgcctcgcgctgccgccccggcccacggcgacgcgcggcgtcggcggcggtgcctcccgagcacggcttgtcccagccccagccacaggcgcgggcggtgggctcgtacgaggccgccctcggcgacgccaaggacgcgctctacgccgctctggaaggcatgaacagagggatattcgggatgacctccgagaaaaggtcggagattcacgcactggtggagctcctcgagtccaagaacccaacgccggagccaaccgacaagctgcaggacaaggtggatggatgctggaggctcgtctatagcacgatttcgatactggggaagaagaggacaaagttgggactgagagatttcatcagcttaggagatttcttccagatgattgatgtcaaagaggaaaaggcggtaaatgtgataaaattcagtgcaagggcgttgaagatattatctggccaacttactattgaagcttcgtacaagataactactaaaacaaaggttgatatcacgcttgatagttcgaccatcactcctgatcagctgatgaatattttccagaagaactatgatatgctccttgctatattcaacccagaaggctggctagagataacatacgttgatgaatctctacggataggaagagatgacaaggcaaacatctttgtgctggagagggcagacccctcagaagtttgacaagatttatctgaagcaaaatgcctgcatatacatggacattccggcaaagatgcctttgcacatacccgtcctgtaacacggtggtttttaacagccagtgcagatcgtgtgctcaactttccatttgcgttagattatactactgctatttttttttctttctggagcaaaaggcatttccctttgcgacaaaatcatgcaagctgggaaagctcatgcaagttcagttacactacatagagaattggtacattaagaactggtgtacttttgaattttgaaatacaccattttcaattattcatccttgtaagacataatctaatgagtgtacagcttggcaaatggcaataccctttagacaaagttgttgttgttgttttttttttttaaatgatcgctgggtgatcccttatatcagctctttgttcctgccacgccatgcgtcatgtaataataactgggcggaaagaaattcttgcgttatgtc

SEQ ID NO: 20340 - DNA, 2035 bp, Oryza sativa
  ref <308>: DATABASE ACCESSION NUMBER: AK070661
  ref <309>: DATABASE ENTRY DATE: 2001-12-06
attttcctgcccccggggcggcaggatccaagcaagctagcacagccgccaccaacaatttcatcgcgaatcgcaagagcgaggagacgagaatacggccacgaatctgcatccgcttgcccgccccattcccccgtccaaatccaagcagccggcggcgggtgcggttcggtgaatcgaatcgtgggcaaattgttttgttccattccgctgctgcgtcctgctccgattcagttcgtgcgctgtcgataaaaccgatgcttcgccccgcgaaccctagctcggggtgctgcggcggcggcggcggcggcctgtagactgtagtggtggctgtgggacgcgagggtcgctcgccatgccgtggctggagatgtggctgccccccgcgggctcggggggaggaggagaggggatggcggcggggctgttcctcgacggcgaggcggcgcacggcgcgctcctcgcggcgatgcccggcatctccgcgtcgttcggcgtgcggcagcggcggccggggttcgtgtcgctgacgatgtcggtgaaagggggcagggggttcgtgagtggcccggtggggctgctcgcgagcggggaggagaagggcgcccgggcggaggaggcggaggcgctggtcgcggggaggagggcgacggaggaggaggtggcggaggcgtcggaggggaaggtggtcgaggaggtgaaggaggctcgtgctggtgcgggcgccatgaacatgacgaaacatttatggtctggagccgttgctgctatggtatctagaacagttgttgctcccctcgagaggctaaagttggagtacatagttcgtgctgagcagagaaatctatttgagcttatccatgccattgcaacaacacagggtttgaaaggcttttggaaaggaaacttcgtcaacattctccgtactgctccattcaaagccgtcaactcctatgcatatgacacttacagaaagcagttgctcaaatggtctggcaatgatgaaacaacaaactttgaaaggtttatcgctggtgctgctgctggtgttacagcaacgatattgtgtataccaatggatacgattaggacaaggatggtagctcctggtggtgaagccttaggaggagttattggtgttgcccgccacatgatccagactgaagggttcttctctctgtacaaaggattggtaccttcactcatcagcatggcaccctctggtgctgtattctatggagtatatgacatattgaagatgggctacctgcattcccccgaagggaagaggagggtatcaacgatgaaacaacaaggtcaagaggcaaatgcattagatcagcttgagttgggcacagttaggaccttactatatggtgctattgctggttgctgtgctgaagcagccacatacccatttgaagtagttaggagacagctacagatgcaagtcaaagcaacaaggatgaatgcttttgcaacatgccttaaaattgttgatcaaggtggagtaccagcactctatgctggcttgatccccagcttgctacaggttctgccatcagcgtctatcagttatttcgtatatgagttaatgaagatagtcctgaaagtggaatgaatgcaaattaattcttgagcatgcacatcaagttcaagaagcccagctcacattaccttgacaaaattcaagtaaacagcgcatttagatctgtttttgtagcatttcttcacggaagcttcaaaggccgtgggagtaactttatcttggccaaagcctgaagcattgttcgctcgaagcttttcaccacaagattaccttatacacgatgaggtcttgttcgacatctgattcgatcaccgatctgttgcagattgatctgtcatagcaaaaacatatgggcttcttgcccttcagatttcaattaacaaattttcaacttttcatttttgatgtattgatgcatcgactggaagggaaagtgggtttgctacttgctacaacctacaaagtggcatgttgattcccttttgc

SEQ ID NO: 20341 - DNA, 1047 bp, Oryza sativa
  ref <308>: DATABASE ACCESSION NUMBER: AK070662
  ref <309>: DATABASE ENTRY DATE: 2001-12-06
gcgcaaccaccaaagccgaggaggagatcacgagacgagagagaggcagagcaatcgaagccccacgccatggtcaagatcaagatgcccgccctgttccgccgccggagcggctccaagtcgccgccgctgccgcaggccgaccccgcgtccggcggcgggtccccggcgccgacgccggaggaggagatggagcgggtgttccgcaagttcgacgccaacggcgacggccggatctcgcggtccgagctcggcgcgctgttcgagagcctcgggcacgcggccaccgacgacgagctcgcccgcatgatggccgaggcggacgccgacggcgacggcttcatcagcctcgacgagttcgccgccctcaacgccaccgccagcggcgacgcggccgccgtcgaggaagacctccgccacgccttccgcgtcttcgacgccgacggcaacggcaccatctccgccgccgagctcgcccgcgtcctccacggcctcggcgagaaggccaccgtccagcagtgccgccgcatgatcgagggcgtcgaccagaacggcgacggcctcatctccttcgaggaattcaaggtcatgatggccggaggcggctccttcgccaagatcgcctaggatcaatcaaccacccaatttcttcccttctcctcatcctcctcattgaccaactcctatccatccatccatccgagcgtgccgtgtgcggtggaaattttaagtgtatatacaaccgattaaaagaccactagccctagattctttctactaataattgcgattctcaactactactagtttctttcttggtagattggaaattggaggctaaaaagcagcaattctatcccctgcttttggttctaagacacgccaatgctttctctcttttttttccccacaagatgtaagcgtttgcgtggagtaagagtcttggatcttggatcttgcattcttgtttcgattgttcaccatctggaattctggatgtcagttaatctgatcttaatataatccccttctggatgtcatgtcagt

SEQ ID NO: 20342 - DNA, 1533 bp, Oryza sativa
  ref <308>: DATABASE ACCESSION NUMBER: AK070663
  ref <309>: DATABASE ENTRY DATE: 2001-12-06
gatactagacatttccgatgggcaagaacgggaagaagacggagtcgcaccggcaaggccgaggccgccgtgcctcacgcttccgcggcggcggcggcggcggcgacgaggatggtgacgagttgccttcatctgcctatgatgctccaccgccacaccacgaggactccgacggtgacgacaccgacgaagcagcagccgaggacgaacacgaagggggtgtggatggaggtgaccaggagcagcgggaagtaggttccatgccttccaagttccacctgtaccaactctccgtccagtcgccaaaaggggacattagctacctgcagaagttcttccttatgtacgtcggcgggcgcgtccctctgcacttccaagaggatttctgtggcacggccctcctcagtgctgagtggcttcgtactgatgcaaggcgtacagcagttggcttagatttggaccttgagtcacttgagtggtgtcttgaaaacaacctgagcaagattggagctgatgggtattcaagaatgctacttttccatggaaatgttctacagccaaatgtagctcgcctagtcaagcaaaagatctgtgatgccatgcaagatctgcacgtaaacaatgataatgactctttagcaagtaacatctgtgatcagttggatcctgctagcccaaaatgctcagccaattcaaccatgtcggatttggttttgccggcaagagacattatttgtgcattcaactacagttgctgttgtctccacaggagaaaggacttggttttgtattttaggcatgctttcaatgcactgtcaaaacgaggtggtatatttgtaatggatgtgtatggtggcacatcatctgaacgcaagctacgtctgcagaggaggttccccagcttcacttatttctgggagcaagaagagttcgatatcataagtcaccaaacaaggatcagtctccacttccaagctggaaagaagcaaatgttacggcatgctttcacgtaccattggcgcctgtggtcgataccagaaatcaaagactgcttggaggaagctggatttaaatcaatccatgtctggatcagggagatgccaaatacccaatcaagtggaaatgctaaagaatataatgccaaccgtgatgtgaaatatgaagaattacagcatttcaatcaagcagatgcttggaatgcatatgttgttggagtagcaaatatctagatgattcatgctaccttctttttttagagagaagatgttggaaacctttgcagttttccgttctgatgctatccggtcagtttctctgatgctgcctgccggagtagtatctttttatctaatgcacaagtgcttaacatggattcccttctcgttgaaactagaatgtgtaattgctccactctatgccaggaaactaggaaagttgtatgtcttgggctatgatgtttgttctagatgagatgctagctaacatgtagtatcatcatatctgtaccgatcaaatagagagcagtcaaacccc

SEQ ID NO: 20343 - DNA, 1844 bp, Oryza sativa
  ref <308>: DATABASE ACCESSION NUMBER: AK070664
  ref <309>: DATABASE ENTRY DATE: 2001-12-06
gggaggggttgtttgtctctaatcgctctcgttccccatttcgctttggaggcggcgacggcgagaggcgagaggagatggcggcggcgcgggggcagaaggcggtggcggcgctgccgcatctggtgaaatcgctgcgcagcgagcccgtctccaacgccccgaggctccggcacctcccgtccctcaggaggaccttctctctctacgatcagatcaacctcatcgatagcgtccccgaagaccggctccgattccaatcatatgatgacaccggattcaatataacaaagtaaagtatgaaggaagcttgttgatagtagaaaacaagataatgacatgggcacccaaatcatttgcagagataacagctgaaagtttatcaatcttcaaagtagtgcaccctatcccaggtaattctgctattggtcaacatttttaggcattttatcttaggcaacatatcctatgcacataggccctcacgtgtacacacgtgcacaccaactaaaaaatgtcaccaaaaaatctagaaaaaatcatacacatactttcaattgtattacacctagggttaaaatcttaacgtcaaattcattatattttagccgtaacaaaaaaaacaaaaaatctgacagttttaaggttgcaattttgtcagaattttatcttttttgttattctctatgtagaatgaatttgaatatgcgactttgcacgtagatgtaatactattgaaagtacatgtatgaattttcctagaattttttgtgataatttttagttggtgtacacggtgtgtacacgcgagggcctgtgtgcataggatacgctccctttatcttgattggacttagccattctgtcacccatgtttgaaatgtccatatggctgtttttcttttaaaaatcaatctcatggtgcagcttcattaggaagctaaaacaggcattggctgtttatcaatctacaaagctgtgcactgaattggtgcacaaatatttttaagaatttcagggtagaacacagtcaatgcaaaccttccttgaattaactgaatagtttaattgtccaagcatctttctcctactggggctcaagatgtgttccaggatattgcaccctcatggttgagtagttttttgtatttctgattcaaaagcaccgtttgtgggttgacatcattttgtgtgccatgcttctccagagattctgattcttggttgtggtagacacatccaaccaatcagtcctgagctccgcaaattcattcggtcaactgggatgaagctggaagcagttgattcggtaaaagaccaaatgttccttatttacaacatcatcacttgtgtttgtaaacttcaatgtagcagatatttgtagtttgttctctacctacaatgtttagtcttttgcacatgtctaatccttctgttgtatggcagaggaatgcggcttcaacatataacattctgaatgaagaggggaggccagtcgcggctgcacttcttccttgcggagtcacttcttgaaacacgagtgttacctttgtggtggtgagcgtcttctccttccagtcgatactcgatagagttgaaatgaagcatattgtcgcatgggaacactgaaaatctgtaacattaacaagtgccgttgccctgtccttttccttttccccacccaagaacccaaccccctaggagagatcacacctttggttttgtgggttcttctcttgtaatcgcgggaggacaaggtttttgacctagtagtatacatcagaataacgagtctgaaacaagttgattgtcttctataacatcacactcggttttttactact

SEQ ID NO: 20344 - DNA, 1289 bp, Oryza sativa
  ref <308>: DATABASE ACCESSION NUMBER: AK070665
  ref <309>: DATABASE ENTRY DATE: 2001-12-06
ggtactacccggccggccgccggcaaggcatcaagcccacagtttgactggcatctctggccacggcgaggtcacagctagcagcactggacgatgtgttgaagaaagggggcgccaaggaggcgcagcggcatcgacctcgtgctcaacccaaccgccgtcaataggttttaaggtcaggcctaatcatttttctcttttgacaaccaggcctaatcatttactaggatgcaacgtatacagaggcttcacacacacatcgacatggcgacatctatcaatttgatgttttcccaagttctagtgcattgcaagttcatccattacctttgaccaacaacaatgtcaggtgaatattttccatggaagaagcatgacgggtgcggtggcaaccggaaactctgctccagaccttgcccccggaccttgctacgtctgaagatgctggaccctcggtccaagagcgagttggatttgtcgccaagtccctggccggaggaagaagaaagggtacaaaagagatattcgctactcttaagatttgtgcggacaggtgtcgtgcgggaagcagagtctttcggataagcgtaggacttaagtcttaccaaattttcttccctcttgggtgggatagtttttttgggtgggctatttccaaatagctctcaaatagctcacccttttgaatctttttgagctatttgggctatttaagagagggctaaaaaatatctcttaaatccaaacagagccatgtcagaaatctcgatgcttatacccttcggaagggaactacggctggcttttgccagcctaaacctttattcatttcaaaaggttgggaacattacataacttttagttagtgtactggtgggagagaagtctcgaaggttgataatgctcatacttgcgcatgtcgtctgcagtatcacaggggatgtcaattggcgcacatgcgcttaagcttttaccaatgctgattgctgcatattcggtcctctccctcgtcaagtttgtggtactgtactagtgtactgctacgtttatagcaggccaaacgggcggcccggcccagcacgacacggcacggcccactagggcacggcccgttaggcacggctcctatagcgggccgtgccgtgccggcccacgtgccaaggccacggcccaagcacggcccaagaaggtgctgggccgtgccgggccggcacggctactgtagtggcacgtgggctggtagccggcccactagtacatgtggcccataaaaattgaaatttgagggg

SEQ ID NO: 20345 - DNA, 889 bp, Oryza sativa
  ref <308>: DATABASE ACCESSION NUMBER: AK070666
  ref <309>: DATABASE ENTRY DATE: 2001-12-06
gtgacgcactaccgccgcgactccgttctccattcgcgaatccaccggaagcgagcccccgatttctcgacttcgtcggcgaccgaccggggtccagaaccctaaccctaaccctagcgaggaagaaggcggcggcggcggccggaggggggagatggtgtactacgcgctgtactggtgggcggacctggacaacctcaccaacctgcagccccgctacggctgcgacgacccgacctacccctactacttcaagctgcggtgcgagaactgcggggaggtcagcgccaaggcaacctgcgtctccctcggcgaggtcgtcgacctgcccaacggacgcagcaccgctaaccttgtccagaagtgcaagctttgtgggagggatgcatagattgtgatgattcctgggcaggggacaccactgactatggagcagagccaaaaaggagatagaacttgtttgatggtctttgactgcagaggctgtgaacctattgatttcgcttttggtaatggctggaaggctgaatctctggaagggacttcatttgacattgactgctctgaaggtgagtttgctgattacgatgagaagggggagtgccctgtaggtgtgggcaagctgcggtcagaattcagagtggtgaagaagcaggagagtcgtgggaagactaaatatgtctagatccagcggcatctggggtattcaatcatacaagctgggaatgtataaagcgtattataaaatgagacctttctctcgtatgtgtgaacaaaactcgggaacatccttttgctgatgctgtgggatgccaatggatttggcgacatgttaggcaccgaaccatccattattccctaccagttccattaacctggatcatttcgt

SEQ ID NO: 20346 - DNA, 1366 bp, Oryza sativa
  ref <308>: DATABASE ACCESSION NUMBER: AK070667
  ref <309>: DATABASE ENTRY DATE: 2001-12-06
gaccaccgcatcctccccgcttttcccactcccaaccacgaccgcggccggccggcgaatcgcctcgattccggcgtgcgaattcctccacctcgccgccgccgctgctcgcgaccgatcttcaccttccgcttccccccccctgcagccgattggactcgatcctatcctatcctatcctatccccgaacgggcgatctggtaggcgagagagaccagccatgtcgggggtgttcggcaaggtgttcgggaagtccaaggcgcagagccaggccaccgcgctggcctccatcgacaagctcagcgagactcttgaaatgctggaaaagaaagaaaatttgctagtgaagaaagcgaatcttgaggttgagaaggccaagaccttcactaaagcgaagaataaaagagctgcaatacaatgcttaaagaggaagagattatatgagcaacagattgagcagcttggtaatttccaattaaggatacatgatcagatgataatgctggaaggtgcaaaggctacaacagagactgttgatgcattgagaactggagcatcggcgatgaaagcaatgcacaaagcgacaaatattgacgacgttgacaagacaatggatgaaattaatgacaatatggagaatatgaggcagatccaggatctactatctgctcctattggagctgcagctgattttgatgaagatgagctggaagctgaattagcagatctggagggggaggaattggaggcagagcttctagcacctacaacgactgcccctactgctccagtgcgtgtacagcaaccaactcggccttctgcccagagcagcaaaactgaagatgacgagttggcagctttgcaggcagagatggctatgtaattagttttgcaggctttgatagggtcatgccaaaagatcagatacttcaaatactcctatattggactctggtgtactcatgaagatcttcctaggaagatgtcagagacacagaagcaagctgcatgccagcctaacccgttatgtatggtatcatgtcatgttactgccttgtaaatcaaacagagctatttgagcacattatgagctaataaaatgtactacccgtgatggcgtcattatgatgtgtttcagtctgtaccatatcgttttgacgtttttagtgtaggtcaatttatagtttctcttgattcgaatctgaagtactacattgatggtcgaatatagacagttctctaaataatgtgaatgatgattgtatagggtgctgtacattccttcagttgttggtactgtcgacctgtaataaattattaacctaggctttgtagctgtctaaacagtgatgtatattagtcgtg

SEQ ID NO: 20347 - DNA, 1542 bp, Oryza sativa
  ref <308>: DATABASE ACCESSION NUMBER: AK070668
  ref <309>: DATABASE ENTRY DATE: 2001-12-06
gatactcccgatccgataatctcgccccccatcttcttgtattcccctcgctcctgctgccgctcacctcggccgccggcttgatgctactggcgcaaccatcggatccctgcgcacgagctccggcctgtcgctcccaccacccgtgacctccattgctgccaacgttggccgtgcgctctcaccaccaccatctccagatccttgccgaagtgctcccgccaccacaaccccaacggcggtggttcttccccaagttctcaccgggcacacgagggaggaaggaggcttgatttggtgcccccacccccctttgcaaaaatcaggaggttgagagctgattagtgattgctcgctggaggtgctgcctgggggctacatcgagcaaaagggtcacaacaggaagtgtgcatgactacaggtaaccgggtaactgggaatgaattgatgccatcagttaagcaggctcaatgtttgatgtgaaattcagggacagcttcactcttcgtggtcctataatctttatcaggattggaattttggaacttaactataggattaatcattgtgttggtaaatgtgtcgccgtgtattaaatttctctttcagtttttagatcaagaattcgctctttgatcaactgttactgaattataatacaattgggcatatgtgtaggaactttgcaacgtttatgtgttgataattatgctgcccccattcatgacctcatccctagtcccccatgaagactctaccaggaacaaaattcaggatgatgcctcctggtccgaacagtttagggaaaactcaatagagccagaggatctacacaagccttctattcattgttttaaattgccatcagtttcatcaaacataattctatctaatttgtgctctgtattgcttgagttaattaatgaattatcatccaaagcataacttgtagtgaacttatttgctacaaagtgttatattgttccatttagctattgaagttaaattgttcttatttatatattgcagtcgaatattgtttaagaaataaatactaagtttgcaaaacttatcaattgatttctagactgtaactgtactaaagtattttgcttctcagtatccttctttttatatttaggtaactgaactaacatatattaggttatcagaacaacatcactggaggtaaattttgctctcaaataagttatatattacatgccaaatataatgtatattaactagtataatccttgccagtggtaggatttatgatgaaatggatgaggaaggtgcagtcgaagacatattgaagggttgtttctctatataatgattagcggttctatccataagacctccagatcgaagaatatttttttgtcatatgtaacattgaagctcgggtgtcccagttagattaggtatcacaatgtatccctgaatattttattacaatcgattcaagaatgatatcattattcttgtactgattgttttgaaatattgctatgttgtgcaataatatatgagattgtt

SEQ ID NO: 20348 - DNA, 2624 bp, Oryza sativa
  ref <308>: DATABASE ACCESSION NUMBER: AK070669
  ref <309>: DATABASE ENTRY DATE: 2001-12-06
taccaattcacaacacacaccatgcatctcaaacaaatttctatggtccatccggacatctcatttgtctccatggggctgggcaagacactcttggtcgtctttagcttgctacatgccttagtgttagcaacatcagtaggtgttgagcatgcaacagatgatgtatccacctacatcatacatgttgcacatgtgcatgcgacacctccaactcatgcctcgcaatgcatggaccagcacgccattgcacactacacctcctttctccaagggatcctcccttctcacttaagcgagccaacaccacgccttgtctatgcatactcccacgcggccacaggctttgccgcgaagctagcgaagcaccaggctacacacatcgtgcaccatcccagcatccttgccatcttccccgacaagcgcaatgagttgcagaccactctgtctccctccttcctcggcctctcaccgtccaacggcctcgtgcaggcatcgaacgatggtggcactggtgcagtgatcgcagtggtagacactggtgtttatcctaagaaccgtaggtcctttaccgttgacccatcactgcctccgccgccgagcaccttccgtggccactgcatctcaaccccttccttcaacgcgactgcctactgcaacaacaagctcgtcggtgcaaagtatttctgtagagggtacgaggctgcattaggccaccccatcgatgagacgcaagagtcaaagtcaccacttgacaccgaaggccatggcacgcacaccgcttctactgccgcaggatctgcggtccctggcgccaacctatttggctatgccaatggcaccgcccaaggcatggctgtgcgtgcgcatattgccatctacaaggtgtgctgggcaaaaggatgttatgattctgacatcctcgcgggcatggatgaggcgattgcagatagagtaaatgtcatatctctttccctgggtggtcggagtgaacaactctacaatgaacccacgtccgttggtgcattcaatgccatccgcagaggcatatttgtctctgctgccgccgggaacgacggccctgacatgtctactgctaataaccttgcaccatggatggtcacggttggtgcgtcaagcataaaccgtcggttcccagcaaacattatcctcggaaatggcgaaacttatgtcggcacctccctctactcaggtcggaacatagctgcttctttgataccactagtatacagtggtgatgctggctctagattgtgtgaacctgggaagctctctcgcaacatagtcattggcaagatagttctttgcgagatcggctatgcccccgcacaagaagctgctgtccaacaagccggtggtgttggtgccatcgttccaagtagaaatgtctatggtcagttcttcctgagttcacccgacttgatcccggcatcaacagtgactttcgctgacgccaatgcaatctattcgtacacgcaatcggcggcgaacccggttgcaagaattgaatttcgcggcaccatgatcagccaatcaccatatgctccgagggtcgcggccttctcgagccgtggacctaaccgctttgtggctgagatactcaagccggacataatcgcccctggcgtcgacatcctcgccgcatggacaggagaaaactcgccaagctccctcagcatcgacacgaggcgtgtcgagttcaacatcatctctggcacgtccatggcgtgccctcacgtgagcggcatcgctgctatgctcaaggtggcacgaccagactggagccctacggcgatcaaatcggccatgatgaccacggcttatgaggtggacaacggcggcaacgccatcatgtcgtcagtgaatgggcgggcggctgggccatttgagctcggttctggtcacgttgaccccaacaacgctctcgaccctggccttgtgtacaacgccaccaccgacgactacatcgccttcctctgcggccttggctacacaccaaaccagatagcgattttcacaagggacagcacgacgacctactgctcacgtcggccgcccatcggggacctgaactacccggcattctccatggtgtttgcgaggtccggtggtcaggtaacgcaacgccgcaccgtgaccaacgtcggggcgaacaccaacgccgtgtacgacgtgaccatcaccgcgccgcctggcactaggctcacggtggcaccaatgaggctcacgttcaacgcgcagcgcaagacgcttgactatgcgatcaccttgtcggcagggtcaagcaactcgccatacaacgcgtggggagatatcgtctggagcgatggccagcacatggtgaggagccccgtcgtggccacctggaaataaatcaccacttgtgacattgtatcgtacgtttatagtaattgaaggccatcatctcagatggtgccatgatgtaaacgtaacatacgtagtactgtatggatgaacccgggaaaaacgcgttgtcatcgttgttcctgctaccgctagcacttgctgcttggctgctactgtataatcagcacgtatgcattaataaataaatctgaagtaaattgtcctcaaatttgtcg

SEQ ID NO: 20349 - DNA, 1547 bp, Oryza sativa
  ref <308>: DATABASE ACCESSION NUMBER: AK070670
  ref <309>: DATABASE ENTRY DATE: 2001-12-06
ctgatgaatagagaggtgaaaactggagagaaactcccaagcaactcccaaagtctcaatctgctcaacggacatgttccaatgattcacttgttcgttattaattgttacattttctttgtttatatatacgcacatgtaaggatgcaggaagacgatcgatcaaggttcacctcggaaaagaaaaaagaacagaaagaaagacgatctagagggagccaaagattgcaagatcgatcgcaaggtaacgtacacgtacaggtgagaggaatcgatgccggccgacgcgcgagctgctccgccgtcgtgcccgttcccgacgatacggtcgcatggcgccgccgtggcgaggtcgcacgcctacgactggctcgcgctgctcctcctcgtcgccgtcgacggcctcctcaacgccatcgagccgttccaccggttcgtcggcgccggcatgatgaccgatctcagataccccatgaagcgcaacaccgtccccatctgggccgtcccgatcgtcgctgtcattgggcccatgattgtcttcgccgtcgtctacttcaggaggaggaacgtgtacgatcttcaccatgctgtgctaggcattctgttttcggtgctgattaccggcgtgctcaccgacgcgatcaaggatgccgtcggccgcccgaggccgaacttcttctggcgctgcttccccgacggaatcgcggtgttcgataacgtcaccacgggagtcatctgccacggcgacgcgagcgtgatcaaggagggacacaagagcttcccgagcggccacacttcatggtctttcgccggtctggggttcctgtcgtggtaccttgccgggaagatcacggtgttcgaccggcgcgggcacgtcgccaagctgtgcgtcgtcctcgcgcctctgctcgttgcggcgatggtcgccatctcgagggtggacgactactggcaccattggcaagacgtctgcacgggaggcgtccttggattggtggttgcctctgtctgctatcttcagttcttcccggctccttcagatgagaaagggttctggcctcacgcgcactttaggtacatcaccgagaggggaagcgagaacccaacgcagcaagccaccgaaccactggacgccatggaaaccggtaggggaggccaatgaacaaggtgcaagcaagaccaatcttgtgtatataaggccataatgtacagctcctcctcaaggcacgggaggtaatcgtcgttagtttgtaaatactttggcgtgggccaatggtaccgactaacttgactactgacctgacgcaaataggtgttgtttgtacatactgtatgtattttcaacgaagtttgtacatatgtattggttttgcttacttatgtactcctatgtattttaaataattttagtgtctaaaattccgttcttctcccaagaatggcacggggtcagatcaagctctgtgttaaggcctgaactggcccatcctatttgggcttgaattcaagaaatcattgtgaaaagaaataagtctattttgtgtccc

SEQ ID NO: 20350 - DNA, 3220 bp, Oryza sativa
  ref <308>: DATABASE ACCESSION NUMBER: AK070671
  ref <309>: DATABASE ENTRY DATE: 2001-12-06
gactcctccccctcccaatcccaaatcgcaattactccccaagccgcgagagagcccgagagtaaactaatcgccatccgccaccgcgcagccgcggcagctagctcgcgagaagaaaacgccacgcgacccgagagcgagagagagagagagctaagccgccgtgcgccacgccaccaccaccaacccatcccaatctctctctctctctctcctcgtgctcctagctacaagaagaaccccctcacccccaccccggacacctacctagccgctacccctctctcttcctcttcttcttcttcttccctcttcttgtggtggtgggtttgacccaagaacggaggagggatagggcgggcggcgatgggggcagttcgggggattttggtcgtggcggtggttcttgcggtggcggcgattcttgctggggcggcggaggggaaggtgaacgggaaggcgaaggggaagtacagggcgctgttcaacttcggggactcgctggccgacgccggcaacctcctcgccaacggcgtcgacttccgcctcgctaccgcccagctcccctacggccagaccttccccggccaccccaccggccgctgctccgacggccgcctcgtcgtcgaccacctcggtgcgccccttggtttctccgctagattggatttcgatgtctgcctgctttgtgttgctgatggtttggttttttggtttggatcgcagccgacgagttcggcctgccgctgctgccgccgtccaagctcaagaactccagcttcgctcacggcgccaacttcgccatcaccggcgccaccgcgctcgacaccccctacttcgaggccaaggggctcggcgccgtcgtctggaactccggcgccctcctcacccaaatccagtggttccgcgatctcaagcccttcttctgcaactccaccaaggtggaatgcgatgaattctatgcgaattcgctcttcgtcgtcggcgagtttggtggcaacgactacaatgcgccgctgtttgcggggaagggccttgaggaggcctacaagttcatgccggatgtcatccaggctatctccgatggcatcgagcaattgattgctgagggcgcaagggagctgattgtacccggtgtgatgcccactggatgcttccctgtctacttgaacatgctcgatgagccggccgatgggtatggcccccagagcggctgcgtccgtcggtacaacacattctcatgggtgcacaatgcacatctcaagcgcatgcttgagaagctccggcccaagcaccccaatgtgaggatcatatatggcgattactacacgcctgttatccagttcatgcttcagcccgagaagtttggtaagttcttgagctctttgatagttagctagctcaggaagcatcagttcgttcttatcctttatttcacatcggtactaaattggcttttctagcaaaataactgttttttagctcttgctgctctaatttacttgaacagatcaagtcaactgatacctagagtcaacttttcctcctgtcacccttgaaagacacaatatattatttttagatagttcagatctgggtagaggtgccttatctctctagtagcacactgcaatatttcaaattacagtaatgatggatcacaatttgtgatttgaaaccaattagagtagctccatctatgttcagagtaaattggaagcaaagttactaatcccatcttcattagaatcttttacactagtctgtaaagtagtatggctatcagttctattagtactctaccactctttgttcaaaccttgtcctgttgttaattgtcttcttgagagagggggccatcctgaactataatgagattccacccatgataggtaatgtggggctaacaattaggattgtctgatggtctgattgttatacaagctacatacacaggctgcccaacttgtttctccaggcaaccatgtaaaaaagctttgaaccttagccatactgtcacctactttaaaattatggttgtggcagctctgctcttgtttgatatgatctagttcagtttcaaaactgccacattttgattgtctccatacatattttgccaccgattcttttaaaacctcgcacatgggttcgagtgggtgtatattatcctcgtgagtttaattcgaatagcagtgtcttgaaaacaccacaaataaataaaatgacacattggcacgttttccctacctaacctttttacctttttccaaccatcgtgtgtatcacaaatttcaacatgtccttgttgcggggagtacagacatgtaggaattgctctgttagctgagccatcctttttggtgatccacttctgttatctaatgcttgcttaccttgctggcaatgaccttttttatgctttgtagttagtgctttttaattagagggagcatcagcaggtagagttatgaaatcttctgcatagtttaatggccaagttgggcatcacggttcaatggccttgtcatctctagatcacatccgctagcatttctctttcattgtgtgtggtagcaacaaacacatctttggcccatttaattctgctaatagagactgtttctgtctcaactggtgaagaaaaaggattcagatgcattattgttgattaaaaattgaaaacatctaacgttcttgccttttcaattcaggattttacaagcagctacctagggcatgctgcggggctcctgggtccgttgcgaaggccgcttacaacttcaatgtcacagccaaatgtggtgaggctggtgcaaccgcgtgtgatgatccatcaacccattggagctgggatggcattcacctgacagaggcggcttacggtcacattgccagaggttgggtatatggtcctttcgctgaccaaccgatcttccaatcttcatgagaaagtcacttcttccgttgtaattgtagaggtgtatcacgatagtgcactgaaatggagcagggaaagtagttcttccatatggttccaaggttgcatacatgtatattttcattctattacattcattgcagtcaggtacaaaggtggaatagggctgtcaaaagcttgattttgtttatttgtcaggcgacataactatgaaaatgtaacagacacatgattgtgtaaattgcctccggaaatatgatacaaattgtctttttgagt

SEQ ID NO: 20351 - DNA, 1527 bp, Oryza sativa
  ref <308>: DATABASE ACCESSION NUMBER: AK070672
  ref <309>: DATABASE ENTRY DATE: 2001-12-06
gaatctctccgcttccgccgcggtgttcttcctcctctcgcaggagaaaatttcgctggttgaatcggagggaggcagcaatggccgctcgagctcggtggcgaatcctcgcgctgccgctcgctcttctcctagcggtcgggtcgtcgcctggcctcgtgaggcaggcgtcgtcgtcggcggcggccaagcctcccgtccccaaggccatctcggacctgagggaggcgatcgtgaaggggctggggttccagtcggaggagctcaaggtgtccgggttcgacgtgcgcgacgcgctcgtggggcaggcggtggcgtacgagttcgacatcgaggtcgggaggaaggtggtgccggtgcgcctgctcgaggacgtcaaccgatgggacttcgtcgacctgcccatcttccggtcccaggccgacgccgacgacacggcgctcgccgagatccggcgtggcaagagcgggaagcgagccttcgacccgaccctgccaccgttccagctcgccgggcccatggagctctggatccaggacggcgacgacgttaggctcgccttgccgcatgatgtggaagcagggacgctgaagaaagtagtgctatcagatggtgccgtggtaacagtgaagggtgccaaggctgtgagcctccggttgccacttgaattaccgctccctctcaaccgcaccacttacaagggccggttgtcaagcttgatatccattgcgcaaacgctacggggcgccgcccggtcgaaccagaagccgctgctctccctccgcatcgaaggtccgacgtcgttgtcctcgactccttccatgtctcccaatgacaggctcaagctcaaacggttggccccaggccaagtggagctctcctcgcgtgcaatccctgctgttacagacgatgatggtgatggatcacacgcagctggattgtggccccttctgtcactgaatgggtcagatggcagcctgcaggggtttgaggagttgctggcctcggttcttggaaagaaggcaggtgagaaggggacgttcaagctgttgaaggcgcgagcttctgcccaaacgtacgtcaagatggggtttgcggtggagaagaggattgctgacggagaggtgaactggtccaacttcccggagtggaagacgaagcccaagaagttgagggcgcactacgaggttcttgctcgtgtggagggtggccaggcgatccctgaaaggatcgcgcaggtgcagccttttgaggccgacgaggccatgtccgagagcgtgctcaccgggaatgtgtcgatgtcgaagacggaggtggttcatccgccgccggtttacttcactctttgagagcagttgaagctccggttttaagtgagctgatcacggtaaatgacaagcggcgaaagtttcttggcggcgagtattattaactgcattagcatgaaaaattgttgtacggggtatgttatactggccagctttgtaaattaccaaactgaataatgaatgaacgaaccattacagg

SEQ ID NO: 20352 - DNA, 1784 bp, Oryza sativa
  ref <308>: DATABASE ACCESSION NUMBER: AK070673
  ref <309>: DATABASE ENTRY DATE: 2001-12-06
gacacttcctcccgatccccatccagaaacaaatcgagaggcaagggaaaggccgccggcgctcggtggaggagtccttcgcggcccctgtgctagcgcccaggaatcggtggtctctgcgatggcagcgcccgagggatcgctggtggtttagctacaacgtcgtcggggcaagcagttgattcattgcaggcagcaggaggagtctccactttgattcaagaggattagaatatggacaagagttggatgagattgcccgataggttctctagggagtatattgctggggtaaacgcatttattgaatttgcttgtgaacacaatggagagaacagttttatatttttcccatgcgaaaggtgtttgaatataagtcagatgggtgccaatgatgctcgaacacatttggtgttgtatggtatacaattatcatatacaaaatgggtattccatggagaagtggccaacaattatgatcaggacgatgaacttttagaggatgaagataatggggatgagtttgatggatttgatactattcaagatctattaggtgatatccatagggccacaattggggttgcagagcaggagaaccaaagtggtaataatggagataatgtcctctaatctaatcaagaggcagtccgttttgataacttgctaagaaatgcacaaagagagttgtacccaggatgcagaggtcattcactgttatccttcttgttgaagttagtccacttaaaagatttaaaccattggactaacaaatcatttgagatgctactcaaattattgaaagaagctttgccaacaggtgacacacttccagcctcatattatgaagcaaaaaagatgttaagagatctagggctgggctatgaaagcatacatgcatgcatcaatgattgtgtattgttctggaaggaacttgaagactatgataagtgccctgtttgtaatgaatcaagatggaaaattcacaagggaaagaaacgtgtacctcacaaagttttgcgatattttcctttgatccctaggttacagagactatttatgaacaaggacatagcctcagacttaagatatcatcgtgataagcgtgtaattgaggaaaatgtcttgagacatccagctgatggcgaagcttggaaggatttggatggaaaataccaatggcttgcgcacgatcctcgccatttgcgctttggacttgctacagatgggttcaacccatttggaactttgagtagctcttatagtgtgtggcctattatattagttgtatacaacctgccaccatggaagtgcatgaaggaacccttcatattaatgcccttgctgattccagggaagaaagcacctggaagggatattgatgtgtacatgaggcccttgattgaagaattgaatctactctttaacactggagtcagtacatatgatgcctttgtaggagatactttcaatctacgagcagtagtgctaggcactattagtgaccttcgtgcattagattcactatctgggtatgtggcaatgggctataaggcttgcccgatatgtttagattggactgattcgtgttcgctaagaagcaagattggttttttgggtcatagaagatacttgcctattcagtatagatggcgaagaagtaagaactttaatggcaagaatgaaacatcattgaggccaagacagctatcaggagatgaaaattttgcaatgctacaaaaattagatcatctacaaggcttcaagtatggaaagcatgatgg

SEQ ID NO: 20353 - DNA, 1208 bp, Oryza sativa
  ref <308>: DATABASE ACCESSION NUMBER: AK070674
  ref <309>: DATABASE ENTRY DATE: 2001-12-06
gctcctccctcggtgatctgcctcgctggggcatctctaaaagcatccgactccgacgccaccaccaccagttcaccaccgctgaaagaatcagcagcagcagcagaggccacacgaggagatgaagaagtgcccgtcggagctgaacttcgaggcgttcttccacggcgagaggggggaggacgacgccgacgccgccgccgaccagaagcccggcggcggcccgcacccgccgccgttcgccatgttctccgccgccgacctctccagcttcggcttcgcggactcggtgacgagcaccatcactggggtcattcccaatcacatatggccccagtcccagagcctcaacgcacggcatcctgcagtctacacaattgagtcgcaatcatcaatctgtgcagcagcaagtcccacgtcagctaccactctgaacatgaaggagagccaaactctgggaggcacaagtggttcagattctgacagtgagtcgctgttggatatagagggcggtccatgcgaacaaagcacaaacccactggacgttaagagaatgagaaggatggtttccaaccgggagtctgctcgtcgatcaaggaagagaaagcaagctcacttagctgatctcgagacgcaggttgaccagctccggggcgaaaacgcatcgcttttcaagcagttgacagatgccaatcagcaattcacgacggcggtcacggacaacagaatcctcaaatcagacgtggaggccctccgggtcaaggtgaagatggcggaggacatggtggcgcggggggcgctgtcgtgcggcctcggccacctgggcgggctgtcgccggcgctgaacccccggcagggggcgtgccgcgtccccgacgtgctcaccgggctggactacgccggcgacgaccccttcaccgggctgtccccgccggagcaggtgcagatgcccggcggtggcgaggtgggtgacgcctggggctgggacaaccactccaatggcgccatgtccaagtgaaaactacttcttactgctttgtcagctcagctacgtataaaaatgtgatgtcccaagtgaacggacttgagtttttcagagtcctcgtgtcgtgtcaagtgtcgtcctgtaatagaactgactagctatatatagtacacagtatttggtaagagactgaaaaactacgaagtataaatgttgtggaggt

SEQ ID NO: 20354 - DNA, 830 bp, Oryza sativa
  ref <308>: DATABASE ACCESSION NUMBER: AK070675
  ref <309>: DATABASE ENTRY DATE: 2001-12-06
ccccccctcgccctcgccccaatggccgtgcattcctcggccgcctccgacctcttgccgggatccccgggtggatggtagcaggggtggaggtaggaggaagggcgcgcgctcctggctgtctggctgcggtgcgggcaggggcatcggtagctgcggtgctgctcccttggggggtgggtttgggtggtttttggatcgtgggggagaggagccgagattctttgtgatgcactgggctcgtgttcatacttcaaactgacaaacaaaaaaggttctttaaccggcttcagcgattaatggccttcactggggaggaaaaaatgaagggttgtcgcccaaaacttttcggagcaaaggagaataaagtctcaaacagaacagacaaaccaagttgcaacaccgggaagtttggtccaagttcttctaatgctgcgtcatcttcccccctaagggcattttcagttaagggcatgcgtctcagtcatttcctggcgcaaactcctaataatacaacaactgagcccgtcagaatatttgttgccacctggaacgttggaggaaaagcacctacagctgagctgaacctggatgattttcttccccctgatgatcattcagatatttatgttttggggtgggtcttttattgcccttttcttaatatactagacgtggaaaatattttttttgtcaattttactaaattttctgttcatgttatccgactttctccatgtatgttaatttcttgaatgttggctttgacatataagactatactagtatttgatacatagctgaacgaggtaaagaaaggaagttccatg

SEQ ID NO: 20355 - DNA, 2091 bp, Oryza sativa
  ref <308>: DATABASE ACCESSION NUMBER: AK070676
  ref <309>: DATABASE ENTRY DATE: 2001-12-06
gaatccctgatcgatgctgcaatcgcaccatcatcgctcctctggccatgatccgtgcatgcagcacagctgcatttcgtcggtttctcgagctttccgttgatcttgatgcgttcttgatctcaatcgccgccgccgccgccgccgccgtcgcgggaggaggaggaggagattaagcatgaggcagacgcggcacggcggagctctacaccgatggtttcactgaagctgcgagccatcctcttcccgttccagatggagcctcgccgcgagatgctcctgcaggagcttggggagatgtgggaccagatcggggaagcggaggaggatcggcgagagatgctgcacgcgctggaggaggattgcctcaacgtgtacagggtgaaggtggcgcaggtgaagcagtacagggcacagctgcaacgggagatagccgactccgtcgccgaggtcgccgccatctgcgccaccatcggcgagccatccaccaccgtgcacattgcgtgctcctcgctgcagagcacagggaacctcaaggaggagctcggctcgatcacgccggagctggaggagatgaggaggaggagggaggagaggcggcggaaattctcggaggtgacggagctcatcaacaggatcgagcaggagatgaagccgagcaagcagcttcatctcaccatggacaactccgacctcaccatcagacggcttgaggagctcagagcatacctgcaagatctgcagctggagaaggatagtcgcgtcaggaagatgacagagctgatgggttctctgcattcctcctccttggttcttggcatggatttcagagagaccaaccttcatcatgatgatgaaggagacatcagcgacgatgcaattgcaagattagtttccgagatcgggagattgagagagatcaaacggaacaggatgcagaagctgcaagacctcttggccaccatgctggatctgtggaacctgatggacacgccatcggaggagcagaagaggttccagagcgtggcgtgcaacatcgccgcgtccgaggacgagatcaccgaacgggatgctctctccatggaattcatcaacaatgtggaagcagaggtggtaaggctggagaggctcaaggagtgcaggatgaaagaccttgtactgaagaagtatgatgagctcaatgagatacgacggcgagcgcatgtacccgtcgagaacgaagacgatgcgatgatgatgttcgacgccatcgacagtgatgccaaacggtctctaatcctggagcggctggaagtgcagatctctgaggccaaagatgaggagttcagcaggaaggatgttcttgagaagatggagaaatggcaggctgcactagaagaggaatcttggcttgaggagtacaacagaaatgagaacagatacaatgtgggcaaagggactcatcttgtgctgaagcgtgccgagaaagcgcgtgccttggtcagcaaaatgccagcaatggcagaggccttgatcacaaaggtaattgcttgggagaaggagaggggtgccaaatttgagtacgatggtgatggtctcctggacatgctggaggagtacaacaatacaaggaaggagaaagagcaggagagaaagagacaaagggatcagagaaggatgctgggtcagggcacaggggagtcgccggtggtgaggcctccgcccaagaacatcaagaatgtaacgaggacgttgtctatgggtggcactagtacgggcggcaagaaggcgtcggcatcggtgtcgtcgaggccaagcacgccgagcttcctcaagtcacctatgtcagcacgaaggagtgacgagggacaaatgttattgtcacgcgcagttgaggaagatgatttgttatagccaattgatagaatattatttacaatagaaagtattagtattaaagtttttttgtagatttttttatagttgtttttaagccttctttattatagagactttaatgcaaaagttatatcttgtgaaatgtaaaaatgctatgttccgagtgagcacttgttgttaaagttttttatataaatatgttttgttttaggg

SEQ ID NO: 20356 - DNA, 1295 bp, Oryza sativa
  ref <308>: DATABASE ACCESSION NUMBER: AK070677
  ref <309>: DATABASE ENTRY DATE: 2001-12-06
gatcgatctgcatgcgaagtcctgcagcctccgtagcagacacgtacaacgtaccgagcaaccttagctagtggcgcctgaaaattattaagcgcttcaagatggcaaagcatggcgttgcttccgttttaacactggcattggtccttggagttgcggccattcctacagtggtgcaatctatcggttgtgctacggcgtgatcgggaacaacctgccgtcgccgagcgacgtcgtgcagctctacaagtccaacggcatcgactccatgcgcatctacttcccaagaagcgacatcctccaggccctcagcggctcaagcatcgccctcaccatggacgtcggcaacgatcagctcggctccctcgcctccgacccctccgccgccgccgccttcgtccagaacaacatccaggcgttcccgggcgtcaacttccgctacatcacggtcggcaacgaggtttccggcggcgacacgcagaacatcctcccggccatgcagaacatgaacagcgccctctccgccgccggcctcggcaacatcaaggtgtcgacgtcggtgtcccagggcgtgaccgccggcttcccgccgtccgccggcacgttctccgcctcgcacatggggcccatagctcagtacctggcgagcaccggcgcgccgctgctcgccaacgtctacccctacttcgcctacgtgggcaaccaggcccagatcgacatcaactacgcgctcttcacgtcgccgggcacggtggtgcaggacggcggcaacgcgtaccagaacctgttcgacgccatcgtcgacacgttctactccgcgctggagagcgccggcgccgggagcgtcccgatcgtggtgtcggagagcgggtggccgtcggccggcggcacggcggcgagcgccggcaacgcgcagacgtacaaccagaacctgatcaaccacgtcgggcaggggacgcccaagaggcccgggagcatcgagacctacattttcgccatgttcaacgagaaccagaagggaggcgacgagacggagaggcacttcggcctcttcaacccggaccagtcgccggcatactccatcaatttctaagaagattgttctgagaagagatcgatcgatgatgaattaaacgtcgatcgatatagatatatacatacacgcgttccatatatagtttgggtttgaataagctttctgcctgcatattgcaaagctcaatgcatgcatgtaacggtgcagagacaaataatatgaacttgaataaagtttaccagacctattttcgcgtagc

SEQ ID NO: 20357 - DNA, 1119 bp, Oryza sativa
  ref <308>: DATABASE ACCESSION NUMBER: AK070678
  ref <309>: DATABASE ENTRY DATE: 2001-12-06
ggcgtctcgccgagggaggggaagagggaacggagtctatcgtgcggtgcggttctccgctcgccacgacgacgacgagccccatgcctcctccgccccatcgcggcggcggcggcggccgcgacacgagcgcgttcttcgcggcgacgctggtgctgtgggcggtgtcggtggggttcgagatcggcgcgcgcgggcggcgggagctggcgcccgtggccgcagggtttgccttcttccaggccgccagcgccgccgtgcgcgccgccgtctcccgcgacccgctcttcgtcaacaccgccgtttcgctcctgcactcctcgctcacgtcggcctccgttatctttgttcttgtcaaccgatggcataataaggacctcaagaacatgtttgagcatgaagaattgtttggtggcagttgggttggagcatattctgctctgtgcttttcttgtggctattttgcttatgatcaattagatatgcttcgttaccgactgtacagtggacggattcctggaattctcatgcaccacctgattctgctcatttgctttacactagctctgtatcggaatgtgacgatcaactacctaattctaactcttgtatgcgagctgcactccgtatttttgcacataaggaaattgaggcgaatggctggatttcgggattacaacagaaaaattgtgaaactggaatgggtcctcaactggactacatttgtatcagcaagggtggcatgccacatactgattacatacaaactgatcattgatgcccacaagtttgatagtggaattgagcttccactagctctttttggcatggcaggaatgaatctgctcaacatatttttaggacttgatctattaaaagcttacacgctcgagagaaatcagcagacacatcaggactgagtgtgcctctactgatgtggtactccaaaagttttggcaagttgtagtcaaacaacaattaatatagatcagcagacagaggtatgtcaatgtgttattggcctctacgttcggtagaaactagtaatgatgtactatattatgtgttctgaactcattataagatctctaccagcaaatgattctttgctattgtgcc

SEQ ID NO: 20358 - DNA, 1312 bp, Oryza sativa
  ref <308>: DATABASE ACCESSION NUMBER: AK070679
  ref <309>: DATABASE ENTRY DATE: 2001-12-06
gatctcctttgccgccgctgccgccgcctcgccatcccgagcgagcatgcggccgccctcctccacctcctcccctcgccgccttcccgtttgctagggctccggccgccttgccgttccttcccctcctcgtcatcactagggtttcgacctcgcgccgcgggggagtttgtagcccgactgacccgaagctgttgccgccgcccgccctcccggccgcgccatggtgaggctcaccgccgacctgatatggaagagcccgcacttcttcaacgccgtcaaggaccgcgagctcgacatccgaggtaacaagatccccatcatcgagaatctgggcgccaccgaggaccaatttgacacaattgacttgtcagacaatgagattgtcaagcttgagaacttcccgtacttgaatcgtcttggcactctgttagttaacaataacagaatcacacgtatcaatcccaatcttggtgagttcttgccaaagttacatacattggtgcttacaaacaatcgtcttacaaatcttgcggagatcgatcccctggcatctcttccaaagcttcagtttcttagcttacttgataatactgtaaccaagcagccagactaccggttgtatgtgatccataaattgaagcatttgcggttgctggatttcaagaaagtgaaacaacaggagagaattgcagcagcacagaagtttcactcaaaggaggcagaggaagaggcaaagaaggtgccagccaaaacttttactcctggacaggtggtggatgctcaagataccacaatggaggagcagggtccaaaagtagttgctccaacacctgagcaaatcacagctatcaaggctgccattgtgaattctcagacacttgaggaggttgcaaggcttgaaaaggcactgagcactggccaaattcctgctgaatttgcaatccccaagccagatgctaatatggctgatgcttcagaggaaactgaaaagatggagacagatggtcagaaccaagaaaatggggcggatgagaagaagcaaaatgaagaaagcaccccaattgaagaggattgaaggcatatgcacacactgatataatctggcaccaagttggtgttagatttccgttttatttgtgggggcaaagccacattgcgatgcctgatctcgttgaatgctctcgctggtctctagcatagtaccggtatttctgtatcttgtgaatgctaacatttttcagaagatggaaaaactatttgctgtgtttaggaaacaagcttggggtattttataccttccagtaccgct

SEQ ID NO: 20359 - DNA, 2256 bp, Oryza sativa
  ref <308>: DATABASE ACCESSION NUMBER: AK070680
  ref <309>: DATABASE ENTRY DATE: 2001-12-06
gatgagagcagagagccaaattaagatggctgcagcgaggagactgcccgtcctggagctggtctccttcgtcgccgtcctccttatctcctcaccaacagcagcagcagccgagttgtctgtggacttccacgcggcgtcgtgcccgccgctggaggccatcgtgcgctcctcagtgcaagccgcgctgcagcaagagatcgccctcgccgccggcctcctccgcatcttcttccacgactgcctcccgcaggggtgcgatgcatcggtgtatctgaggggaggcagcaactcagagcagggcatgggcccaaacctgacgctgcagccgcgggcgctgcagctcgtcgacgacatccgcgccaaggtgcatgcagcatgcggccccaccgtctcctgcgccgacatctccgcgctcgccacccgtgacgccgtcgtcgtctccgggggaccctcgtacgcagtgtctctcggccaaaaagacagcctcgccccggccccggtgcgcctcgtcaaccaactcccgggcccgggcacctccagcgtccaggctctcctcgacaaattcggaagcaagggcctcagagaggccgccgacctggtggcgctttccggcgcccacaccgtcgggagggcgcactgcgacttcttccgtgaccgcgccgcccgccaggacgacaccttctccaagaagctggccgtgaactgcaccaaggaccccaaccggctgcagaatctggacgtcgtcacgcccgacgccttcgacaacgcctactacgtcgcgctcaccaggaagcagggggtgttcacctccgatatggcgctcatcaaggaccggatcacggcgccaatcgtcaggcagctcgccgcggacaaggccgcattcttcaggcagttcgccaagtccatggtcaagctcagccaggttccgaggactgacaggaacgtcggcgagatccgccgcagctgcttcaggaccaacggaccacgcctcgtcgacttggccaccggcgatgaggccgcttctccttgatatgggtggatcgatcgagatcgttggctccggctgtacgacgacatgtccacggagcggccctccatccgttgttgattaattagggaggtggttgacgtatatacgctagctgatcctggtctcgttggcctgcacgagtgcaggccttggcccttggcttttgttcgcttaattcgttgtgtccctaccataagggagatagcagtgcgaccaccgcatttgctgcgcttccgttgccacctggaccaagctcctcaagggatatatgcttcacagtagtgcaagttatttattgtggatctcacttgtagatccactcccacttttcatctccccctatatcctctctgcctttcccaccgccggaggaagacgaggcgccgggtgaaggaaaccgaggtgacggcgcttggcggaggaagctaaggtatcgagcggagacggagtcaggcggagcggcagcagcagctcaagaagtagtggcgccgggtggagggagccgagccgtcgggcccatgcggcgacgacactaggcggagcggcggctagatccaccggtgtaccacccttcctctcctccccaaaagcatcggcgaggtcggcggcacgggtgtggatctggaggtgacgagggcgtcccaagcgacgaaggcaacagctcgacgtcggcgccacctcaccttctctcctcttgacgcgacgccggcacaactatatcaggggatgaagaggacaagaacaacggcaacgtttatcccctctccccacctttttcacccctccttcgtctgtggccacggcgttgtgtcgccggtgcggtctgaagcgctcctcacctcatcgccctcctccactgtccaatatgctcggcagcgtggagcgcggggatggcgacaaagtgcctctcctcggtcctctctctcccttccttatggtgcggggcatgaaatgtgggatccaaagatgcagattttgacgaggtacctgtggtaacatttggctccgcgttcttcagagcaacaaaatagttcgacgtgtggtggaatctccaacctatttggctcgggctgaatgccacgtcaatgcactataaaagccaataataagattgtttttctttgctagcggtactacctcataatttcaatctcgtactacctccgttttctaatatatagcgatgttaactttttacataatgtttaatcattgttttagtt

SEQ ID NO: 20360 - DNA, 3424 bp, Oryza sativa
  ref <308>: DATABASE ACCESSION NUMBER: AK070681
  ref <309>: DATABASE ENTRY DATE: 2001-12-06
gatgggcgttgggcctctatgtgggctgcctgattgggccctctcggctgggagagtggctgactgctattgtcccatgggcggatcgatcaagattcaagaactgaactcttgattctccacctcaaaatctgggccgtcgatttgtggggtttctggtgttgagatggtgtgtgatagcaccgatggccagagaagcggtcaacagcttgatggaggtgcttccgaacgtgatgcccaccacctgttcggtgaaatgccgagccaattgggacatgactcaagtgctgttcttcacgtcgcttggcagtgcaggtgcttgccgtgagcttggggcattgaggctctcatctgattctagactctagtcaagctacgacaccgggaaggttcggtctgccactaatggacgcaacgtctatgatgggtgctgcctgctttgatgtccagcgtgcgcagctcttccctcggaacggggctgacgtgacacccaccaagagttcggcgtcgggaacaagtggcaccatcaccaaaccagtagctgagagcaccgcagttgcagtagaacacgtgttcccagccaccccggcctcatctgcacccttaatttcatcgacggccatgatgacaccgatttccctcaccatgaccaaggaggctgatgctgacatgggcaaggtaattttaaaaaaaaacaactccattgtagaatttacattgattaatagagttattgaaaaaaaatattccatctcaacaaaataacgcagttactaatcttctaggtatggtagatctcagaaaaaatggagattaagagctatatctctgaatgttcagatttggttttacctccggttatagtactaaatcaatgaagattgttaactcgttagttcagctggcctctaattatctgaaattgttcaggcattgacctttgcatatctctatctggttccccttctttgatttactagttccctgtgggaaacagcagacaaaacacacaaaaaagtgtcatgcttagaacatgtggggactcaatgtctaaaaaaaaaaaatcagttttgtgtgttttacctcaatagtgcattactgaaaactttttgacgaagaaggtagagccagctctaccttatagtcatttcattaatagaaacgagattcaaagttacaagattttaggttaagtgagatagagaaaaggaaagaaacaagaagattacagagatacagggtgagaggaaaaataaagaaataaaataaaaaaaagggggtgggggtggatttacaggggtataaacagcaggctgttgcctatgacgcacaccaagattgaatttcgtggctagttcctgtgttgcttcgcagacaccatagctttagggtatcacagatatgttgtgtgatgttctgaatatggtccatgtgtctttcgaagaccatgttgtttcgcgatttccacagcgtgtaagcacatgctgcaaaccagattggttctaacctttttgttgattgggtcctgtcaatgactgcttggatgaagtcagagattgtttcagatctgttggccgaatgcataagtcctagtcttttccaaaggttgtttgcatttctgcatcttaggataatgcggtccgctgattccagggccaggcagattgggcagtggggatcattactccattttttgttgaccatattggctttggtatttaatctgtctctaaaagctagccacaggaataccttgcagttctgaggaattgtgtagatccatatgtaatcagccggattccaaagggatccatgaaaaagtcagcagtctataagcatttgccgttgagatcaaaggcttgggatacaggagttctcttgtgtctgctgtctctggagaggggcttatagtttgtaggttttgtaatagtgcttgtaactctgtttctgcctggtaggagaggttgggatggagttgtagctgccaagtattgtgactaaattgtgattcaactgcgcactctttgtttatggcaaaagagaacagaactgggtaggtatattccagatgttgtggcatccattggtctttccaaaatagagttgttctgccattcccaagctttacctgtgctactgagcttaggatctggaagtgagacagaattagcttccaggttggcgtgtcattgtttctgggcttcagttgaattgtgctctgtaaatatttctggcgaaaccatttggccattggatcgttggagtctgtaagtaccctatttgctaattttaaaatcagtgctgtgttatgtgccctcaagtctctgatccccaaacctccctgctgtttttgtagcagtacagtcttccaagccacaagacagtgacctccctttatggatttttctccttgccaaagaaaggcacgtttgatcttgtcaattgcttcaattgatttttctggccaaatacaacaggacatgtagtaggttgggattgccgagatgattgaatttatcatggtgagtcttcctcctttagatagaggcatccatccagccagatacttgtcgacctttgagatgactggtagcagcatattgtgtgtactttttgtggttgataggggtaatccaagatagctgcatggcagtgagcttgttgggcattgtagaatctgtgtcaccatttccttggattcttcagctaggtgtattggcaccaaggtgcttttgtggtagttgatttgcaggcctgagaaccttgtaaaagaatccaaaatctccttcagtgctgttgcttgatctgtttccccttttaacagaattagggtgccgtctgcgtattgtaacgttggtggtgccccgtcgatatctagagggtgttttaagacccctgtgttgtaggcttgctgaatcatcttttgaagcacatcggcaaccagaatgaaaagatagggtgatagagggtctccttgtcgaactcatcttttgtattatatatgttctcctttttgtccattgatgataatctgagccttgcctgaacataagagtgtcttggtccaaccaatccatttctccgggaaacctctcgtttcaagaactctaaacaaagcatcccagctgacagtgtcaaaagccttgtaaaagtccaatttgagaactaacattggttttttgttctttagggctgattgtactagctctgaggcgaagattagattttccgtgattgatctgcctttaatgaagcctgactgcatagggtcaatcagctttggtatttccttctgcaacctgattgtgatagttttgctgataagttttggtacactgtgcaatagtgaaataggtctgaagtctttaatctgaactgctgttgctatcttcggtaagagggtaatatatgaatgattaacacc

SEQ ID NO: 20361 - DNA, 1913 bp, Oryza sativa
  ref <308>: DATABASE ACCESSION NUMBER: AK070682
  ref <309>: DATABASE ENTRY DATE: 2001-12-06
gattacccaacctcaagctagctagctctccaccgtctgcgcccattcagaaaaggagagtttaatccaacatcagaaaagatgggcttcttgtcattgcttcttgtggcttctatgccaatcgttcaggtcctactcataggtgttattggagcttttctcgcttctggttacagcaaaattctaacctcaagcgctctaagggatatgaacaaggttgttttcactgtcttcacaccatccctgatgtttgctagcctggctaagacggtcacactttctgacgtcatttcttggtggtttatgccagttaatataggaatcacattcattgttggtggcactctaggctggatagcatgtaaaatactgaaaccaccacagcatttccgaggaatgatcattgccttctgttcagcaggaaatcttggcaacttgctcttgatcattgttccagcagtctgtgacgaagacggcaacccgttcggaaaagaccggagcctttgccgctctcgtgggctctcctactcatcattatccatggctcttggtggcttattcatatggacacatacatacagcctcatgcagaaggcaggcaaaatgtaccacaagatgcagtccaaaagcatccagtgcccggccgacagcgatgaagagcatcatcctgcacaaggtcatgatcaagtaaaattagacggtgaaactgcttacgctgatgaggaggcggctcttctggtgtcagctaaactggctcctgaacacaatgaagagaaccaaatggaagctccacttctgacttgcgagagagagattgctaacaaaggaggattctggacaaacctgaaggaaaccgtccaccaggttgtcgaggagctgatggcaccaccaactgtatctgcaatacttggatttgttgttggcctagtcccatggttgaaatctcttgtcatcggcaatggcgccccactgagagtcatccaggagtccctccaactaatgggcaatggcacgattccttgcatcaccctaatcctaggggggaatctgacacaagggctacggaagtcggtgctgaagcgtacggtgatcatcacgatcgtctgcatacgctacgtgatccaacccttgatcgggatggcggttgtccatgctgcctatggggttggattcttgccacacgatccattgtaccgctacgtgctgatgatgcagttcgcgctgccacctgcaatgaacatcggaaccatggctcagctgtttgatgttggtcaagaggaatgctcagtgatcttcttgtggacttacctgattgctgccattgcactcacgacgtggtcgacgatattcatgtccatcctgtcttgaggttgagggtgacaagaagaaccaactttgtggcaatattggtttagctggaatgattcagctcacggataaaatgtaaagaagccggagacaatgagcctctccgaaagagccgaaactgaggcttgcccatgagcaccacacgtccacacgtgtatagaaattgaagcagtatttttttagataatgaaaaatagcatggtggcccgcgtagataactataatttttttaacatattaaaaaatatttttatttttttcagttatttcaaaattgtattttttatatggactctatactctactcccaatcatcctcactttattaaatttctaattttgtagttcgaaattttgttatttctaaattatactcttcttatatggacttaatagtctatcgtcttctctaaatattctttttttatttgaaattttacttatttctaaactgtactcctatatggacttagactggtgtaacgcacatcagtcgtggcgttggtaggaaatacttaacaattcaataaaaaccctaattttcg

SEQ ID NO: 20362 - DNA, 2737 bp, Oryza sativa
  ref <308>: DATABASE ACCESSION NUMBER: AK070683
  ref <309>: DATABASE ENTRY DATE: 2001-12-06
ggtcctcgtttcctctcctttctcatcgtagccttctccctctcggccatcggcgcctccccctcaacctcaccctccacccctcccttctcatcgtagccttctccctctcggccatcggcgcctccccctcaacctcaccggcgcctccccctcaacctcaccctccactcgtgccacctccctgcctcaaccacgacgtccgacgtgctgcccccaactccaccttggcctccgccctgggccacctccctgagtcgactgcatcctccatcagcgtcgccgccaactcaacctcagccttcttacggcggccatggaggcaatggccaaggcggcagtggccgcgatggcgttggcgaaggtggccatggcggtgacagccccgcgacagctgcgacggccaaggcgtgcaggcggccacgatactggtgagcagtggtaggcgtgtgggcggcggatccggcggtggggaggctcgagggcgacggtggggctggtgggcagtggattcggtgttgggaggcgcgcaggctgtggcgaggatggtgggcggcgggggaggtgggcgggcggtggcgaggctggtgggcggcggatctggtggtgagggaggctcaagggcgtgtatccggcgtcttagttctagccgacttccaagcatacttcatcccgcctcccgaagttaccgccgtcgcctacttcctcgacatcgccgctcgtgggagccgccgctgcgaggaattgcctcatggtttgtcgccttcgtcgatttcctggctccctcaacacccggacacccaagcgccttgccggtgagggccgccgccaagcttccgccgcttgccgaggccgtgcactgccacttggagcttgacaccgcaagtcaaagccatcccccgaaatcaggccgaactgcttatcccgaaaattggggttttggggggcggcgcggcgacggaccagcgcgacgatggaccagcgattcagcggcgactggatggctggcggcggtacagagatagcagctcgttccttcctccagtgatgactcctccccttcctccagcgatggctcctctctcaacagcatgtgttcctgaagcagaagtaatcgatttggagtcggctgaatgcaggagcggggcaaccatggcaaaatcgacgggccatagcagtggatttcatccaaagcagcagggtcacaggaaaatcagtttgtcaccacagtccaaggctttgaaggtttctggcacaagaggcagcctaaataagactgttgcacgggtggtatccaggtgtcagcccaaatgcgtagtgaatatcattaaagaattcgatgataggaaggaggagttgattggtgaaattggatttgatggacttttggatatcaagcttactaaggtaaacaggcagtttggggcatggctactaagcaaagttgatccgaaatcatgcgctactgttaaagatgtcaaccaggagttgccattcggttccaatgatgtgaatgcagtttttggcttgccatgctcaggtcaacctattatcccttgctctcaagatgaattggatgggaagaaacaaatattgtgtgaaatatttaagataccaaacttttcacacctgaaaatatcactcttaaagagaatcctaaagaagcagtatggttatcccatgacaatagatgaaaagagggttttcatggcggcttttgtgctttatgtcacaacgaagcttttggcaccgcaatcctgtgcaaacttcatatctcctaggtctattatggctgtttctgatgttgacaatataaaacagtacaactggtcccaattcgttgtagatgaggtgaagaaagcagcagaatcaatgcccacctgctttccgaataaggctcaactatccattaacgggtgtatcatctttctaatggtaaaatacttgagaaatctcctgttccggaaggttgggatcacatgtgttaaaacatgtcacatttctcagtttgaggatgatcaaattgctaggatgattcaacaagatgtagttagtaaacataacccaggattccccttccctcgttatgggaaactccagttggtgaaggatccaagagaaaacaacccccatgtgccagagctatctcccctaaacttatgctcctgttcgaagatcccatctagagccattgatggcggtaaaaatttaataaaattcctggtttcacacttctcttcgttagacgtacatagaagtgtcgggtcacaggcatacgaggagttgaaatcttccgttcaggatggattcgatcggatcgataagattttgcctaccatatcagatttcgtcgacataagcaccatgcaaactgctattcacgcatctaacctattcaagagagctttcaagactaatattacagtggcagttaagatagtgataagggcagcaataacgaaagttattgataccattgaggatatacaagggcctctccatccatggggagacacaactgccatgggataccacacacccacaaactactccacacatgctacaaaagatgctagtcaattggaccaaccaaccaacacggtcaaacgttaaacgttaaacgtgaatagtgtaaaactgcacttattttggatggaggaagtatatctttaggccgtgtttagttgcaaattttttcttcaaacttttaactttttcatcacatcaaaattttcct

SEQ ID NO: 20363 - DNA, 1398 bp, Oryza sativa
  ref <308>: DATABASE ACCESSION NUMBER: AK070684
  ref <309>: DATABASE ENTRY DATE: 2001-12-06
gggagcctctcgttaccgagagagagagagagagagagagagagggcagtgcaggtgtcgctggccatggcgaggaggagcagcagcagagcgtgcgcggccatggcgacggccgccgtctttgcgctgctggccgcgacggcgacggcgtcggggctcgtacgggtggagcacccggccaagagcgacgggtcgctgagcctgctcgtcgtcggcgactggggccggaagggcacgtacaaccaatccagggtcgccgagcagatggggaaggttggggagaagctaaatatagacttcgtcatatccaccggtgacaatttctacgaggatggactcactggcgtcgatgaccaggcgtttgaggaatcgtttaccgatatctacacggcaaagagcttgcagaagccatggtacctggtgctgggaaatcatgactacaggggtgatgtgctagcacagcttagcccagtcttgcgaaagatcgaccagcgattcatttgcatgaggtcgttcattgttaatgcagagattgtggatttcttctttatcgacacaactccatttcagctgaaatattggactcgccctaaagaccatcattatgactggagaggagtggcacctcgacaaaaatacataactaatctacttaaggatatggatgaggcaatgaagaaatcaacagcgaagtggaagattgctgttgggcatcataccattaggagcgtcagtgaccatggtgacaccaaggagcttctgcaacttctacttccagttctgaaggtcaatggcatcgacttctacatcaatgggcacgaccactgcctggaacacattagcagcagagacagtcctatccaatacttcacaagtggaggtggttcaaaagcatggagaggagtcttgcagccaaattctgataagctccagttcttttacgatggacaagggttcatgtccctccagataaaccaggaccaagctgacttcatattttatgatgtttctgggaacatcttgtacaagtggagcaagagcaaagcaaactacctccagccctccacctatatcactgaagcatgaggcagatgcaaaaccacaaaacggagaattagcttggctaagatatttgtatcaaatttgaatgcattattgtggcacgcaagggaagaggaccggaaaggaaataggaaagtatttaagcatggcatgtgattgatctactaaagaaatttgagacaaggccgagaccatcctactagactaggaaaagagatgttcagtatggtatccattagatctgattcatacaacttcttgccagaggaccatcgattatgccatgtataatttacaaagaaggcttaaaactctaaagctagtagtgacctttgc

SEQ ID NO: 20364 - DNA, 857 bp, Oryza sativa
  ref <308>: DATABASE ACCESSION NUMBER: AK070685
  ref <309>: DATABASE ENTRY DATE: 2001-12-06
gaccagattgaggcagccgagtccggccatcatccagaagaagcgatcaaggtgcccctcgttgaggtcgtcggggatccaccccggccggcctccggtcgccgtcgcccacgacacggcggtcaggacgagcgagctcaggtatacccctgccgcgacggcgaggaaaccaagcgccatgcacaccgtcttcatggcgggcggcgcctggctgtagaagaagtccagctgcccggcggaggcgagcatctcgcccacgcccatcaccgcgtactgcggcacctgccacacgatgctcgtcttctccattcccatccgcgcagcgcgggcgcgcttcgtctcgaccagcgccgcggcggccatggcgagcacggccatggtgagcccggcgccgatcctcagcaggtcgggaatgcccttctccctcccggcgagcctcctcgccgccggcacgaacgcgcggtcgtacagcgggatcagtgccatggaggtgagcaactcgaaggttgccagcgaggccggcgggacgcggagggagccgacgcgggcgtccatcgccatgccctgctcgacggacatcgaattgacctgcgccgtcccggtgtagaagaaggcaatgctcgcccacagaggcagcatcctgacgagaatcttgagctcttcgacctgcgtcaagctgcaaagcctccacggatcgcccgccgcctcctcatccgacgccgtcacgacggcggccttgtcgaagaatctgatcatggcagatgcatcttgagaattagtactatcggtttatcggtttataagatgttttgacttttgttaaaattaaactgttttaattttaactaagtttatag

SEQ ID NO: 20365 - DNA, 1595 bp, Oryza sativa
  ref <308>: DATABASE ACCESSION NUMBER: AK070686
  ref <309>: DATABASE ENTRY DATE: 2001-12-06
gatggccgtggtaccacgagcttcctctgagccctctcgccagccgctgcagcgggctcagcctgacggacccgaggattttctccgccgccgccgcggcgttcttgtcgccggcgtgcttcctcggcttgctcgcggtgtcggctttgccattggccttgcccggcgtcgtcgtgggccgtgcgctcgccttcttcaccggcgagtcggggtgtctcgccggcgagctcttgaagatcgggtccttggtcacgcggccgtgttccgacgagctccggatcaggaggaggtcgctgagccgccacctcctccacccggcgctcttggaggccggacgggtggtgaactggtcggctttcttggccggggagcctgaggcggcgacgccgagcggcgacggcgacggcgacggcgccttggtcgcctccagcagagcagcggcgaacgggtcgaagtcgacgccggagccgaccctgctccgtcggcgaggcgaccacatgccgccgcctctcgacatcggcgaccgcggcgacgacgcgacgctcccgccgtcgagcagcccaggaggcggcttcagcggccggaccttgcccttgtcgaagagctcgtcggccgtcttcggcagcggcgccttcagcggccggattttacccttctcgaagagctcgtcggcggtcgtcagattctcctccggcgcggccttgtcgacgaccgtgccgaattcgaagtccgtatcccacgccgcgccgccgccgccgccaccgagcccggccttcggcgtcccgggcctctcctcccaatcgaacggcacggacgaggcgttaacggtgtacgacgcccgcggccggaacccctcgtcgtcgtcgtcgtcctcctcctcctcatcctcgccgtcatcgcggccacccccgttgcccccctcggcgaagtgcgcgtagatggcggcggcgcgcctggggctggccggcgcgctgctgaagtgctggaagaggtcgaacgggttggcgtgggtgaggcgcggcgtctccggctgctgctgcgccgccatgacggcctcgaacgggtcaggcgacggcggcgccgtcaagaacgtggccgtggcgaggcggccacgcgggctggacagcgccgtggcgtacgggctcgccgccgggctgtcgaaccggaagtcgtggtggcgcggcggcggcgaggcggggcgcaccattacttccatttcgggtggctctgactgacttggcttgccggagagctcgtggtggcggagcgggtttaagagtcgtggagatggcggggagggagggagggagggaggaagccgtgaggaaggagggaaatgagatgatagcagggagctgggcctcaaatttgatttttatactttctcagaaaaataaataaatacactatcccacttgcaaagttgcaatctaattgaatttgtaatatttttcatgtaaatttgatgtatcaaatgatttaactcaccatctttttttttcattcaaagaagaacctcaactatcaactcctcaattaatcatagggtgtgtttagttcacgctaaaattggaagtttggttgaaattggaacg

SEQ ID NO: 20366 - DNA, 1554 bp, Oryza sativa
  ref <308>: DATABASE ACCESSION NUMBER: AK070687
  ref <309>: DATABASE ENTRY DATE: 2001-12-06
gcccagatggggatctccgatcagccggtgcagcctgtaattgggggatacatgcagccgccgccacaggtgccgatccccaacatggctgtccccagcatctccccctcggatgcgtccagccgagtgttctccgacgatgacaagtccgatcacggcggcggcggaggtcggaagccgcagccacccaagccggaggttccacctgtcgctgaccccaccaacagagccatgtactacaacgatagatcgcctcctgctgaattgaagcgtgacatgccggttggaactgatgctgccagctatcgtgtgcctgtgccagcccaagatgctgctgccgccgccgccgctgcggctgctgctgcccagcaacccccagctgggtatgtgtatgcacagatgcatgcgccgccaccgcagcagcaacccccaccaccacagcagcaacagccagtcccacagcaatatgtcactgcacaaaatcagcatttcattcacaatccagctactggcacattcatcccaatccaatcctattaccaccatccggtccctcagcaagcaccacagccgcccatgccgcagcctgtgccacagccacaacaatcacacgctttcgacccaaatactggcatgtattacattcccatgcgcacgaatgcgcctcaggcatatagcatgcctcctggtgccgctgctgtgccgcctcccacccttgttgacactacaccaaaaccaaccgtgccaattcctcagatggccgtgaagcagcctgaactgcagcaacctggtttgtactgaactaccgcagcacctacccctgtaccagcgtctaatgctcctgcgtatgctgggatgggctaccaccatgttattcaaacacaccatcatccagcgccacagcctgcagcgactgtggcaggcaattttggatatgactatggtgatcccacgcgagcacaggtcttctactcgcaggcagcggcaccaccaacattgccacctcagtatcagcccatgggctcgcccgatgctggccaggctgacctgaaacaggcccgggcttcatagctcaaggatttgtgaactctggtatgttgagaatcctagaagtgtagttatcctgccgttaattatcactattgttattacatgttacatgagtcagttggcaaccagtggatggatgatggcattaggcagctgtgcatttgggatcaaaataagatgaaaatgggatggtagttcttgtgttgggtgaaactcaagagggtgtttgtgattggttctggagatgccaatcgccaatgctggagcaagtggcggggagtggcttccaattccaattgccgtcttcttattttttaaaaaaataaatatatagtgtctaaagaactcggtacaaattctgaatcaagaacttatcatttgtgtagccctttgtatatttgaacctggaagttattgaggttgaaatgtcagatgaaagtgtcattactttgcttgtagaaacttcatttgagttaaatatcatatatatacatcattcctgtc

SEQ ID NO: 20367 - DNA, 2588 bp, Oryza sativa
  ref <308>: DATABASE ACCESSION NUMBER: AK070688
  ref <309>: DATABASE ENTRY DATE: 2001-12-06
gacagctctctctcaatcgctccctgagctagagctgtccctgccaaaggcaaataataccagatgaacacggcagcctctcgatctcgacaactcggggcggaataattctggtgttcttctcatcaccgatcgtttctgtacatgtaacaagttgaggatcgtggcgcctgcatgcatttggtggacgccacgtcaagaataaccgaggttacaggtgtctccccctgcatgcagcagggggcatctgcagcttgcggaactcggatggtttgagtttgaacgagttgcagcatgtcccccatggagtcccgtcctgatgatcttgttcctcccgcgatgcacaagccggcgatccaatgcgccgccgccgaggacgcgagcctgctgcgaagcccgacggtgtcgtcggaggagttcatacagttcaagaggaaagccacgacgatcttggaggagtacttctccacggacgacgtcgcggcgacggcgaacgagctgagggagctgcgcgtgccgtgctaccactactacttcgtcaagaagctggtctcggtggccatggaccgccacgacagggagaaggagatggcggccgtgctgctgtcctcgctgtacggcgacgtcatcgaccggccgcaggtgtacaaggggttcggcaagctcgccgagtcctgcgacgacctgtccgtcgacacgcccgacgccgtcgacatcctcgccgtgttcgtcgcccgcgccatcatcgacgacatactcccgccggcgttcctggccaagcagctgacgtgcctgccggagggatgcaagggcgccgaggttcttcacagggcggagaaaagctacctgtccgtgccgcaccacggcgagatcatcctgcagaggtggggcgggagcaagagcatcacggtggaggaggccaaggccaagatcgctgacatcctcgaggagtacctcgccgccggcgacatcggagaggcttgccggtgcatcaggggcctcaagatctctttcttccaccacgacatcgtcaagcgcgccctcaccctcgccatggagcgcggaggcggcgccgaggggcacatcctggatctcctcaagtcggcgtccgacgaaggcatcatcaacgagagccagatcaccaaagggttcaaccgcctcatcgattccgtcgacgatctgacgctcgacgtgccaaacgcgaggcgcctcctgaaatcgatgatcctgaaggcctcgtcggagggatggctctgcgcgtcgtcgctgaagccgctgggccccgagccgaagaaggccgtcgtcgaggacgacgctgcggtgcggcagttcaaggcgaagacattgtcgatcataaaggagtacttcttgacaggggacatcatcgaggtgatgagcagcctggaggccgagaactacgcgtgttcctcctcctacaacgccatcttcgtcaagaagctgatcacctccgcgatggaccggaagagccgcgagaaggagatggcgtccgtgctgctgtcctcgctcggaatgccgccggaggacgtcgtgtcggggttccacctcctgatcgagtccgccgaggacgccgcgctggacaaccccgccatcgtcgaggacctgaccatgttcttcgccaggtcagtggtcgacgaggtgatcgcgccatcgaacctagagaaaatggaggaggaggccggccgcggcaagccagggggatcctccaccggcttattggcgctccggaacgcccgtgccctgctcggcgcgaagctctctgcggagcggatactgcgttgctggggcggcggcgccaccggcaaggccgggtgggagctggacgacgtgaaggacaagatcggcaggctgctgcaggagtacgactgcggcggcgacatccgggaggcgtgccagtgcatcaaggagctcgggatgccattcttccaccacgaggtggtgaagaaggcgctggtggcgatcatggagaagcgtggcaaggacgagcggctgtggggcctcctcgccgagtgctacggccgcggcctcatcacgccgaaccagatgaccaagggcttcgagcgggtggccggctgcgtcgacgacctcgcgctcgacgtgccggacgccggcaagcagttatgctgctacgtcgagcgcgccaagaagggtggatggctggacgcgtccttccccaacggtgtgcgctcgtgaagaacacccggttaatttatatacatgcagatgcagcactggcattccaggggatttcatttgcaactttacacagctatatactactttgcattccgttccatgtatgtatcagcaaagggaatatgactagcacaagaaagaaaattgttgtcataggattaggaagctttgatcttccattttagcagttgcgcggcgtttagcccggaggatttgtgcattgaagagtttgtgttgtttttaatatgatgtgagagtttctgttgtttttgttttgtgaattggctgctgagagaattaccatgctacaccttgttatcttatcacatcctatatatctataaagtttatctccactaaatgtagttaatgct

SEQ ID NO: 20368 - DNA, 1511 bp, Oryza sativa
  ref <308>: DATABASE ACCESSION NUMBER: AK070689
  ref <309>: DATABASE ENTRY DATE: 2001-12-06
gaattatcagttactggatcagtgccacctccaagatgcggacattctgccacaatgatcgagaagaggttgcttgtatttggtggcaggggtggagctgggcccataatgggtgatttatgggctttaaagggtgtcactgaagaagataacgagacaccaggttggacacaattgaagctcccaggacaatctccatctccacgatgtggtcactcagtaacatctggtggaccttatctcttgctgtttggaggacatggaactggtggttggctaagtaggtatgatgtgtactacaatgaatgtattattttagacagggtctctgttcaatggaagctcttagcaacaagtaatgagccaccccctcctcgagcatatcattctatgacttgcatagggtctcgatttcttttatttggtggctttgatgggaaaaatacattcggggatctatggtggcttgttcctgaaggtgatcctattgcgaaacgagacttggttcctaatgttgattcagacagcaaacctagtaatgtgactggtggtgctcaacattccgcatcacaggaatcacaagctggggaatctccaatgattgacttggcaaaacgattgggcatttcactttctttagaagcttcagcaagttttgttgacgagatcaatgataaagaactaattgaattatcatctatgctttttggtgaatcaccccctaccggtgaccagcatgcatgcattcaggcacttcgtgatcattggacaagtattccagccaactcaatacagctccaggagctaggccctttactgagggattatcaacgcctcattcttcgccgctatttggaaaattcattcacgtctttctatgagaaggaagttcaccgcttcttccatttgaaaaatgcttccgagttacggatggatgacatccccatcttgttgatggagtatggaaagctgctttccacctgaggctgggatagcatcttagttctgactctttacttgagaacattagaaggcaaggaagcatagctgcatacatggcatgctttcacgatcttcagagcttggtggcatcagagctttgctccctgctcaaaaacgttttcagcatgggcacgaacaaagttaccgcactttcgggtacaacgtcgatagaatttgtgaatcatgggcgtgttaagaacctacatgctgtattatcttaaagaaatcgaaagcgacaacacctggcggcttggtgccgagaagctggcaggaaggctcttcacatttgttcaccttgattgatgtagtattctttctttgctcactaacaaaaataattatacattcattagtggagtcaattctcatattgattctttttctttgattgatatggagtcgtggccatctcggcgacggcacatttgacatgcatgatgcatgcgttgtactggtgctgtactcgctccatcaaaaaaaaaaaagacaaaccctatgtttttgtggcc

SEQ ID NO: 20369 - DNA, 2261 bp, Oryza sativa
  ref <308>: DATABASE ACCESSION NUMBER: AK070690
  ref <309>: DATABASE ENTRY DATE: 2001-12-06
ttttgtttggtggatctgcattagcatgttattcatagggatgctgtttttttttaattaaaaaaataatccgacatggtaatgagtactttgctccagctatactttattgtcttaaagtacgcggtaacattgttaaacaaaataaattatcttttggatgctgccgcgaaattcacggtggatgctggaaaatcttgtgctttatgccgcggtgatgctatcttaggatattgattttttttaacttgctttctcaattctgtgccttgaatcactggaaagtgttcatgtactcctgcgtactaagttatgctgttttattgtctttccattgcttagtaccactgccaccctgtcatctctgataggactatattcataagcatctttgccaaaatcctcaattctgccatacacaacctgcatcgtttgtaactgtcatctctgataggactacattcataagcatctttgccaaaatcctcaattctgccatacaacctgcatcttttgtaagctttgctgtgctagtggttgataaaccaacgtcctgggtgttgtaaccgttgttgttgaaaatctttgtggtttttatatatatttcactggggtttctatggctgtggaaggatatcgacatagattgcctttttttacttttagctctattcaggttttggctccagttgacgatctgatttctctgtgagcggcccggctccctcctcctccttctcctttcttctgatttcatttgcagcatggttcaaaggcagtttttagtatgtcaaggctgaagtgcgcacttcgggggtttgatttaagagcacttttgatcctcttgattggtctgccaattctgatctttgttatataccttcatggccagaaagtcacttacttcctcagaccaatctgggaaaagcccccaaagcccttcaaagtacttcctcactactacaacgaaaatgtctcaatggccaacttatgcaagttacatggatggaaagtcagggaaacgccgcggcgtgtttttgatgctgtgcttttcagcaacgagcttgatattcttgatatccgttggcatgagcttagcccttatgtgtcagagtttgtgttgcttgagtccaactcaaccttcactggccttaaaaaggatctccacttcaaggaaaaccgtcaacgttttgaatttgctgaatcacggttgacctatggtatgataggtggtcggtttgtgaagggggagaacccatttgtcgaggagtcatatcagagggttgctcttgaccagcttattaaaattgccgggatcacagatgatgacctgttgatcatgtctgatgttgatgagattccaagtgggcatacgatcaacctcttgagatggtgtgatgacatacctgaagtactccatctccagctcaggaactatctgtactcatttgaatttttccttgatgacaaaagttggagggcttcaattcacagataccgggctggaaagacgaggtatgcacatttccggcaaacagatgaccttctggctgattcaggatggcactgcagcttttgttttcgctacattagtgattttgtcttcaaaatgcaagcttatagccatgttgatcggattagatttaagtacttcctgaaccccaaaagaattcagcatgtgatatgccgaggagccgatcttttcgacatgcttcctgaagaatacacattccaagaaatcattgccaagctgggtccaatcccaagcacattttctgccgttcatcttcctgcttatttgctagagaaagtagatcagtacagttatcttcttccagggcgatgcatgagagagagtggctaggcacttgcagcttgcataacctgatgcgcatggggatcgtggatgatgcccctttggagaacaacatgcgagatattggttgtacctgatacaatttggctgacttagttgagcgatcgcttggcgatttgggtgagttcatgattttgtactggtgtagccaaacattggaagaaggcctgacagcatagcgcatgcttgggcgctgcgttcttgttttttttagaggagctcagcagtgtgtgtgcttttacctcctgagttttacccattacttccatggttgatatatgaactcagaaactcttgtagattgtgaactggatgacatccagaatttttttttatcttgttctgtacagtatcatttacttaccagacgagttaccctgcattg

SEQ ID NO: 20370 - DNA, 2343 bp, Oryza sativa
  ref <308>: DATABASE ACCESSION NUMBER: AK070691
  ref <309>: DATABASE ENTRY DATE: 2001-12-06
gcttgctgccagcattttgattctgtgtgtgtgtcttggttgcaaaaaccaagacatacacacagaatcaaataataacaaaggtttcctagcctcaaaggatacatatatatagtttccctacaatacaatggagcctgtcaatgatttccaggaaggcatttcaacagagcatgcctttgaggcagagcctgtgccatcattgtcggaaacaataacgccacgatcaatggtggtgagcttcatccttagtgtaactctcagcatcgtcgccatgaaggtcaccttgagctctggcttcattccgtcgttcagcatcccagccggcctcctcggtttttgtgtatcccgtgcgtcgatccgcattcttgactacttcgcagtggcacaactaccattcacacgccaagagaacaccatcatccagacctgtgtcgtcgcatgcacctcgatcacattcaccggtggctttgggacatatattcttgcaatgggaaagaaagcagctgtaggggatgtcaatgcccaaaataacgttgaggagccaagctttgccaggatgatcaccttcctcttccttatcagctttgctggcatgttcatcatcatgcccttcaggaaggtcatgatcattaggcacgggttgacattccccagcggcacagcaacggcgcacctcatcaatagcttccatacacctcaaggtgtcaagcaagcaaggaagcaagtgacattattgtttaaatcgtttggaggaaccatcgcatggtcgctcttccagtggttcttcgcctctgggccgggctgtggcttcaaattcttccccacatttggcctcgaggcatataaacacggattcttcttcgatttcaccatggccaatgtcggcattggcatgatgtgcccgtacatgatcgtgttctccgttttcattggcaccatcatctcgtgcggtgtaatttggccgtacatcgagtcaaaggagggcatctggtacccaagcaaccttgggcccaacagccttaacggcatcagaggttacaaggtgttcatcggcttgtccatgataatggctgactgcctcttcgtcttcctctgcatcatggtccggacaacatgtgccatgatcaagcggcgtcggcaggcaatgcaaggtggtggcggtaatgcgcagccattccagggtatcgacatcgccgatcagccggtgaagagcttcgatgatcgccgcagggcgcaggtgttcctccgggacgagataccggactcggtcaccattggctgctatgtcctcctgtcgatcatctccatcgccgccatccctcacctctacccacagatgaggtacagccatgttgcgctcatctacctcgccgcgcccgtcttcgccttctgcaacgcctacggcttcggcgtcaccgacatgaacctggctagcacctattgcaagatcgccatgttcgcgttcggctcgtgggtcggcatcaagagcggcggcgtggtcgccgccctggtcgccggcgggatcaccatgtcgatcctgggcaacgcggccgacgtcgcgcaggacctcaagacgggctacctgacgctgacgtcgccgcgcgccgtgttcatcagcgaggcgatcggcacggcgctgggatgcgtcgtcaaccccaccgtgttctgggtgttctacagggtgtacaagatgggcagcggcgacatgggcgacatgccctacgccaagctctaccgcggcttcgccatgctcagcgtcggcgacggcgagcaaggcctgcccaggcacagcatgctcctcttcaaggtcttcttcgtgctcgccctggcgctcagcgtgttccgggaggtggcgagccggaaggagtggcgcatccggcgctacatcccgagcaccatcggcatggccatcaccttcttcatgccgccgcgcgtgcccgtcggcatgtgcatcggcagcctggtggcgtacctgtgggagaagatggacgccggccgcgggcggatgctctcgccggcgctggcgtcggggctcatctgcggcgacggcgtcggctcgatcttgctgtccatgctgacactcatgggtgccagggcgcccatctgcatcaagttcttgtctcgaggtgacaatgtcaagttggacgccttcttggcaacactccatgacatgagatagctactagctagctatccatgtagggaaactagatcattttctcaggtgtcaaaacttttgtacatatgtatccacgtcataggggcttgagttaggagtcgtggcaaactgtataatcaagtttcagttcagtctataaacacagtttgatctcctctacc

SEQ ID NO: 20371 - DNA, 2277 bp, Oryza sativa
  ref <308>: DATABASE ACCESSION NUMBER: AK070692
  ref <309>: DATABASE ENTRY DATE: 2001-12-06
gagtctcccctcccaccgccgcctccctcccgtcgccgacccaatccgccgtcttgccgcccagctccggctccggtctccccactctctttctcaaacccgtcgcctgttgatccccgtcctccgccgcaacctacgccctcctccgcgcagacaccgatctccgtcgccagttcaacgtcgggcgcatccatccacgaccacgaccacgaccacgccgcccgccgatccggacatcgctgctgtccctccgccggcgaagtctgtgcggcctccgcctcaaccggcatcgccgccgctgtccctccaccgcggaaatcgtcacgcctcgcctcaaccgccacctatacggagtcacgccgccgtccctccgccgctgaaaggacaacaccagcgacgcctagcggatctccacgcctgctgcccaccggcactgcccactggtaggtcctgtcaagttcaatagggtgtttgatattaaaagcaagaagtgctgaagcgatatgatcctattgttcaataatgattgcatatgttcaattgttaatgagtgaattgcactactgtcacaccctaaaaatcccaagtgtataaattgttgtttaaatggaattattagaaatgattttaaaagccttgaagaaaagatctaattttaaataataaattccaatataaaagtgggccagataaaattttgttaaataattctcttgattctatagtccctagatttttcaggaagtatttttaataaatggaattgcatttcatgaataatttaaaaagaaaaaggttttaaaagtcctcttttggctttgggctgaaagtcggcccaagtctctctctctctccccggcctgctcgcgttcggcccaagtcggcccgccaagccgagccaccctctctctctcctctctcccgctgacaggtggggcccacctgtcagggccgtcttcaacctcccgccgcagccgtgccctagtcgcgcgcaagccgccgccgcccccttccaaaattcggtcgcctctttcccgatccggtcaaattggtagaggggaaatgatcccttcgatcccctctatcttttcccctatagaaacttcatctaattttgtttggaaatcgccggatttgatctcgattcggattcgttttaccctcctaaccctaaaccttccttctcgtcgccggccgccgtgggcctagccgccgccccctagcccctataaaaggacccccgagacctcctcttttcgtcgccaccttcgcctcagctcgccgccactcgtagcgccctagccactagagcccgtgtgccgcggccgccgaaggaagtccggtcgtgcgccgtcgccgctccggtcgtcgtcgtcgctcgggaaggccgccgtcgggttcgccaagtcatcgccgtcctcgtcccgtcctccgtttccaccgaagatcgccggagcatcgccgtcgtcgtcgacccgaacgcctacgccgcttcgacctcgccaccgtcgccgtcggttgccgttcgtcgtcgtccgagccatcggtgagttcgtcgcgtcgccctctacccgttggtgccctccgtttgcgccgccgcgccgtcgttcgccggtgagtacggggtgccgagccgccgccggtgatgacgtcatcgtcaacgtcagcgccacgtcagccgtagacccgtggtagatcagttcgatctcagccgttcgttttgtttagattagatctcagccgttcgttccgtagaccgtttctgtgcacccggtccaccgtgaatccgagcccgctaatgcaataaatcctttttccttttcaaaaataattctttattgcgtcataattcaattaaaatctaaataaatgatttaatccgatttaatctttaaaaattcataactaattcatcttagctcggatttaggttgttcaagtctctaaatttttctaaaattgagatctacatgttaaaaatatccacatgtgttttttatgattgtttatgtactgttttggtgattttgctcttttatgcttcgattccgacgttcccggagagtccgaatttgcaggagaagattttgaagagttccaaggtcagcaaggcaaatcacatagatcccaaacgaccctttgagcatgttgatcccgtttaaagctattgtttttattcaactagtgcatttatttttgaatgtcatcgggtgggaatgacctgttacctttgttatagccttttgttattgattacctatactttgtctcctggtt

SEQ ID NO: 20372 - DNA, 2284 bp, Oryza sativa
  ref <308>: DATABASE ACCESSION NUMBER: AK070693
  ref <309>: DATABASE ENTRY DATE: 2001-12-06
ggttggcgagctgctcgtcggcgggcggcggacggcggcggcgctccggtggtgggcgccctagtaggctagtgctctgcctccaactcccctgatttggcagcgattgatgccgtccgccatgaagccgagctcggccggcggtggcaagtggccgcaatagccctggctggatctggagacgtcggcaacaatggcggcgccggacggcgatgccactcctccgtcctgctcgtctaattggcgatccaaaggtcattttgtctagtatgcagactgttcaactaaaaatacacgtgcttgtgaaacttgaccagagatctatggtgctgaactaaacttgtagaatttcctttgctgctgtcgtcgtctcagctatgtggtcaatcttcgacggttatattaatccaaaccgcagggaaaaatacaaacttgaattcaaacagtttacattcaaaagcatatctaggttcagacacattaaaagattttcagactacaaagtttctctcaggtcccagatcttgttgatccgttgagtaatccacaaagttagagactacacagtttcacatggagatatttctgtctgccattctgggtgatcttgccagtagatccatatcattcctgatcaacaagtgctcgaaaccgacagtgctaaccgtggaggagaaactgcaacggctgctgctccaggcatgtttcatcgtggaggagtcagatgaacggctcatcataaaccaagccatgctgcagcaactgaacatactaaggaaggagatgtacagaggttattataccctcgacagcttcagatgccatggtcatcaagaatataatcccaaagatcttgaggtgagtagctcttttgcaccatcgatgttcaatcctgccaagcgtgtccggttctgcagggtcactggccagagagtacaagagcatctgctgcaacaagtttttggcagacttgaagtcaccattgaagatatgagtgaatttgttatgttcctgaatagttatccacgcttttgccgtcagccatatagcatgcacttgcttttagacgagtgcttgttcagtcgccaaatggagatggagcacatcatgaacttcctgctgaaagaggataccaccggtactgaaaatccaggtgtcctgccgatcataggtccaggaaaagttgggaagagcaccctgattgaacatgcctgtgacgacgaaagggtgcgtaaccacttctctcaaattgtgcttttcaatgacgacgatcttgaagatgcaaacatattgactcttagagattctggtgtaatcaagcatcaaaaccatgccactggtggaaaaaggatactaatcattattgaactaaccagagatatcaatgagggtgcatggagaagattgtactcagcttcaaaaagtcatgttgcaagtggtagcaaaattatagtcgcaagccgatctgaaaagattgcaagctttggaaccacacaagctcttagagtaaaattctttactcaagaagcttactggtactttttcaaggttcgcacatttgggagcataaacgcagtggagcacccaaagctggcatcagtagccatggatattgccagggaattgaatggttgcttcatgggtgcaagcatctacagtggacttctgaaagcaaatatcaactttcagttttggaggagggctctggccataatcagagaattcaagaagctcaatctcttactctacggtgcatatttttttgatgatccttggcaggcagttgaaccatcatatattaggaccgtaaacaaaattaactcggaatatcttcttgttcttgacgactatcaaatatgttctgctccgaacatgattcattgtcacaaaaactctgctcacagtgaagatgaagttcccatggtgaatgtgaaagattttctatttggaaatgttaaacctcaaggaaaattcaaggttctcgcctggagatctcaccttcaacctcactacagttacgtgttcaactgtgaggtaaagaggttacatcatatggtcaccagaaagaagagatctcagaagctctgtacctgaccatctcattgttctctgaaactgatgcataatgtaattatcttaaattttaatataaatctgagcatttgtgaaatagtttgacctactgtctgagcaaatgcgtagtccaaactcgtatgtaaaatgtgctatttgtaagagattgtcaaactgaagtctatcagcatctactaacattctatatttg

SEQ ID NO: 20373 - DNA, 1712 bp, Oryza sativa
  ref <308>: DATABASE ACCESSION NUMBER: AK070694
  ref <309>: DATABASE ENTRY DATE: 2001-12-06
gacccgtcgaggatgccgtacatgggctacggcggcgccctcggcctcactagccagaccttcgacaacgccaccgccggctaccggttcgtcgccgtcgagttcgacacctacaacaactccttcctagaccccgacgccacctacgaccacatcggcatcgacgtcaacgccctccggtcagtgaagaccgaatccctgcctagcttcatcctcatcggcaacatgaccgccatcgtcgactacaacagcaattcgagcatcatgtcggtgaagctatgggcaaatggctcaacgacgccttacaacctcagctccaagattgatctcaagagcgccttgccggagaaggtcgccgttggcttctcggcggcgacgggttcatcctttgagcagcatcagctgcgttcttggtacttcaacttgacgttggagcagaagcagccgacaggacaacattcgcgtggcggagttgtagcgggagccaccgtcggtgcaattctgttcatcgtgctcctcttcaccatggtagcaatcctcgtacgacgacgtcagagaaagaagatgagggaggaagaggaggacgactcggaaggcgatcccatcgtggagatcgagatggggacggggccgaggcggttcccataccacatacttgtcaacgcgacaaagagctttgcggcggaggagaagcttgggcaaggcggttttggcgcggtgtaccgtggcaatctgagagagctcggcatagacgttgccataaaaaggttcgccaaagactcctccaagcaagggaggaaggagtacaagtcggagatcaaggtgataagtcggctgcgccaccgcaatctcgtgcagctcatcggttggtgccacggtcgcaatgagctcctcctcgtgtacgagctcgttcccaaccgcagccttgatgtccatctccatggcaatggtaccttcctcacatggccaatgaggatcaacattgttcttgggcttgggaatgcactgctctacctccatgaggagtgggagcaatgcgttgtgcaccgtgacatcaagccaagcaacgtcatgttggatgaatccttcaatacaaagctaggtgactttggcctcgcaaggctcattgaccatgctattggagcacaaacgatgacccacccctcaggtacaccgggctatgtcgaccctgaatgtgtgatcacaggcaaagcaagtgctgaatctgatgtgtacagttttggcattgttcttctggaagtggcatgtggaaggagaccaatgaacctactggatgaccagaataatggcctcttccgactagtcgaatgggtatgggacctttacggccagggagccgttctcaaagcggccgacgagcgcctcaacggtgactacgacgcgacagacatggagtgtgtcttggttgttgggctctggtgtgctcacccagaccgatgcgctcgtccatctattagagttgccatggcagttctccaatccaatggaccactaccgatgctaccaaccaagatgcccgtgccaacatatgggccgccggtggcctcatcagagggccagcactcgtcgtcgacaggaatatcatcctcaagtttgacacaaacatcaatcacacctcgttagggatgtacgcttgcccactcatggtacacattgatccacatcatttaattataagtgcactttttttc

SEQ ID NO: 20374 - DNA, 1648 bp, Oryza sativa
  ref <308>: DATABASE ACCESSION NUMBER: AK070695
  ref <309>: DATABASE ENTRY DATE: 2001-12-06
gtttcttctcctctcctcttctctcgtttcttcctgtgctgcctcttatcacccttctcacctccttcaatggccagatctgatcaggtgaggtaaaatccgatgaggagaagtaactgaaagggagaggtggaacctgagggaaacttctctctcagcatggggtccatattcccctcctcaccgctgctcctttcttcggcatggtcggcgatgtcgtagccgccggatccggctatctctatcgagtccagtcgctttttggcgaggcgctgccgcgaccgccgccggatcggggtcgtccatcgccgtcgcgagcgccgtgtggctctcacgtcgttgggggctgccgaagccgagcggggaagcacgtgcgcgatctccggttagttgaagaggacgggggtggcgcggcccttgatggcacggcggtggcaaacgtgcagagccagatgcgcgagttcttgcgcagctctcagatctccgacacccacttgccccaactccacatgctgctgctagatccaacgggcggcgagcttcgtcggtggagagcttttgcgccgactgctcgagcatccagcaaaatgtaaggtggaggtggtgcggtggttgggtcacggatcggccagggtggcgagcctgggggaattggcaggcaggcaaaggttggttgacgctatttttcttttctaatcatttgcatgaattatatgtttggatgcttcatgtgcaatcggttgcaaaattaggtctgtatatatagaggtgataaaaaatcataaataaaataacagatcgcatagtaatatatctcagtttattcacatacaatattcagctattataatatagtacatgtaatgatctgtattgactatgagctattctttctagctagtatcattaactgcaggatattctaccgaggtactgctaattatgaactattctcatgagctctaagcactatctgtatacttagaattcattttccttgttctctgaggccttgtgttgcatgctatattgtctggttgaacacatgttttcttacgtttctcaacagagctttccttgcctatgccattgatggttttcgcctgtctttttcctgccttgatggattcttgaacaactgatttgtttatttcatggctgtagttgtcatttctgatttctgcctttgtgggttttgcatgagcgccttttgcatttttgcctcgaacttttgcatctacacattttatcatacttgtttcgttgctctcctcttctgaatcgtcttctattatgtatgtcctccgtcttatttgtttgcaactgggaggtttgtccgacgaagtgagttcatcttcactcatgatttcctggtcactatcctctagctcttgcttcacgggtagcagtgagatggatctgttttttaataagagggcccctgctggtttgttccttcaaaggcaataaagtatttgtcatatgtgctatatattataaataaatgaatatttgtattatgtgttcaaatacctgttgatctgtctctctatcttgttttagtatgttatccacatcgtcgtccattaactcctgtaaaatcataatgtggaaacatttcggaaataaaattttcaagattttgtgt

SEQ ID NO: 20375 - DNA, 2075 bp, Oryza sativa
  ref <308>: DATABASE ACCESSION NUMBER: AK070696
  ref <309>: DATABASE ENTRY DATE: 2001-12-06
ggtccgctcggttcccctcctcaagctcgcctcctcctcccctcgcgccgtcgcgcgttgctgctgactccggagcaaaatcgagcgagcgcggcggatcaggtggtgctctccctgcgccgccgcgcgcgcgccctgttggttttggaacgagcgggcagggcagggcggagccgggagatcggagaggagcagagaagaagctggccatggggtcggtggagcggatcacgtccatgcctcggcggcaggtccaagcccgtgatgggtcggttgcttcattggctaaacgaacgggctcaccctgccaacaggaagatgattatgaaggtaccaaaactatgacaaatccatggaccttccttccagaggacatctggtatcatatacactccttattgccactaaaagatgccgctcgtactgcatgcgtgtctcacacatttctacgttcatggagataccgccccaaccttgtctttagtgatgcaaaactggggctgagtggcttgtcggaaagtgatgaagtaaccaaggaactcaacgaaaaagttgacctcattatgaaaaaccactcaggcattggcttgaggacattcgggctcgaatattataatttggtcgatgcctcttatcttgaccgttggctccagattgctgttacaccagcaatagaagaactcatccttatgttttttccagagatcaaggcaaagtactacgacttcccattctcacttttatttgataggggtggaaactcgattaagcatcttcgcctcagctactgtgccttccgtcctaccactagtcttaatttcttgcaaagactgcatctgtttgaagtgcgtattactggggatgaattggggtgccttctttccaactcttttgctttagagcagttgaaactcacacattgtaaagagctcaattacctcaagataccttgcgtgctacagaggctcagcaagctgacagtgtttggatgcacaacattgcaagtgattgaaattaaagctccaaacctttcaacctttgattatgatggtaatttagcaggactatcagatggaggtttgctgccagtgaagaacctacacttatcttccttttatcagcatcatactattcaatacacatgtgccaagcttccatctgttgcgccgactatcgaaactctcaccatattttcagaaagcgagaggttcaatacacaaatttcaccattcagattccttcatctcaagtgcttgacgatttctcttagcatataccgtgggggcttttccccatcaaatgattatctttctctagcttattttcttgatgcgtctcctgtcttggagattttcactttgaccgtaagcatttcttttttcatgttttttctcctgtttgatacaattaaattttgatgtggcaaaaaatacctattaatccgttgtctataatggaatcatttgtaagtattgtttgcttgttcctatgcaggtatcacagactcgtatgaagcatcacgtgatttctgaagattcctcatatctgaggcagatgccaggacaccgccatgtcaacctcaagaatgtgaagatcattgggttttgctctgcaaagagcatggtagagctgacttgccatattattgagaatgcaacatcactagaatcccttactctagacacaatatgtgatgattatgaaaatcctgataggctatctgttcacgaaattggtgagtgcagccccatatgtaggcaaatgatcatggaggccaaaaacgcgctcttggctatcgaaagatacattgtggggaaagtcccctctacagtcaggttagatgttctgaagccctgcagctggtgccatgcctttgaagtttaggtgttaaattgtggcgatgttgaattatgtggtgttgcttaagctaggtgtggcttgtttctttagctataggatgtacctgctgttttaggtcctgtggtattattgcatgggttgtgctttgtcagtgttctaatgtcatgttacatgttcagttatattataatcaagaagcattctttcttctggct

SEQ ID NO: 20376 - DNA, 1667 bp, Oryza sativa
  ref <308>: DATABASE ACCESSION NUMBER: AK070697
  ref <309>: DATABASE ENTRY DATE: 2001-12-06
gaatttcaattcataatgagatttgtgagaggatgagtaccaacattcaacaacaatggcatcatcatccttggaagcctacctcgtacggctgtccggcgccgacgccccggacggacaagtacaccacccacccggacacgaagcaccaccgcaccacctgccccgccaccgccaccgccgcctcacttcgccggcggaagccgtccaccgtgcacatcaccaccccgttgaaggtctccgcgccggcgtccacgtgcctctcgacgcgccgagcgcgcgtcccgaaccggccgtccatgatccgcctcgccatctcctcccgccgcaccgcccagtccgcgccctgccgcccgaggtggtagctcacgtggacgggcggcggcggcggcggcgtcgtgcgcggtgcgtccctcgccgggctgtcccactcggcgaccacgtagaggacgtgctccggcagcgccgccaccgatgccggctcgtcgccgtatccggcggccatccactccggctgctcgtaccgggacggctggctgcagtagtgcgcgtcccacgctgggaggtggtcgccgccgccgtcgtcctgcgtcatggcctgcaggcggtggaagctcccgaaggcggcggtggaggcgaagcggaagtgcggcggcagcgcgtccatggaggacagagcgagcgccatgacgtcagcgctctcagagaggtcgagctccacgaacagctccagcttctcgccggtgccgccgccgtccgcgtacaggaacacgacgtgcgcgcgcgggcggcgccaaggtgatgtgaggtccgggaacgcgaacgcgtgcgccgtggcgcccggcgacgccggcggcttgacggagaagctcaccgctctccgcgcgagcagcgacgccgcgaccggctggaacggcacaaaccgcttggcgcggccgccgctctcgacgagcttcacgaagtcgccgacgccgtccgccagccgctcgaaccgccgcacggtgccgccgctcagccgctgctcgtctccgccgccgaaggcgaagagcttcttgccggcggcccgagcaacgcgcctcggaaaccaaaggcggcgcgcatcatcatcggcgacacacaggcgccgccgccgccgccgcctgtactcccgcgggacgcactcgccctcgtcggcggcgcgcttgagcttgtcgcgccaccgcacgagcgggcggttggtgatgtgccagccgtcggcctcctcgacggcggcctgaatcctgagcagcgccacctccatcctctcctcgtcatgctcggctccatcgccggcggccacctcctcctcaccgcggctgatgaggtacgagcatatccggccgacggcctcgccgacgaccgccgagccgacgatctccaccaccgacggtcgctgcatattcttcgcttacaagtactccaactatggtggtctctacgcacatggtcatgtcaatattccaaaagttttgacaaaattacaccgaaagataaacaatgtattcatgagtagtgtgaaactgaaatcttacatgttttggattattattaattatatttgatttgcatggggttaagtttaaccctttcattgtcgatggatgacctaaagatccaagaaataatattcttatgtattatagatgtgc

SEQ ID NO: 20377 - DNA, 1837 bp, Oryza sativa
  ref <308>: DATABASE ACCESSION NUMBER: AK070698
  ref <309>: DATABASE ENTRY DATE: 2001-12-06
gaccgcgataactccgcccccgcctcctcgctcctcccccgctgccatagcccgccgcctcctcgctcctcctcgccgcccgccccacgaatccccgcgcctcctagcttctcctccgcgcccgcgaatccccgccgcctcctcgctccgcgcgcatcctccctcctcgcgacggggcagcgaggtcgtccccttccgctgccacccccgctgcccacgccggagacgaggtcgtccccagccaccgccggagccgtggtcttccccggagccgacgtcgtccccagttgccgccggagccgagttcttccccatccgcattggatctgaatgcaccacatatcttcccctctggaaattattatttttggatgaaattgacggaataccaatggctattgcaacaagacgtgaggactggcaagccatctcttcatatatttcttgctgatatgagaacgttcgaggtattgccatataattgatttgtatttcaagctcctcctgctgtagcagcagtaaaaaaaatgctcgaatgtgattgggcgacacatgtacatatgcttttaagtcccttcagcgacatctggaaacctaggatctcacctacaaaaataggaatccaggagttggagccattcgaacatgcagcatgtctcttgctaatgtcttcctgagctttcaaatcataaggcccttgcctcactgatcaaaatattcaggtcactagaggttctaatttgcttgcaatccttatggtttccactcatcacagtgataaggcaccatattcttatggccagtgcttctatgttctgagcttactggtatccatatttttaagcactctatttctttgctctggtttctttttttgcaaccagtttctgatggaacatttcttatggctagaaattgtcacgtaatcttcaatgcgctctagaaatttcagattgagctatttgaattttgctatgttaatttgaataatacagtattccaaagcggcagtggatcattataaccaactaccacaaactattcaattgcagaatttctgcattccaatttttgcatttctcaatttaatcatgtattttggtttgagtaattgcaaagtaaaattgattttgtaattgtaaaaatgaatgaattttctggacaacatttaatgtgattttatcaaaacacaatgaaccttttaatttgtccgtatagttctgttttcttttattttcaaaagtaagatcctcagtataagcttttgtttgtggatctcttaataatgaatattgggggtccaatcctctcttgctccaccgttggaccagtagtagcagcaggttggaagctggtgaacacgatctcagggaaggacacaatggcggcttcgtacgatctcacatatgacaattctatcattgccttagattttaccaaccaaagatgcaaggggtactcattcttttgattttgtccagatggacagctccagtccataacattctatctacacagtcaacgactcagttaataataaaactgaaaaaatgttctcttttatttttaaataagattttcacacaacctgaaagtaagatatcaaaggagcactggcctgatataaatgatttttttctgacgaatgtggactaccaatgtaatgcacatgcctaagatatttaaggttttcttttttctgcagtacttaaagacttgtattttgtaatattgtaggttaaatctcaacttctgatgtatctcaagtgtaaatatggtcattgtcatattgctaatattttggatttaatcaaataaatgatgaccattgctgccc

SEQ ID NO: 20378 - DNA, 3047 bp, Oryza sativa
  ref <308>: DATABASE ACCESSION NUMBER: AK070699
  ref <309>: DATABASE ENTRY DATE: 2001-12-06
ggcacagtgccggccctaggccatccaacccctgaaccctctcaatttctcccccaaatcccccgctcccatccggcgagctcgccgccccgccgccgccacgcggaaacccgcaatggaggaaggcagcgaggcgcagccgccgctccagccggaggccgtatcagccgaagcctcggagccgccgcctcctgtcccaatggaccaagacgagggccaggcggcagctgcggaggccatggagggggaagctgaaggcgctgcggcggccgcggggaccattgagggcgaagcgggatatgccgcggcggatgctgatcccatggaggatgaagcggcggacgaagccggcgccgctgagcccatggaggacgacccgccgacgtcgtccgcgccgtccgccaccgcggccgttgacgactcgaccatcgcgcggaagcgccgccgccgtaagaagcagtttcccggcatgatccccacggcgggtgtccgtgtcctccgagcagccgcctccgccccatccgcggcgcatctcaacggcgtccctcgccgccgtggtcggcccccgacctcctcctcactccgcctcgcgcgagagctcgatgctgaggctctcatagccctcgcggcggggttcccggcggactccctctccgaggacgaggtcgccgccgccgtcctcccacgcatcggtggcgtcgaccagaccaactatctcgtcgtccgcaaccacgtcctcgcgctctggcgctcaaatccgctctccccggttgcatccaacgccgcgctcgcctccattcgcgccgagcacgcccacctcgtcgctgctgcgcattccttcctttcagaccatgcgtacatcaattttggccttgctccatcagttatttccctcccaccgtgcccccctccttcccttcctcccccctctgtccttattgttggtgctggttttgccggcctcgctgctgcacggcacctgatgtcccttggcttcaaggtcgccattgttgaaggacgactgcgccctggcggccgtgtgtttactaagtctatgcgctccactgctgcagaatatcatgacattgcagctgctgctgatcttggaggcagtgtgctcaccggtatcaatggaaatccccttggtgtcattgcacggcagcttgggtttccactgcataaggtgcgggacaagtgcccgctgtatcttccggatggtcgcccagttgaccctgacatggacgcccgtgttgaggctgcctttaaccagcttcttgataaggtctgccaactgcggcaggttgttgcggacagcatcccacatggcgtggatgtgtcacttggcatggcattggaggcgttccgagcggcacatggtgtcgctgctgagcgagaggaacgaatgcttcttgactggcatctagctaatctggagtatgccaatgctgctcctctagttgatctatccatggccttctgggatcaggatgatccatatgaaatgggtggtgaccactgctttattcctggcggcaattctcgttttgtccgtgcgcttgctgatggcatcccaatattctatgggcagaatgtgcgaaggatacagtatgggtgtgatggtgcgatggtgtacacggataaacagactttccgtggtgatatggtgctctgcactgtcccccttggtgtgctcaagaagggtaacattcagtttgtgcctgagctcccagctcagaagcgagaggccatcgaaagattgggttttggtttgcttaacaaggttgtgctgctgttcccctatgacttctgggatggcaggatcgatacatttgggcacttgacggaggattctggtcagcgtggagaatttttcctgttctatagctattcatcggtctcaggagggccactgctcattgcgcttgttgctggggaatctgcaatcgagtttgagaagacatcgccagcggaaaatgttgagaaggtgctagaaacacttaggaaaatattttcaccaaaggggattgaggttccaaagcctttgcaggccatatgtactcgatggggtactgataagtttacatatggttcatattcttatgtggctattggatcttctggtgacgattatgacattctggcagagagtgtgtgcgacagagttttctttgctggggaggcaacaaataggcggtatcctgcaacgatgcatggagctttacttagcgggtacagggaggctgccaacattgtaagagcagctaggaggagagcgaaaaaggtggactcacctaagaaaatggatgttaacaatgaagtcaaatatgaagttaaagtcgacaacattgatctggatgatctcttccgtactcctgatgctgcttttgggggcttctcagttctccatgatccatctacctctgaacctgattcaatttcattgttacgtgttggaattggtgcaagaaagttaggatctggctcgcttttcctctatggtttaattatgcgaaaaaatgtagccaatttagctgcaatggagggtgatgagcaacgattgagtacactgtaccgagattttgggacaaaactcgtgggtttagatggcttgggtgactctgggtcaagccttatatctcggataaaagctgctgctaggaaataataccaagccaagatgttggaatgattcactgtcagctgtaatagtcgtgagcgctgagcattgacttgcatgctcagcatagttactgaccctggagtaattcgttcatttcattgattaccttaagcatattaactctgatccaaggtgtaagttgtgccaatgttatgctgataaaacaatggagagtatttgaagatcatattaccatggaaataatggaagattattgccatcactttctgtgcacaaatgatacaccactctgagactactttgatggcatcgttacatatattaattatgttaagttttatctagcccttgttatcatttcttctgactttcagggcttatgatttcaatagatgagttattgtgt

SEQ ID NO: 20379 - DNA, 1872 bp, Oryza sativa
  ref <308>: DATABASE ACCESSION NUMBER: AK070700
  ref <309>: DATABASE ENTRY DATE: 2001-12-06
gaatctcgattcgccactcccatccccgccggccgccgctggcccctttccccttctccgaccggaccgcgctcctcaggttttcgtgatttcatctttgcatttgaaggtctgaacactctttgatagatccatcgcagggcagggcaggacgcgcaatccactgcggtcgcatctgtttgctggagacccaaacttttaggcgtcgagactccatcccagtctgacttcctgctccgaccgcgcgcctcaaggaagctttatctcggctcggctggctacatcttctgtttgctgctgctgcttattggagctggaacttgggagttgctgatcgactctgaagatgggcctgtcgcgtcgggctaagaatctcatcgtcgacgtccccttccaaggcgccaaatggctacgctgcgtcgatctggcaggccagctgttcggtaacaccgctacaccaccaccaccaacaacaatcgcacatggatcagagtcagcagctgtgcaagaagactacacctctcagacactggtgtccgactcctgtaatcccaagaagaaggcagcaggcttaaagatggagaggattcggcttcccagacccatcctcaagttccgacctgctctaaacgaggcatgtaggattgattgcttcccttttgtggatcacaagatgttctgggtggatcacttggggcgccctttcctctttgaagcagagacacggctgatggacatgttgccctgtctccacaagcccaagtcgatgcccttttctgtgtttgtacccaacgccgatgctgacaatgactatgaacaccaccgccctggcagcagtctttttgttatggagaggattcccaagccagaggtcaactcaagcacacagtggagcgatcagtttgaggcctttgtctactgcaagcacaagcggacatcgaccaacttctccaagacctggcagtggcaactcctcccgccgccgccgtacgttcgtgaacctaagtactggcacagctgcagccgcccagagatcagctcctacacatcgctcaccgtcaatggtgacccccacatttgcatctccatcgatggtgttggcacctactgcctgaacacggcaagccacacatggataaaagtcggtaattggaccctacccttccatggcagggttgagtatgtgcctgagttcaacctctggtttggcttcagctccgatgagtcaccgcactacttggctgcttctaacctctctgccatggactcccagccacagttagtgggtcgttgggaggagctttacctgccagaggatttgaaggaatgcaaaaaccctcaacttgtcaacctcggctctggcaggttctgcatcacaaggttcttccactctaggagtcacaacagtgactctcggggtgatgttgaccagaatgttgctgtctttaccggtgtggaggtgaagccatgtttccaggatgccaatggcggcagtgggaaagtggaactccaaatgatcccacacaaatcattatttcacaagtctaatcacactaccatcgatgctgtgttctgaacatttttgacgcactattttgaaaactccctgttttattgctataattttggttgttacttctgggtctgaaaaatatataattttggtcgttggcagtgtaggaggtaactcagcgtcttcgtctaatatgtagtgtagtgttgtatccgaagttatgtcgccttctcttgggcttatttggagagctactccttgtttacattaagcagcatcgtaaactgttaagcgatctattttttaagaaaactttatatttagaaatttctttaaataatcaaatagatctcattttc

SEQ ID NO: 20380 - DNA, 997 bp, Oryza sativa
  ref <308>: DATABASE ACCESSION NUMBER: AK070701
  ref <309>: DATABASE ENTRY DATE: 2001-12-06
gagccatggagataggaaatttgtgcatgcaatgcaatgcaatgcacgtacccctttgatttgatttgatttgattgaattaatttgagtccgatctgatccgtgcatgcatgtatattcaatatataattcatctgccggattaattgcaatgaattgaattgaagatcgatcaagatcaatagtaatcgatgggaggaatggattgctcaatgacaagcagcatattgtcggcgaattacaacaccatcctgttcgagttcggcgtgatcctggtgaccagcctgttcgagtcgtccaagagtagccgccgtgcgggggcgtcgtcctcctcctcggcgtcgtcagtgctggggcaggaggaggtgcaggcgcaggtggacgacaagttcttcgcggagttctaccggaagcacgtggccggcagcaaggccatcgggtacatggagaagcacgtcggcgacgggacggagctggtggcggtgctgcgggcgctgcaggcggagtaccgtctgttcgtcgtcggccggggccgcgaccgccggtctgtgctgacggagggtttggaggagtgggcggagtgccttgagctgggccccgtcggcgacatcctcgcctcctccgatttctcctccaccgcctccgtcctcatcgtccagcagtacgacgccaagaagcactacaaggtcatcgacgaggagttcatgcctttgtaattctttcccatatactccttctattttcattacccctacctccctcttcctcttcattagcttattactaattgcaacccatatacttacctaacttacatttatatatgcctgtttttggaggagtaaatgtaattagaagattaaatacttccagttaagcaaacctagctcgatcccttgtatacatacaaaagagtcgtacatatgtcatacctagagaaggtggcaaagttcatcattttcaagtttgaatagagggccttaattcagagttgtgc

SEQ ID NO: 20381 - DNA, 1277 bp, Oryza sativa
  ref <308>: DATABASE ACCESSION NUMBER: AK070702
  ref <309>: DATABASE ENTRY DATE: 2001-12-06
accaaacacagacagagcaatgagcaacattgagtcttctcctgaagggtttaatatgctccgacgcatgtatgaaactgtccaggagcctttcctaaatgcgacaacaatgggtggagaaggcaacacagctccaaacccattctcagctcttcttggaaatcagggttctaaccaaccaagggatcctgctacaaatgctccaaatactggctcagagtctacaacaggaacccctgctccaaacactaatccacttccaaatccttggagctccaatgctggaggtgcgcaaggagcaacacgggcaggttctactggcaatgcaagaaccggggccactgggggccttggagggttggggtcagctgatctgagcagtttatttggtggtcttgccggtaatacaggaactggtgctactggtggtctaggagggttgggttcagcagatttgggaagtttgcttggtggttctcctgattcttcttccttgagccagattttgcaaaaccctgttatgatgcagatgatgcagaatatcatgtctgatccacagtccatgaaccagttgcttaacttcaacccaaatacacgcaacctcatggaatcaaacactcagttgagggaaatgttccaaaatccagaatttattcgccagcttacatccccagaaactatgcagcaattactctcgttccagcagacattattatcacagcttggtcaaaatcaacctaggcaggatggtagccaaggaggcaatgcgacaggcatgcggggaaatgttagcctcgacaccttgatgggcatgcttagtgggcttggtgctggaggtggcataggtgtacccaatacatccaatgttccaccggaagaactgtatgcaacacagctcactcagctccgagagatgggtttcatcgacactgcagagaacatccaggcgctagtcgcaactgctgggaatgtgaatgctgcggtggagcgtcttcttggcaatcttggccagtagctaaagcgtaccagacgctgcccataacgtcaccaactccgctcttttgcaagaggttttttagcccctccaagttcaaacgcagcgtctgtctacagtctcaggagaaaataaaacaaagaaatcccacccccaccattaacttttccatacatggtcgtcatgcctttgtttttaccgtgttgtatttgactatttgggttgatgtacatacatatgaaattatcggatcttaccgcatagaatatgggtctacctttgc

SEQ ID NO: 20382 - DNA, 895 bp, Oryza sativa
  ref <308>: DATABASE ACCESSION NUMBER: AK070703
  ref <309>: DATABASE ENTRY DATE: 2001-12-06
gaaggcaacttcttggaggtcggagaggaggagaggtcgaggagcgaggcgaggatggggcgcaagaggaaggagctgctgtcgtcggcgccgtggaggacgggggaggcggcggaggacgatgacgaggcggcgaggctgtcccgcgagggcaaggtgagcgtcaccagcaaccccggcgagacgcccaccatgcacgtcccgcgcaacaagcgccaggacctcgacctcgccgtcgacgacttagacgaggacgagatcgaccccgagctccgctactccttccagcgcaactccaggtttctgcggagagtatttagtgtggatacacttgtcaagcctcttcctcctgtgatggcatacagtgtttctcgcaatgtgaactttttcttcaagatcttcacacagttctgggatgaagagggaattgccaatgcacagaaatcccttggactggggaatgaggatggctcccggcggcgttgaataccattttgtagcaaaaccaagctatgcattgagagatcttacgctagattctggaggcctttgttgtatgcctcaaatgacacttggtgtggtctgtctaagtttggttctagtgttcgcgtcttgcattttgtgctagtaaagttggttgcgtcatatattcagatgttgtaagcttcgagacttgtactcagaaatctcgttctggcttctgtttaaaaagttgaaaaggggaaataatggcgtgtagttcatttcctattatgatttctgaatcagtttttttttatcaatctgaatttagatgtcatattttacaatcttcagtttctgctgatccttcatgtcagtttgctcactgggcatgttatttttggacgtcaatataaaaaaattgctaatagtg

SEQ ID NO: 20383 - DNA, 2476 bp, Oryza sativa
  ref <308>: DATABASE ACCESSION NUMBER: AK070704
  ref <309>: DATABASE ENTRY DATE: 2001-12-06
gcctagcttctcacctcaccttcgaaatccggcggcggcgatggcggcggcggctacggcgaggtccggattccggcgcatgttctccatctcggccttctccccgcccaagccgcccaccccgcccccgaaggccgacccctcccccaacctcttcatctcaggcttaagcaagcgtacaacaacagatgggcttaaagaagcttttgcaaagtttggggaagtcatacatgctcgagttgtcacagatcgtgtcactggattctctaaggggtttggcttcgtaaggtatgctacagttgaggatgcagctaaaggaatagaaggaatggatggaaaggtatgtttcatactttcatatcatttttgttgttaggatttgttgttttttcctcaattctcttgtgttgaactctcactgtttatataatgatcagttcccatgatgcaataagcagaatatatgaccttacctctctacttgttatgcctcattttaaaaattttaatacaagaactgcctaatttcactggctgccactggaaaggcggaaacagtaagaaagctagttttgtattggagcataggcagttaatatatacacagaattgatttgattatgtggaattcagagaaagcaggacaagttggagaggtaggtagagcccagggagcctgcttaggcaccctttgtcaacagactatttcaaactaaatatgttgtagaattattcaggtatctcattttgacagtaccgaagtatagatatttgcatcctagttgaccagaaactgtgagcgtatgttcgttgtgcaatactatagtagtactatttaataacttggacatgctatggggtggacatcataggcatcacatttttctggacattttatcctgagattgaaattgagagcatcgtggtcactcaggtttactctttgtgttttgcacaagcagacagggcatgtgttaccacttttcaagttcatgtgtaagttttttttattatgatattggtagcacaatttgctaactacctaaggtctcaccacaattcaactctgatatattttgcacacattctttcttgttgtgctcatctctgaagaacaaaaatgcaaaaaaaaatgttcattattttaaaaataattatgtgtgaataatccagaattactatgtgcaagattcttaagaacacagatatcagcctcatgcactcatttcatatagcttgtattgtgctagatgctggatatcttgataaatttctgtggtaatttttaaggtatacgctaaccttttaatgctcaagtataatagttacattgttttcttacatgttatcgctgtgacttgtgacttgtgttgcttcgttgcaactggcaaatcatgaaccgtactcagacatgcttggactgatttcttcaacaaaaatcgtgaactggtggttctgcactgtctttagaatcttaatacaaatttgcattctggtatcttgtttttatttttgctttatatttagatactaaaatattttactctgtatgtttcctcattagcaatgatactccatatttttcttaattcattcttgaattcttgtggcaccaaagcaatacttcacacataatgtaagaaaattacgtatgtgatacactaactattgcccacatgaccctcatgctataatttatgctttcttgaatggctgagctctcaattatttatttattttttcagtctactaatttctaccatagtgaaaataaaatgaagcgtttatttggtgtggttaggtactctgaaagcaactggtgaaaatatcattgaccattttgggcttctttttagagcctttgctgcagtatatcataatgcacaggttttttctgatatatctctgcttctatgcagtttctcgatggatgggttatttttgctgaatatgctagacccagaacaccaccgcagcaaccagaaatgaactcacagccacaacaatcatggggccctccatccagttcctggggtgcacagtagatgaagatacaatcttggggccctctatctggccgtggggctcacagcggatcgacaagttattgattctatatttagtttatcgctataccatattgttccaggtgtgaacagagtttccgatccaatattcttatcgtgttggagtggtcgtttgcttgcatcccatggtttccgcatggagaagcacttgtcaaactgaatatggaccaaacaatattactatcaacgcgcaacaggacacgaacagcttcaaacctttgctaataatgacccccatgtcttgcttgtcctgactcatgaggtgctggttgtgttggagtcaccctttcatttgaattgtcgtagcccttatcagctggtggcatgtgctgctcatgtactggataatgactcgttgctcagaataacacgtttatacatgacaaggt

SEQ ID NO: 20384 - DNA, 1571 bp, Oryza sativa
  ref <308>: DATABASE ACCESSION NUMBER: AK070705
  ref <309>: DATABASE ENTRY DATE: 2001-12-06
gtcgtatccaaactctcctttaccccaatctcgtgagcggcgacgaactttgccaccgatttcgatccttttttttggcagcgtgtagtgacgcgagagagaaatggcgagcaagaggagcgtgggcaccctgacggagtcggatctgaaggggaagaaggtgttcctccgcgccgatctgaacgtgccgctggatgacagccagaagatcaccgacgacacccgcatccgcgcgtcggttcccaccatcaagttcttgatggggaagggcgccaaggtcatcctggccagccatctgggtcgcccaaaaggtgtaaccccgaagtacagcttgaagcctcttgttccgcgcttgtctgagcttcttggtgttgatgttgtgatggccaatgactgcatcggtgaggaagtccagaaattggctgccactttaccagatggtggtgttctgcttctagaaaatgttcggttctacaaggaggaagagaaaaatgaccctgaattcgccaataagctggcatctgttgctgacctttatgtaaatgatgcctttggcacagcacacagagctcatgcttcaacagagggagttacgaagtatttgagaccttctgttgctggtttcctcatgcagaaggaacttgactatcttgttggagctgttgccaaccccaaaaaaccatttgctgccattgttggtggatccaaggtgtcaacaaagattggggtgattgagagtcttttggcaaaggttgacatcctcatactgggtggtggtatgatctatacattttacaaggctcagggatacgctgttggaaaatctcttgtggaggaagacaagctcgaattggctacctcgcttattgaaaaagccaagtcaaagggagtctccctattgcttccaactgatattgtagtagctgataagtttgctgcggatgcagagagcaagactgttccagcatctgctatccctgatggttggatgggccttgatattggcccagactccatcaagactttcagtgaaactttggatactaccaagactgtcatctggaatgggcctatgggagtgttcgagtttgagaaattcgctgctggcactgatgcaattgccaagaaattggctgatatcaccgccaaaggtgttacaacgatcattggaggtggcgattctgttgctgctgtcgagaaggccgggttggcggacaagatgagccacatttcaacgggaggtggcgcgagcttggaactgttggaaggcaagaccctcccaggagtccttgctcttaatgacgcataagactggtggcaagcatatgacgcaatttccctagccttttgcggtggtcttgttcggaccttggtgtaagtttgtaagaatgcaaagtcagtcgtctgctacctttgaacttgaaataggcttcgcttcaggtattgctagatgacagtgaataataataagcttttggcgtcctcggcatgagagaaatgcccggcacaaacaaactataatggtgtactatattttgccatattctagttgcagcagtttacactaagct

SEQ ID NO: 20385 - DNA, 740 bp, Oryza sativa
  ref <308>: DATABASE ACCESSION NUMBER: AK070706
  ref <309>: DATABASE ENTRY DATE: 2001-12-06
gaccaccactacttcttagatcatcatcatcatcatctcaatcttgtcgagaggtggatcgattgattggtttgcgtttaattaattgttggtttggtcgatggaggcaagatcgatggacaggctgagcgtgcaccacaacggcggcggcatctcgaagccgtgccacggcggcgggaagggcggcggcggcggcgggaaggggtgcaggagctcaccggccgcgactccaacgtcgccgaccacgacctcgaccatcaccaccaccaccaccagcagcagcgctaccactccttctcctcctcctcgttcggccgcgcgtcgatgatgatgccggcggctgcggcaggcggcgtcgtcccccgttccagcatgccgcccacgatggcgaccgcgaacgccgccggcgcggggcggatgatgatggcgacggcggatgccaccggtggtggcgccgccggcgtcatggccacgggcgcccatgccgttccagagcgtgtacgaccatgggagcttgctatacggtcaagactactggtaggctggtagctagctacatcgatcggagctccgtttccttctacatgccacaccaccatggatacgagtatatataccgtatatatactgctttctgctgtgcatgtacgcttgcttctgccttagttattggttcgatcatcttgtacttcccttgtacgatcatactaatatgttgttaatatagaggagaggtttgt

SEQ ID NO: 20386 - DNA, 1745 bp, Oryza sativa
  ref <308>: DATABASE ACCESSION NUMBER: AK070707
  ref <309>: DATABASE ENTRY DATE: 2001-12-06
ctctctgaacagctgggtcagctgcacacatagaaccagagagagagagagagagagagagagagagagagagagagagagagaaggcataggtccactccaccactccgcagacgcacacagaggaagagggagggaaggagagggagagctgaagaaggcatggaggagcaaaagcacacagacaaggtatgtttccagaacctaatctccacagtcctgactccctgatgataaaatctatcttcttggataaatgctagaacaatcaatgtggaaaatcccatatttcaatctatatcaacctcatagttcagttaaaaaaagaaaatcttctgagacattcatgacattttctttcttgatatctggtctgagtaacgttggtaacacgaaatacatctaagtaaaaacaatccagtgcaggggctataagcaaacaacattttttcaatacctgttgatccaacaaaggattatgctttttaaacacaatataatttttataaatatgtgagaaaagccatgacttactgttttttcgaagctctgaaagaaatcaggtaaaaccagccagtttctggtcagattaccgatcaattatgcaagtaggcattggatgcctatactccacttggatttgaactgtacagtaacgaaaccttgcaaatattccatcctcaccttcttgtccacctcttgcaaaaggcaaaggcaaagctcagcatgttgaaatcaaaggtgatctgctgcaagctctacatttctgaaagccagaatgccaaggttgttgatgcaatcactcgcattggccagaaagaccctgaggttgttttgctcagcaagttcgaagatgaccactacaaccgtgtccgttacacgcttgcgtcttatatcatcaacgagaactcaactggtgaagtgaaatttagcccgatgaggcgagtattgttggagatgattgagaaagcgttttcaaccataaaccttgaaacgcacactggaactcacccaaggattggagtcattgatgacatgtccttccaccccttgaatcaagccacaatggaagatgctgctcaactggctaagactgtggcctctgacattggcaacttcttacaagtcccagtattcttgtatggagcagcacaccccactggtaaacctgtgactgcagtacggcgtgaactgggctacttccagccaaattacatgggcatccaatggatgggtcaggtactccctgatattctgccggtgaagccagatgagggcccagatcatgtttctcgtgaaagaggtgccataatgatcggtgctgcacctttacccctgaactataatgtgccggtactatcgaaggatatcccaaccataagaaggatcacccgaagggtgactggtcgtggtggaggactcccgacagtgcaagcgcttgccctttcccatggtgatgactgcacagagattgcatgcttcctggatccagatcatgtcagtgccgatcaggttcagcagcaggtggaacagatagcagcagagcaaggacttgaggttgaaaaggggtacttcactgacttctcaaaggatgcaatgcttgaaaaatacttcaagattgtgttgtctgttgattaacatgtgcatagtcttctatggccaaatgtcacgcatgcgttattgtttttgcacagatgattcatacctgtgtaatgatgcatgaaaaacaataaccaattttatct

SEQ ID NO: 20387 - DNA, 1164 bp, Oryza sativa
  ref <308>: DATABASE ACCESSION NUMBER: AK070708
  ref <309>: DATABASE ENTRY DATE: 2001-12-06
gattttcgccacagccgccgcctttctcgtcgccacctctaccaccgtcgtcgccgccgccttagccgccgccgccgttttcgcccctgttggccgccgttcccccgcctttccgccgccgcctctgccgcctccgcctcaaccgccgcctcctccttagtctcctgccgcagccatccctccgttcgccggcgatttgccggccgggttaggccgtcaccccccactcctcattggagtcggaggccggccggacccggatgcagttccccatgaccccatttgctagggtccggctaggagatccgtggggaacgacaatcgtggcgcggaggacgggacggcgcgcagcggcggcaccggcgtatgggcgcgacgaaggaggagtgaagagcggcggttcccccctgcgcatggcaagtgtcccggtccggccgtagcccggcggctcgggagtggggaagcgacttcggcgtggtggcagtggaggtggctgagcggctaccggtggcgtgggagttgggaatcagcgtcgtcgtgggggcggtgtcggggatgtcggagacagcgacgaacggagccggcgacgactccatctccagtgggagggtgcaaagctcgccaccgggagaggccaccgccgtccatccatgggtggtacaatactgtaccccctggacttggacgcggttaggaggtccggcgttcatcgaggcagttattggaggagaaggtgcagcgatcggtggagaaggagtaggcgcgtcagggaccagcggggcaggcacgatcggagtggcagacatacggcggcgagggtagtggcgccggccaccaacccccaccatgagatcccggcgcgtcctccttgtcgatcgtcgatgaagatggcaaagacggcgtgcgtgatcatggcgagggatgccgagaatggcatcgaggatggaaataaaggtagacataccttctgttcttcgcttttcctgtagatcaaaaaagcgaggtttcttccttctttctttcacttcgagatctccttcgcgagagcgaaagttctgataacgtgttgaaagtgtataagattgattgagcgagagggattgagtgagagagagaattgcacacaagaatatagagaatgaatgagcggaatctttattgacc

SEQ ID NO: 20388 - DNA, 2180 bp, Oryza sativa
  ref <308>: DATABASE ACCESSION NUMBER: AK070709
  ref <309>: DATABASE ENTRY DATE: 2001-12-06
gattcgaagctggttctgttccttacttcttcctcttagttcctgttttttgtggagacggttgcgcggccaacccttaccgagacgtggttttactgctcgccgagccatccgcgttgcccccttccacttctcggcatccgctcgtcgtcgtcctctccgcatccgcatctcttcccaatttgtttgttcccctttatgttcttcactgtggctgcacgtacaacaagcttgaatagcatcacatactccccatcccgtcctcagcatcggcgtgccgcatggcatcgcagcgtcgccttcttcttcggcatcaaggtcgactcggtggctcactgctagcacagatggcgggcggggagtggatctttcaattcttcctcagcgacttgcccgacggtgttgctagctgacacaaccatttcctcaatggcagaaatcggcgtacggtctacctgtcctcctccgatgtttgtttgggaagttcgttcaaagattcagatagaacccagcacatttccgaatattggtgcctccagatttctctctctatttcttttttaaatgttgccttctgataattcgaactctgcgccaattcctcttatggaaagagagtcgatgtgatgtcatgaggcaaaacatgaactggtgagcttccctgaaacctgttgattccctggcaacattgatgttttattaggatgaattctcacattaatagcttccttccattagggctttcaatgttctaaacttttttttagagaaatcatgttctaaacttttgattggtgaaagaagttacaattactaaggagctctcatcctctcctgcgaatgagattctattcatttttctgttcctgtactttaagcatgtcagtatgccactacttcattgtccaaaactgagctccaaagaaaggtcaaagtggccagcttaggattaaaacaagtttagcagaatcttcttacacaaattatttggtgtttttcagcatacaggtaaacagacggctagacttcatgatacatgctaatgttgggaggggcaagccactatgctcagctcatggatcttcaggaacggagctgccagcatattactgacaaacaaatacaaggtggctactccttgatgggttgcattaaagatattccgaccctaaaaggagataactacgcagaatggaaaagaaaactcgaccttgcttttatcttgggagaggtggactgggtattgactaccccatgtcctatagaacctgctgaccttgtcagaggtgaaaatgagtcagatgctgactggcaaaagagacagagggacaatgctcctctcgtcatgtcgtatgacattgaacaaaagaaatggtccttagccaacaagaaatgtttggctgtggtaaagaatacgattgagcctaccatattgggctcgatcccagagtgtgacgctgtctcagagtaccttgaaagaataaagagtcagtttactggctcttcaaagacttatgctacacagctgatcaagcagcttgtgacagaaaggtacaatggaggtggtgttagagaccacatacttagaatgagcaacatggcttccaagttgaagccaatggatttgggcataacagatgactttctggtccatctggttatggcctcattgccaaagcagtttgacaattttattgtcaactacaacataagtccagagaaatggaactttgagaagctcattgctaattgtgtgcaagaggaggagagaatcaaagaatcaaatggtggttcaataaactatgttaaagataagaaaaagaaccacaagtctcccacctcaaaaggtaaacagtctcagcatctgcctcagcaacaacagttcgctgttgagaaagatcaatgtctccactgcaagaagacaggacactacaagaaagattgtcctgattttttgaaaatgatcatggcaaagaaagattctcctcaaggactgcgacaagattgaagctcatgcttagcaggaaaaccattttttttttacggaaagcaggaaaaccatttgaaatacctatggaaatatccctacacatgtgttaaccatgatgatctttttcttttcgaaatactgtaaggcaggtatatccatcatctttgtcatctacaactgccttagctat

SEQ ID NO: 20389 - DNA, 1130 bp, Oryza sativa
  ref <308>: DATABASE ACCESSION NUMBER: AK070710
  ref <309>: DATABASE ENTRY DATE: 2001-12-06
gattcctcattttcccttttcttccttccttcccctctttggcttctctcctggcctctcctctcctctcctctcgtcgttgcacccacctcctctcccaagatctcacctttccaccccctccgcccccgcctcgatccggcaatggcttcccccggaccggccaccgccggcgagctcctccgcatcgaccccgtcgaactccgcttccccttcgagttgaagaagcagatctcgtgctcgatgcagctatcgaatctcagcgacgactacatcgccttcaaggtgaaaactacaagcccaaagaagtattcggtgcggcctaacacaggggttgtcttgccacggtctacctgcgatgttgttgtgacaatgcaagcacagcgggaagccccgcctgacatgcagtgcaaagataagttcctagtccagagcgtcattgcaccttccggtgtaactgtgaaggatatcacgggagaaatgtttacgaaggagtccggaaataaggttgaagaggtaaaattgcgagtgacctatattgctcctccacagccaccatctcctgttcccgaggaatcagaagaaggttccccatcaagggtttctgagtcagaaaatggagacagtcttggtgggggtttcactagagcactgagagaacgcattgagcctcaagaaaattcattagaggctggagctttgattaacaaattgaatgaagagaagaactctgcaattcaacagaaccataaaattagacaggaactggatatgatgagacgggagataagcaagaagcgcggagggttctccttcataatcgtcataattgtcgccttgatcgggatcttcttgggctatatgatgaagtcataattctttgagtcgacatcgaagggaactggaccccacattcatgccaagttattcttgggaggcaaagagaccgtcatgaagttctcctttctgttttgtcaatataggagtgttgcgtacgtgggaaaatcttcaaccagattaagcttgttttcttttgcagtttgttgtttgttgtattgggtgagttgtgcacttctgacactgtaacttggaaatgcattaatcgcttctgttgacagtttatcttgcct

SEQ ID NO: 20390 - DNA, 1250 bp, Oryza sativa
  ref <308>: DATABASE ACCESSION NUMBER: AK070711
  ref <309>: DATABASE ENTRY DATE: 2001-12-06
gatcgggcacacgcgtagcgagacgaggggaaaaaaaaatcaatcaaaccctaatcagatcagggagaggcgagggctagggtttcgactcctcggcgggcgatccatggcggcggcggcgaggcatcgggggacggtgaagtggttcaacgacaccaaggggttcggcttcatctcccccgacgacggcagcgaggatctcttcgtccaccagtcctccatcaaggccgacggcttccgctccctcgccgagggcgagcaggtcgagttcgccatctccgagagcgaggacggccgcaccaagtccgtcgacgtcaccggccccgacggatccttcgtcaagggcggcgccggcggcggcggcggtggcgggggaggcttcggatcgcgcggtgggggcggatctggcggtggcggccgcagctatggcggtagctggggcggggggaggagatccggcggtggtggacccggtgggggctgcttcaagtgtggggagtctggccacatggccagggactgcttcaacggcggcggtgtcggcgttggtggaggcggtggcggcggcggcggcgctggtggtggctgcttcaagtgcggcgagatgggccacatggctagggactgcttcaacagcggtggtggtggaggtggtggtggtggcggcggcggcggcggcgcctgctacaactgcggcgagaccggccacctcgcgagggactgctacaacggcggcggtggaggcggaggcgggcgattcggcggtggaggcgaccgctcctgctacaactgcggcgaggctggacacatcgcccgcgactgccacaagtgatggattcacaacaccatctcccccccccctcctcttagatctcgcctaaatcttcatcactcctaagtcgaattattgctttagttttgccgccgatctgggtcacatggagagcgcgttgcctgctataaaggaaccgcttgccttttgtttttacctctttttctttttttgctattgggatttcggtttagttttaacttctgctgctgctgctcgtgtgatgatgcttttgctgctatgagttggtctggtcctctggttcaggttaagaagacgtgatgtctggattggttttgtgtgttgggcgaggagattgacaaaatctctctcctttttgtggtttccccgagatgaaaaagatgattattgtcggttactctataatttttaccaccttgtcgattccatcatcagc

SEQ ID NO: 20391 - DNA, 1780 bp, Oryza sativa
  ref <308>: DATABASE ACCESSION NUMBER: AK070712
  ref <309>: DATABASE ENTRY DATE: 2001-12-06
gattttctcaggtggttttctggttcagtggagaaaaaaaaaggttagaattagacttctttggaaggttctagaggtttctagataccgccgtcccggggggtgatggcgatccccagaaggtcggcggccgccgtcgctgccgtggtggcgctcgcgtccgtggccgctgtcgccggcgaggtcttcttccaggagaagttcgacgatggatgggaggatcggtgggtcaaatctgagtggaagaaggatgacaacagggccggcgaatggaaccacacctccggcaagtggtacggcgacgccgacgacaagggtatccagacgtcagaggactacagattctacgccatttcggccaagtaccctgagttcagcagcaaggacaagaccctcgtgctgcagttctcggtgaagcacgagcagaagctcgactgcggcggcggctacgtgaaattgctcggtggcgacgttgaccagaagaagtttggtggcgagacgccgtacagcatcatgtttggaccagatatctgcgggtatgccaccaagaaggttcacgctatccttacaaagaacggcaagaaccatctaatcaagaaggacgtgccatgcaagaccgatcaactgacgcacgtctacaccttgatcatccgtcctgacgccaaatacagcattctgatcgataacactgagaagcaaactggaagcatctatgatgattggaacattattcctccaaagaataagagggatcctgaagccaagaagccagaagactgggacgacaatgaatacattcctgatcctgaggacaagaagcctgagggctatgatgatatccctaaggaaattactgacccagaagcaactaagcctgaggactgggatgatgaggaagatggagaatggacagctccaaccattccaaaccctgagtacaagggaccatggaaccaaaagaaacttaagaaccctaattacaagggcaaatggaaggcaccattgatccccaacccagattacaaggatgatccttacatctacgcttttgatagtttgaaccacattggcattgagctgtggcaggttaagtcgggaactttgtttgacaacattcttatcactgatgaccctgagtatgccaagaaatttgcagaagaaacctgggccaagcataaagatgctgagaaagccgcctttgatgaagctgagaagaagaggcttgaggaggaatctgcaaactctaaaatcgacgacagcgacgacgacgctagtgatgatgaggatgaggcggacgatgacaaggctgatgtcgttgctgagcagaccaaggacaagggtgatgagaaaccgcaggacatcaaggtctctgctgatgagaagccaaagagcagcaaggatgattcttccgctgcgaagaaggacgagctttagatattttattattattagatgataatatgtcatgacgaagaggcaactgaatcaggtgttggtgctaaatatttcctaagcaggggatcagagaagaggagcagagaagcttgtgctagttttaactggtttctttacttgcttgcttgagggctgaacagtacacttgcttgtacgttgggcagcacaccatcatcagtctatacacatgcactggctttctatttataggcttgataaaccgatatgtaagaagcttcaggacctagctagagacttgtagtactactacattgtcaaacttcactggtactagtactactgtaaaatcacatcatgcatgtct

SEQ ID NO: 20392 - DNA, 1148 bp, Oryza sativa
  ref <308>: DATABASE ACCESSION NUMBER: AK070713
  ref <309>: DATABASE ENTRY DATE: 2001-12-06
ggagtataccagtaaccaaatcaaaccctagctagctagctagctaagctagcacgcacccatggcgtcgtcttccacctcgagctcgctcgccgcggcagcgatggtggccgtcgtcctcctcctcctgggtgccaccgccacgtccacccaggcggcgcgcctcctcgacgaagaactccccaccgccgccatcccggcgatccccggcgtccccggagtgccggcggtcggccccgggatcccggtgatccccggcgtgcccggagtgccggtggttggccccgggatcccgttcgtgccggtgatccccggcgtgccggtgatcgtgccgatcatccccggcgtgccgatgatcgccggcatgacaaccctgccagtgccgccatttgtgccgccgattgatcccggcgccggcgccggattcccaggcgtgccgccggcgtcgtcgaccaccgtgcaggaagacccacagccgccgatgccgtccgtcgttccacccgtgccataggtgttaatcaactccggcgagccaccatgccgtcgttaagttataccgttgctcacgccgccgcgatgtgtgtactccggcggcttaatataacgtgcctccttactgtgtgttaattaagtactcctcctgtctaaaaaaaattaacttctctatgaatttatagacgtagttagaagttgattttttcttggatggtaagagtacatgtgttaccgtgtgttgttacgttaagttggtaatttgtgtactgatgaatcgtgtgtgtatgatgtgcactgtgcagtgcagaccaggtacgtacgtgtgggtcgcgtcacccaatctctgagtgctcgcaaaatttaatgtgcttaatgcacgaattaattatacgtcgaatattataggttttaatttaatcttgtgtaacccactattttatcactgtttgaactttgaatcatacgtgtctatttttgttgggatattagtcttgctaaggtgcataggaatgaaaatcatattagtcatgttttagttagtaaaggccgagttgaggaactactcatttctggccggacaatagctgtactgctatcgcacaactttgtttgtgtcgatgctttgattgaataaagtggtccctgtttcctcc

SEQ ID NO: 20393 - DNA, 2279 bp, Oryza sativa
  ref <308>: DATABASE ACCESSION NUMBER: AK070714
  ref <309>: DATABASE ENTRY DATE: 2001-12-06
gtcgaatgaaacacaattttactgcgtcaatggggtgctggatttttcctcgcttattaaatcttaagtgtataaactaatgtcttttctacaatgggccttgtatgaagtaccgatcttgaaatatagcagtgcctaattggactggaaggtaagttcttcttaattggtgataagttttagtgtctttgttgctaagtcaatgagatgccacatccttgagagtattatgtatggttatattaatacttaatttatacagaataatttgtctataatatttcatgagttataatctcctcgtggtcaattatttttttgtgggaatatttgtcatcttccatataattcagtatcttgccttgctgccttttcaatggcaaaatttattccatgtccatgaattttaaggtttttgcattgtcttaaattacaaatgatgcatatgtttagtttcccatgaaaatgttgttcattcatggattaacaatatggaacatggtgtgcatgatcatcaatgttaactatgaatgaagttagaataaatgatttgactctgcaatggatagcttttgaggatttgtgagatatattcatgttgacataaaaagatagtttagtctcggtggcttgatagttcttcatagttcgtctagaagcagaacttaccttcgtgtatgatagtgtggttggacttcagtacttgatcgttaaaaccttggtgctgtcacatgatcaatgaacaattactgtggtactagtttcaatctttagtcggctagttttttgagttttggtaactgcttactgctagatgagatctgattatgtttcctacataagaagtcagaactgactcatcaaggttcctctcgcttccagtttccatgatttattttgtttgaaggtgccaatttggagttggttgggtatcctaatgcagatacagctaggctttcatcatgggctccacatccttcatccattacatgcacagaagagggatattgaccattatcccttgcccttgcatggtttgtgtagttggtaactggtaaggctgcttattgctgaaatggaaagaaaaaaaaacaatgtggcattgggagactgcaccaaatgtttcattgccatgacaaggatactgcatcaccatgtctaggtttgctgaactaaattgttgccactaatttgcaatagctgaaaaagcagcaagttttctcgcatcacatacgtcagttatttgatgtgttagctttccaactagaatattcaagttggctgacagcctatattgttggagttaaatcatatatgtgagctatgcatgcaattttgctatgtttcttttttttgaattgctgcatgtaatatcaccatggttatgtgatgatgtcataacgtgcaactgtaatcccatttacttcttacttacccattggctctgctaaaggtgatggttctgttgatatatgcattcatcacattgatattttgtgtttgtctattgttcagatcccctggtccttttaaaaattcttgtttagatgtctgaaggaggttgtgaaatgccagtattaattagaatccttttatctaacaatgtttgtgaatgcttaagcataaattatgtttttagtgaatcatggtgccatagcttatatgcaggcttattttgttattgttggtatgctgcaagtatgaagtgaaacactggtcatcctttttaattatcttacaaaaatgcctttattcttctgtgttatatttgtaatttgtaattgtactatttagtattttgtttttgtcatttagtgttcttgttttgtttctaacgttccttcttaaacagacattttcaagacatggggctcaatctggtggatatggtcagcaaaactaccgccctcagggtcatggtgcagcttctcagtggggcccacgttctcaaccccagcctggatatggatatccaccaagagggcctccacctcagaacatgccatactcccaaccttatggtggctacccgcagcagccaccaccaagaggtggcatgggctgggatcagaggcagggccctccaccccatgcttcccaccatggtggcggttacgactactataaacagggttctcaaccatatgaaggccagccaccaaattaccctcctgggcctggaaactacaatagttatgggccatcacagggcccaaattatggacaacctcagtatccgcagtctgcacctccacagaactatgggccgggttatggtg

SEQ ID NO: 20394 - DNA, 934 bp, Oryza sativa
  ref <308>: DATABASE ACCESSION NUMBER: AK099149
  ref <309>: DATABASE ENTRY DATE: 2002-08-28
gttcgcccgccacgtcaccacgccacaccccattcgctcgttaacgggtccgcatcaagatccgctaagacccttcttcttcctctcctccggcgacagagaggccaccggcggcggcggcgggcggagatgttcctggtggactggttctacggggtgctggcgtcgctggggctgtggcagaaggaggccaagatcctcttcctcggcctcgacaacgccggcaagaccacgctcctccacatgctcaaggacgagagattggtgcagcatcaacctacgcagtatccgacttctgaagagctgagcattgggaagatcaagttcaaggcgtttgatttaggaggccatcaaattgctcgccgtgtgtggaaagactactatgctaaggtcgacgcggtggtctacctcgtggatgcctacgacaaggagaggttctccgagtcgaagaaggagctcgacgccctcctctcggacgactccctggccaccgtccccttcctgatcctgggcaacaagatcgacatcccctacgccgcgtcggaggaggagctccgctaccacatggggctgagcaacttcaccaccggcaagggcagggtgagcctcggcgagtccaacgttcgccccctggaggtgttcatgtgcagcatcgtccgcaagatgggctatggggatgggttcaagtgggtgtcacggtacatcaagtagggtgttgttagtttttgctggaaaaatgttgaggtagtcttcatagttcatactcctgtttcaccttaccacagagatgattttaggagggagctagagctatagctagcaatctggtcatggtggttcatggttcttccggtacatatgtggtggaagcagcgaaagactgggatttgtgctagatttttcttcagttaattaaaaagtgtgacttttaaag

SEQ ID NO: 20395 - DNA, 1492 bp, Oryza sativa
  ref <308>: DATABASE ACCESSION NUMBER: AK070715
  ref <309>: DATABASE ENTRY DATE: 2001-12-06
gggagcaatataatctctctctcacagctgcacaagtggtagctagcttactctaattaaccttggttgtaatccatggcgagctgcagcaagtggctggccgggctgatgctgctggcggcggcgctggcgtgctcgctgccggcggcgagccgggcgcagctgcaggtggggttctacaacacgagctgccccaccgccgaggcgctggtccggcaggccgtcgtggccgccgtcgccaacaactccggcctcgccgccggcctcatccgcctccatttccacgactgcttcgtcagggggtgtgatgcatcagtgctgatcttctcgccgaacggcacggcggagcgcgacgcggcgccgaacaaccccagcctccggggtttcgaggtgatcgacgccgccaaggccgccgtcgaggcggcgtgcccgcgcaccgtctcctgcgccgacatcctcgccttcgccgcccgcgacagcgtcaacctcaccggcaactccttctaccaggtccccgccggccgccgcgacggcaacgtctccatcgacaccgacgccttcacgctccccgggccaaacctcacggcgacgcagctcgtcgacggcttcaagctcaggaacctgaccgccgaggagatggtcatcctctccggctcccacaccatcggccgctcgcactgcgcctccttcctcttcaagaaccgtgaacgtttggcgaatgggacgattagcccggcgtaccaggcgctgctggaggcgctgtgcccgccgacgacggggcggttcacgccgatcacgacggagatcgacgtgagcacgccggcgacgctggacaacaactactacaagctgctgccgctcaacctgggcctccacttctccgacgaccagctcatccgcaacgccacgctcctccccttcgtcgacgccttcgccgccaacgagacgctgtggaaggagaagttcgtcgccgccatgatcaagatgggcaacatcgacgtgctcaccggcgcccggggggagatccggctcaactgcagcgccgtcaacccgtcctcgtcgtcgtcgtcgtcctccgccgggaggatgatcgagaccgtcttccccggcgccggcggtgaggtcgccgcgagctaagctatacccttgctgaccatgtaatatacgtcatatatatgatgataatgtaaaattaataatgcatgacacgcacttgcactgtgtgttgtacggccagggcaagtgtggttggttgatgaaggctttgtttgcacctacttgatgtgtgtagtgactctgccatgaacgatgcacgtatacaagtatataattaagatggccggcagctggtaataagtagaacacctaccaagttaccaacttaccatgcatgaataaatgttcatgcataaattacggcgctactcataattcaccaaaaacatacgtgtacatagaaaaaatagatcaatggctattcaaaataagtacg

SEQ ID NO: 20396 - DNA, 1900 bp, Oryza sativa
  ref <308>: DATABASE ACCESSION NUMBER: AK070716
  ref <309>: DATABASE ENTRY DATE: 2001-12-06
gatagccatagctcatcatccaccctctcttccttccttccttccttccttccacacagaccagaccaggcatcccgacactacacgcagactctcgactttgtcactagcatcattgcttgatgatcgatgctgagctgcaaccaagcaccagcatatcctttccttcattccttcctggtgctggtagaagaagaacaagctagctagagtgataagagctagctaccttgcagatcgatctccggccagcgattgatcccatccagtataataatggcggccatcacgctcctacgttcagcgtctcttccgggcctctccgacgccctcgcccgggacgctgctgccgtccaacatgtctgctcctcctacctgcccaacaacaaggagaagaagaggaggtggatcctctgctcgctcaagtacgcctgccttggcgtcgaccctgccccgggcgagattgcccggacctcgccggtgtactccagcctcaccgtcacccctgctggagaggccgtcatctcctcggagcagaaggtgtacgacgtcgtcctcaagcaggcagcattgctcaaacgccacctgcgcccacaaccacacaccattcccatcgttcccaaggacctggacctgccaagaaacggcctcaagcaggcctatcatcgctgcggagagatctgcgaggagtatgccaagaccttttaccttggaactatgctcatgacggaggaccgacggcgcgccatatgggccatctatgtgtggtgtaggaggacagatgagcttgtagatggaccaaatgcctcgcacatcacaccgtcagccctggaccggtgggagaagaggcttgatgatctcttcaccggacgcccctacgacatgcttgatgctgcactttctgataccatctccaagtttcctatagatattcagcctttcagggacatgatagaagggatgcggtcagacctcagaaagactagatacaagaacttcgacgagctctacatgtactgctactatgttgctggaactgtggggctaatgagtgttcctgtgatgggtattgcacccgagtcgaaggcaacaactgaaagtgtgtacagtgctgctttggctctcggcattgcaaaccagctcacaaatatactccgtgacgttggagaggacgcgagaagagggaggatatatttaccacaagatgaacttgcagaggcagggctctctgatgaggacatcttcaatggcgttgtgactaacaaatggagaagcttcatgaagagacagatcaagagagctaggatgttttttgaggaggcagagagaggggtgaccgagctcagccaggcaagccggtggccggtctgggcgtctctgttgttataccggcaaatccttgacgagatagaagcaaacgattacaacaacttcacaaagagggcgtacgttgggaaggcgaagaaattgctagcgcttccagttgcatatggtagatcattgctgatgccctactcactgagaaatagccagaagtaggaggcgggaagaggagataaagggaagatgatgagcaggttaggcttagataggaaaaatcagacagcatctgccttccgattaatgttgaggaaattatattattgtgtgtatcatacatagcatgtatagggaaaatgctgcaggcaggcaggcaggctaggtgatggttgaatatttccttcacatcatgtatgtatatccttccttgatgctacagcacatatgtatgtatgactctgaagaaagagcaacctgtatagtagctaaccggctatggcctatgtatgggccgcagaggtgagcaaacaaaaatcatcatccatggattgattgattgattgattgatacagtactacc

SEQ ID NO: 20397 - DNA, 2475 bp, Oryza sativa
  ref <308>: DATABASE ACCESSION NUMBER: AK070717
  ref <309>: DATABASE ENTRY DATE: 2001-12-06
ggatttcactccgcttcttcttcttcttcctcctccttgattgagttgtttgctcgatcgatggattgattgtcactgtctgtttagcaatcaagctagctacgaacaggagtgtagtactaatctgcatcgatcagtgcctctaatcttcttcttcttctcttgtaaccagcagcagaagcaagcaatccccctctcctctctgagagagatggcgtttggcagccacacgcgcctggatgtgaggcgggcgcagcagcactcctcattctgctccccctcctccgccgccgccgtcttggtggcgctggccttggtcgccgtctggatggcctcttccacgctcgtcacccccgcggatttctcccccttccgccccacaaccacaaccacaaccacaaccgctcgacctcggaatcggatggatcctgtgactgttgaagaggacgccgacgaccctcctccactcacactcagacagactgagaccggacccggaggggataatggctcccactcccactccccctccctggagaccgctacagaggcagaccctcaagctgcacagtccaacagcaacaccaaggacactccccacaataagcagcagcagcagcagactgcgtcgcccacccccagcagctatgcttggaagctctgcaatactgaggctggtccagattacatcccatgcctcgacaatctccaagccatccgcaaccttcggacgaccaagcactatgaacaccgagaaaggcattgcccccaacaccctcctacctgccttgtccctcttccaaagggctacacaaatccaattaggtggcctaacagcagagatcagatatggtacaacaatgtcccgcatactaagctggtagaatacaagggtcatcagaactgggttaaggtctccggggagtacctcaccttccgggaggaggaactcagttcaaacatggcgcattgcactacattgatttcattcaggaggcaaagaaggatatagcatgggggaaacaaactcgtgtggttttagatgttggttgcggagttgccagctttggaggatatttatttgatagagatgttcttactatgtcgtttgcacctaaagatgagcatgaagcccaggtgcagtttgctcttgagagaggaatccctgctatgtcagcagttatgggtacaaaaaggcttccattccccggcagggtcttcgacgttgttcattgtgcacgctgtagggtaccatggcatattgaaggtggtaagctcttgctagaactggatagactgttgcgtcctggtggctactttgtgtggtctgccactcctgtgtaccagaagctgccagaagatgttgaaatatgggaagcaatgtctactctaacaaggtcgatgtgttgggaaatggtcaataaagtgaaggatagggtaaatagagtgggtatagcaattttcagaaagccaacggataatagctgttatgaggcaagatcagcagcaaaccctccaatctgtggagagtatgatgatcctgatgctgcctggaacatatcattgcagtcatgcgtgcataggttgcccactgatcctgccatccgtggttcacagtggccggtggaatggccattgaggttggagaaaccaccttactggctgaaaaactctgaggctggtgtctatgggaagcctgccactgaggattttcaagcagactatgagcactggaagcaggtcataagcaattcatatatgaatgacttgggcattgattggtcagctgttagaaatgttatggacatgaaagccgcatatggagggtttgcggcagctttgcgagatctgaagctgtgggttatgaatgttattccaattgattcacctgacacacttccaattatatatgagcgtgggttgtttggaatctaccatgattggtgtgagtcatttagcacctaccccagaacctatgatcttctgcacgcgaaccatcttttctccaagattaaaaagagtgacaggtgtaaactagtggcagtgatggtggaggtggatcgaatactgaggccaggaggcagggtaattgttagagatagtatggagacaatgcatgaagtggagtctatggcaaaatcgctacactgggaggtccgcaagtcttactcccaggacaatgaaggtttgctgtttgttgagaagacgatgtggcgaccaaatgaagttgaagctaagctatgacgtaccataccagcaccaccgttatgatagctctgacactgaaacccttggaagaggaaaacaaaagtagccaagtgggggatgcacagtaagctatatatatagtgggtttttgtaggggtatacttggattttgggagaagctgtaatgtgtttttttttttttgcgtgggatgatacattagcaactaatgcatggtgatgatccatgttgaggctggcaagtttaac

SEQ ID NO: 20398 - DNA, 1462 bp, Oryza sativa
  ref <308>: DATABASE ACCESSION NUMBER: AK070718
  ref <309>: DATABASE ENTRY DATE: 2001-12-06
ggtgaggccaaaagcacggtggtgcaaataaatggttcaaggagtaagaacttcagatcagattctagaggaaaaaatgtatcaagccaaagtgtaagatttcagaggagaattaggccatgtcggtatgacatagatcaatttacacctagttttatgtcaatttttgaatctctggtgccctcggatgaagaaatttcaaagcagaagcaattgctggcaacactgagcagattaataaataaggaatggcctaattcaaaactttacctctatggatcgtgtgctaattcatttggtttctcaaatagtgatattgatctttgtctgtctattgacgagaaggaaatgagcaaggttgacattattttgaaactggcacatattctccatgctggtaatctccggaatattcaggcattaactcgggcaagggtcccaatagtgaagcttatggatccaaatacagggctatcttgtgacatatgtgtcaataaccttttagcagttgttaacacaaaacttctaagagattattcacgaattgataaaaggttacggccattagcattcattgtgaagcattgggctaaatctcggtgtgtaaatgaaacttaccaaggaacactttctagttatgcctatgtgataatgtgcatccactacttacagtcacagagaatactcccatgtctacaggaaatggagccgacctattatgtcactgttgataataatatttgtgcatactttgatcaagtggacaaattaaatggctttggcgctcaatgcaaagacactttatcaaggttgctttggggcttttttcgttactgggcatatgcccataattacacaaaggatgtaatatcaattcggactggaagaaccattagtaagaatatgaaggattggacaagaagaattggaaatgacaggcatctcatttgcattgaagatccttttgagacctcccatgatcttggtcgtgttgttgacaatagatcgatctgggcactccgagaggaatttgagcgagctgcggagatattgcaccttgacccaaaccccagcatcacactttttgagccttatgtgccctctgaagctgaaacatgataccacaaaatcatcatcatcatgttctgctgtgtcaagaagcccttcagttccaaaggaatcttgtcaaagcttatgtcgtactatgtgcatagcttagctgtaccatgtatacttaagttgtaaagtaactaggggcctcagcagtaggtggtgacagcacgcttctgctaagtggtaattgggggaagccagcaatatttaatcagatttctagtgctatcaattcttatttagaaagggagatgtttgaactagacactactgtccgatatttcatgatagtttagcgtgcagtagtttttttccctaatgagaagaataataaagttgctttaagccc

SEQ ID NO: 20399 - DNA, 1347 bp, Oryza sativa
  misc_feature (711)..(711): "n"=any one base of a, t, c, or g
  ref <308>: DATABASE ACCESSION NUMBER: AK070719
  ref <309>: DATABASE ENTRY DATE: 2001-12-06
ggcgtgtgctctctctcctctgatactgcagaggcgagctgtgctgggcgggagcttacttggcgagatgaagaggaggcattggagccacccgtcgtgcggcctcctcctgctcgtcgccgtcttctgccttctcctcgtcttccgctgctcccagctgcgccattccggcgatggcgccgcggccgccgcgccggatggtggtgcgggacggaacgatggtgatgacgttgacgagaggcttgtggagctcgcggccgtggacccggcggcgatggcggtgctgcaggcggcaaagaggctgctcgaagggaacctggcgagggcgccggagaggcaccgcgacgtcgcgctccgggggctgagggagtgggtcggcaagcaggagcggttcgaccccggcgtgatgtccgagctcgtggaactcatcaagcgccccatcgatcggtacaacggcgacggtggtggcggcggcgagggggagggccggaggtacgcgtcttgcgcggtggtcgggaacagcgggatcctgctggcggcggagcacggcgagctcatcgacgggcacgagctcgtggtccgcctcacaacgcgccggcgggggacgggtcgtacgcgcgccacgtcggcgcgaggacggcctcgcgttctcaacagcacgtgctgagccagtgcgccgtcccgcgccgcggcgcctgcttctgcagcgcntacggcgagagcgtgcccatcctgacgtacatgtgcaacgccgcgcacttcgtcgagcacgccgtgtgcaacaacgcctcctcctcctcgtcgggcgccgccgacgccaccgcggcggcgccggtgatcgtgacggacccgaggctggacgcgctgtgcgcgcggatcgtcaagtactactcgctgcggcggttcgcgcgggagacggggcggccggcggaggagtgggcgcggcggcacgaggaaggcatgttccactactcgtcggggatgcaggcggtggtggccgcggcgggcgtgtgcgaccgcgtgtcggtgttcgggttcggcaaggacgcgtcggcgcggcaccactaccacacgctgcaacggcgcgagctggaccttcacgactacgaggcggagtacgagttctaccgtgacctcgagtcgcggcccgaggcgatacccttcctgcgccaacgcaactccggcttccgcctgccgcccgtgtcgttctaccgctgacacgccacgcacgcaaccccgcaaacgcatagcatgcataaaattcttttttgtaattagatacgtgttttagtcattgcaacaaagcgaagcaaacgtaaacaacaatccgtgaacatttgggtcgtg

SEQ ID NO: 20400 - DNA, 2111 bp, Oryza sativa
  ref <308>: DATABASE ACCESSION NUMBER: AK070720
  ref <309>: DATABASE ENTRY DATE: 2001-12-06
ggtttttcccctctccccacctccgcgtctcctcaccatggcttccgccttctcccccgccaccgccgcgcccgccgcgtcgccggccctcttctccgcctccacctcccggcctctctccctcaccgccgccgccgctgccgtctcagcccgtatcccgtcacggagagggttccgccgcggccgcttcaccgtctgcaatgtagccgccccctccgccacccagcaggaggctaaggcggcgggcgcgaaggagagccaacggccggtgtatccgttcgcggcgatcgtggggcaggacgagatgaagctgtgcctgctgctcaacgtcatcgaccctaagatcggcggtgtcatgatcatgggagaccgtggcaccggcaaatccaccaccgtccgctcgctcgtcgacctgctcccggatatccgcgtcgttgttggcgaccctttcaattccgaccctgacgatcccgaggtcatgggccctgaggtccgggaacgcgtgctggagggtgagaagcttcctgttgtcacggccaagatcaccatggtagatcttccccttggtgccactgaggatagagtctgtggcaccattgatattgagaaggcgctcaccgatggtgtcaaggcgttcgagcctggtttgcttgccaaggccaacagggggattctttatgtggatgaggtcaatttgttggatgaccatctagtagatgtgcttctggattctgctgcgtcaggatggaacaccgtggagagagagggtatctccatctcccaccctgctcggttcatcctcattgggtctggtaaccccgaggaaggggagctccggccacagctgcttgaccggtttggcatgcacgcgcaggttggtactgtcagggatgctgaactcagggtgaaaattgttgaagagagagctcggttcgacagggatccaaaggcgttccgtgagtcctacttggaggaacaagacaagctccagcagcagatttcatctgctcggagtaaccttggtgctgtgcagattgaccatgatcttcgtgttaagatttctaaagtgtgtgcagagttgaatgttgatggattaagaggggacattgtgactaacagggctgccaaggcgttggcagcactcaaaggcagggacactgtcactgtagaagacattgccactgttatccccaactgcttgaggcatcggcttcggaaggacccacttgaatcaattgactcaggattgctcgtggttgagaagttttatgaagtcttcacctaaattattctggaggtaaatggttttctatcagaaagttcggcaggagggcttttgtttgagtttaatgacattgtttcagaggcttgaacttgatgtctatttgtacatctatcattagtatagattttattccccttcaatcgaaatgcctgctatgagttgcagacggttcgtacatttgaatcttccttgtagtcattgatgcagccaatgattaggaaaggagcatctaagtcaagctaacatcttatatttctttttgaaaaaaaaaaagaatcttgcagcatatatgaacaatctttgaactagtgtccagagataatgtcatgccataaatattctgctgcttttgtcatttctcctagatgaaaggtcctaaaaatagaaaatacaatgctagaaatcttgaatggatcttttgcccaagtaagcttcaatagtaattatctgttggtattttagggaattacattctgtgctactagaagttttcatcatcatttttactcactgtttcaatgaaacaatgtacaatggaggtcctggactcacttgtcattgggtcaatgaggagttttgcaatttcttagtggcatataataagaatagctgaatgcccaggtgttgtgattgaatagaaaaatgaattgaatgtcactttaactatgtgcttacatgtttttaatattggtaaaacattaaacacgtcttgtgcaaacataagggtataagataaagggtgcatcagtccatgggagcatattttcctttttcttgtacatattttctttgtacaaaaatacatgacaacgaaatgttattctcc

SEQ ID NO: 20401 - DNA, 2826 bp, Oryza sativa
  ref <308>: DATABASE ACCESSION NUMBER: AK070722
  ref <309>: DATABASE ENTRY DATE: 2001-12-06
agaagactgtttgatccgagaagactgtttgatcctcatcctcttccagccaaatctcttcgtggcatggcggaagctgcagctgttttcgccgggaaggccgtagtgcagccggccatcacctacctcgtcaaaaagattgtcgatcgcattcccgacggggatctgtgcaagaggctgcagcagaagctgccctttgttgaagcgatcctctacgctgttgatcggcagcagacactgagcaatccaagtttgtctgaggtggtgtggcagctcagggatgccatccaggaggccgaagatgcgctcgatacactggagttcttggacctcaagagcagcgccaataatcgcagcaaggtgagcttatcatcccttttgagtagcatcagcaggaaattcaatgttgctgactccagtagagcaacggagaatctgaaagatgcactcaagaatttagatgcagtccttgacaatgcagggagatccctcccggccatatatcccagctcgtgctctcatggtaaagcgcacatccaagattctgccagcatacaggaggtcacaaaagagttgagaacaactatatttggtcggctcaaggaaaaggatgcaataatcgattggctcggtgttctaactccaaatattagagatcaaaagctctcattgtgtgcaattgttggtgctggtggtatggggaaaacaacacttgcccagtttgtctgtcaagataagaaggttcaagatcattttgctaacaaaatcatatgggcagacgtatctaagatctttgatcctaaagtgttggtgaggaagatctcgggatcattcaacaggtacaaagctagcgctgatggcttggacaccattatgactgacaaatttctactggtcttagacgatgcacgggatgatgcacaaagtgaacgatggcaacaatttttagatctaatcagaaaaaatgccccaatgggaggtaaaatcttgctcacgacccaaataaggccagtggctaatgctgttgaaggccagatgcctccagatacatataaatgtttggagctgggtggtttagatcaagagaacactctgaagctcttcaatcatcatgcgtttggtgacttgagtcccagtgactgcttcgagcttcaattgattggtgaacagattgccagaaaactcaaaggatgccctttgttagcaagaacaattggccggcatctacaaggaaacacagatcatgccagatggaacaccatcttaaatcacgatatccacaaagttgatgatgttgccactgaaatcaagaaagttctcagactgagttacgaaagcctgagtaatgaagtgcaggtttgcttccggtactgcagcatatttccacctcattacaagttcaagatggaagagatggttgagatgtgggtgagttcaggactgatattgcaaagagaggatggcataaataaccgggaagatattgctatacagtacttcaatactctagggaaaaatcattcttttcacttgtacccagagaactgaatgttgatacttctgaagattactatgtcttgcatgatggaatgcatgaattttcatgcactgtctccattggggaatgttcaagattaaaagccactgaccatggaattggcatacctctaacagtgcgacacttgtacgtagaaggcataaatgctgaaactataaatgttatttccaagttcaagtacctgcgcactcttgtcgtagaaaataaggaaaattccatccaggaagaacatgcaaatgctcttaaaaattcaatcgaaggcaggacaagcttgtgactcttaaagctatacggaaatggttggttttgtatgaacgacactattgctgggcttgagcacttgaggtacatctatctgtcagctaccaaggaatctaatctaagtaaattatttaagctctgtcacctggaggtccttcagatcctaaagattgagaaagaaaatgaaagtagatctataagtattaatctacctcacttgcagaaactgcatcttcctaaaactacagtgtccaggatcgctcagattggtagcctgactactcttcgagagttgaatgggttcagtgtgaaaagaacagatggccacaaaataactgagctgaaggatttaaggaagctccaaaaagtcattgtgcttgatgtccaaaatgttattgatcacactgaagcatctgatgctgaactggataagaaatcggatctgaaggtattgtctttggaatggtgtgctgatcaagctagttgtgatggtaggatccttaataagcttgttcctgacagtaatctcaagcatttagttatttctggatataacggcacacgacctccattgtggatggaatctaagtatttttccaatttggtatatctgaagcttgatggatgtgtggaatgggataaacttcctccatttggatatctatggacactaaagcatctgtttttgaagaacctaccgaaattggaatatattgctagttcatcctacagcactgttgtgtatggatacagagacaccagtcctgatgttctgcctcctcatctgatcacttttgttgtgaagaattgcctgggcctgtcagagctacccagtttaccttttagtctgaggtatttggacatagatagagttggaatgtcaagtctgccaaccatgtgtactcatatggggcgaagacgtgtttctttggtggagtcacagctctctattttgaatgttgagtcttgcaatcttctggtttctctaaatgggttcttacaagagg

SEQ ID NO: 20402 - DNA, 1509 bp, Oryza sativa
  ref <308>: DATABASE ACCESSION NUMBER: AK070723
  ref <309>: DATABASE ENTRY DATE: 2001-12-06
gagtccccttctccaaccccgcttcaaatttggatcgcgtcgatttcacgcgccgattcccccaaatcgcacacacccccacccctcgaacgcataaatactgatccccaatcgaaacggctgctgaaaccctagccctagcaatcgagagagagggagaagatggcgcgtccgagaggcaggaagcgtgcggcggcggcggcggcggtggcggaggaggactccagcaagccggaggctgcagaggcgaagaagccggccgcgcgggggcgggggaagcgtgccaaggcgtcacccaagcccaagccggagacggagtacttccccgagaagcggaatctggaggatctttggctatcagcatttccggttgggaccgagtgggaaaacattgataagataaaggagttcaactggaactttgaaaatttggagaaagcactagaagaaggaggggagctttatgggaaaacagtttacttgtttggaagcacggagcctcaactattggaggttaatggtgaatcaaagatagtgcttattcctatagttgttgctgttgactgcccttttcctccctcagacaaaattggcataaattctgtccaaagggaaaatgaagagatagtgccaatgaaggccatgaagatggcctgggtgccttatgttccgctggaggatcggcttagtaggattgacagtttgaaaacaaaaatatttactcttggctgcacccagcggaggtctgcgctgaggcacctcaaaactgagagagtcaaattgtttgactactgcatgccatattatatgccactgaaccctcccgaagacgaagatgatacagttgtcaacatcatatatcccctagaacccccgatagtatgtgacttcgactgggagatggatgattacgaggactttgctgatgagaaagttaaagatgaggtgctaccagaggatgagaaagaaaaatttaaggaattcataaaggagagggttagagaaaggaaaagagagctaaaacaggctaaggaagcaagaaagaaagctattgatgatatggaccctaaggtcaaagaggcatttgaaaatatcaaattttacaaattttatcctgtaaaaactccagacacccctgatgtaagcaacgtaaaggcaaagtacatcaatagatattacaggcatgcacatcatctgatgtaattgcatcctatcttgaaatgagctatccaacttggagagctgacaccgaaattttgaaagccgtgggagagattcctggcgacatcttcaaattgggtctcttatagacccggggtgaaaacttgttgcaccttaactctgtactgcagttttcgtcagatcctgccattccttagagtatcgcttccttcggcattcttttttgttgtgcgtcgtgtaacattctgggaatagattatgtaaccatcaggccgtacatcttgtaagagcaaaacaattggtttaggaaaaatgctgattcctttc

SEQ ID NO: 20403 - DNA, 2384 bp, Oryza sativa
  ref <308>: DATABASE ACCESSION NUMBER: AK070724
  ref <309>: DATABASE ENTRY DATE: 2001-12-06
gactatcgtcggcgcagcgccctcgatctccaccagcgcgccaatgtccgcgccgccgcaacacccaagccagcgacgccaccgatccgcgccgccggaacacccgcgcctctcgctctcgtctgtgccgctccccccaccccctgcgcccgccgtaaacccctaatcctccgcgctcccctcgccctcctcacgatctcctccgcgccacctccattctcctgccagtagccagcctcaaggccctgcgctacccagccgcccgtcgttgccgctcctgctacgtggatctggcggcgggatttgcaacggggacggcgtcgcgccctgctcgtgctggcacagaggttggggagaataggatgtaaaggttccttggctttggtgagttattcaccgtgatgcagctctgtccctggtgcaaatgggaatgggatcgctcagggcagtctaaatcatggaggttgttttgcctgcaggtttctttcttgcgttagattggtgggaccctctccaacgtgtacaggaagctccttcctcttcttggtttatcctcgattggattaaaaatcttagaagaaatgttaattttcagtatttaattaggagctgttttatctggggatcatatcttcatatggccagcgatcatttgttttgatggtttgactttgtttctgctactcaaaattacatgtttgtcgtcatcgggtttgcctgtatatatacgattagctgtgcttctaattccagcccccaacgctacaagagtagtatcagtggaagtgtttccacctccatatatagtttcttatcagtagaattaccgaattacatcagatattatatatatttttatgcgccatattggaaatcttgtttcatggctaatattagcattcttatttttcagatccgataaatttcaggttgcaatttacaaggatctcttttggcaggactaccaagttgcctggaatctggggggaaaagtcaacatttatgcacaacatcggcagcagtgatctgccgtgcatgaccacaccgatcggatacctcctatgcctatatcctgttatttccagttgacgtccgtagttcctcctcatcattgaaggtaaaagaattagcaatatattaaacagtttctttttttcctgaatcataaatctatctcattttatgtcggttgttaaaacatatattttttatttgatttgtattattatatatggtttcatggggagatatggccattctttgtttatgagtttgccaattgattagagctaattcatttggtgccaatcgtctactgaatttttttagcagtatatggattttggggaagaaataaggtcgactgaccactgcttttctgtttattttaatcaagctttcgctgttcataactgcactaatttaatgagatttcaagttggattttttaagcactaagcactaatgggataaatttgtactttcggctctgtacaatgtttatctatcctgtgaaattaatgtatgtgaaattaatgtatgaagtatatttgtgatatagtcaaattgacaaggaaaatcatttaattttgcttgggtagtctggtatgttgtacaatattgtgcataattttttttaatgaatacttgcataaaacagatgttgttatttcagattcagcatatggtatatattacagaatatgtatatagctaagttaaaatttcagaatgtaaatgtgcatacatggaagcacatgataagacagtttaagttataagttaccatggctacgattctgaaagtctaaacctttggattcatcgacaaatgtaactctgaaagtctgaactttggttttaaagtctaaaagtgtgaaattacgaacatgcactagcttatatcgatcgaccgattgaggcatggcccatgctgaccaacggtgttgccgcggccgccatcttcaccgtcaccgacatctcttaggtgaggttccgccatcttcaccatcactgacaaactgatcagttaataaattgttgtcttctccaacaagtacatgatacatctactattctgtactttcgcatagttactctgattctccaattggtttcgattgagtttctatcagttttttctctctctgtcaaaactacaagggaaggccatatatgccatgagactgattgcactgcagaacacgttccttcgtgcccggtagtgcaattttatttctctattgctacgtgtggtgaatgaaaattatggtggaatattctgtttttagatcaatggaagctatatgtagaggtaaaatgtgtaataattgcagcctgttttgttgtaataatttgggagatgaattaagaactgaatttcc

SEQ ID NO: 20404 - DNA, 1156 bp, Oryza sativa
  ref <308>: DATABASE ACCESSION NUMBER: AK070725
  ref <309>: DATABASE ENTRY DATE: 2001-12-06
gattcacattcactcgctgccaaccccaaccaccacccatggcgcctctcctcctcctcttcctcctcggcggcctctgcgccctcttctccctcgcctcctcctcgccagcgaccaagaagtgcggcgatgccaagaagcggagagaggaggagggggaggaggtggtggtggtggccaagaagaggccggaggaggagccgcggcggcctgacccggacgccgacctcgggatcgtgttctccacgttcgaccacgacggcgacggcttcatcacggcggcggagctggaggagtccctgaagcgcctcggcatcgccgtgtcgtccgccgccgaggccgccgccctggtggcccgcgtcgacgccaacagcgacgggctcatcgatatccacgagttccgcgagctctacgactccatccccaagcggcgcaagagccaccagcagcacccgctcccctccaccgccgccgccgacgaggaagccgccgccgctgacgaggagtatgaagcagaggaggaggagagggacctgagggaggcgttcgacgtgttcgacggcaacaaggacggcctcatctccgccgaggagctcggcaccgtgctcgagtccctcggcctccgccagcacggcggccgccccgccgtcgccgagtgccgcgacatgatccgcctcgtcgacagcgacggcgacggcatggtcagcttcgaggagttcaagcgcatgatgaccgtcgtcaaggcctagcaccaaggcgggcaatctccaacttctatcaaattcaaattcaaaaaccaaaattcggagcggattcgcaaaggcaagtaacctcaatttgttcttggacacgacgaggctcgcagatcgatcggcgggagagagaaatcaaagcaaaaaatcaattgtttgtgagtggagttgaagactaaccagcttcttcttctcgctcgctttgtgtttcttcccacctgttcttgatcactttctttggttttttttctctcttttttgcagtctaattaacctcgtaattcagtgcctgttttgactgacaagtttcaaatatatgcatgtaaatattagttcctgctacctactgtcaggttattaatttgtccaaaagaaacagtggctgaaatggaaaggtttaattg

SEQ ID NO: 20405 - DNA, 2994 bp, Oryza sativa
  ref <308>: DATABASE ACCESSION NUMBER: AK070726
  ref <309>: DATABASE ENTRY DATE: 2001-12-06
gactcacttctcaataaagagccacccatcaccaccaccaacacgcacgcacgcacgcctttccttccttcctccctcccctccctccttcccccacccgcttcccttgccgtcgccgccgccgccgaccgccgcgggaggggaggtccccggcgccatctcccagaaatggacgcctgtttttcaacacagcttattgatggagatggcgttttcaatgtttctggattggagaacttcatgaaggaagttaaaatgggcgaatgtgggctttcatatgctgttgtgtcaataatgggtccacaaagtagtggaaagagtacacttttaaatcaccttttccgcaccaatttcagggaaatggatgccttcaaaggaaggtcacagactaccaaaggtatatggatggcgaaggcccataatattgaaccatgcactcttgtaatggatttggaaggcacggatggtcgagagaggggagaggatgacacagcctttgaaaagcaaagtgcactgtttgctttggctgtttcagatattgtgttgatcaatatgtggtgtcatgacattggtagagaacaggctgcgaacaaacctcttttgaagactgttttccaggttatgatgagattgttcagtccacgtaaaacgacattgttgtttgttattcgtgataaatcaaagacacctctggaaaatcttgaaccgattctaagggaagatattcagaagatatgggatggtgtccctaaaccccatgcccacaaggaaactccactgagtgaatttttcaatgtcgaagttgtggccctatctagttatgaggaaaaggaggagttattcaaagagcaggttgccagtttaagagataggttccaacagtctattgctcctggtggacttgctggagatcggcggggcgttgtccctgcatctggtttctctttcagttcacaacaattttggaaggtcattaaggagaataaagaccttgatctaccagctcataaagttatggtcgctactgtacgctgtgaggaaatcggtaatgagaaaattgccagttttacagctgatgaggagtggcaacaatttgaggaagctgttcaacatgattacgtgcctgggtttgggaagaagatcagcaaccttcttgacagatgcttatcagagtatgacatggaggctatttattttgatgaaggtgtcagaacttcgaaaaggcaccaacttgagtctaaacttttgcagcttgtcaaccctgcataccaaaatattttggatcatttacggactagaactttagaagtatttaaggagtcctttgacaagtccctagaaaaggagggttttgctgttgctgctcgtgactgtactaaggttttcttggagaagtttgacaaaggatccgaagatgctgctatccaacaagtgaaatgggacccatcaaaaattaaggataagcttaagcgtgacattgaggcgcatgtggcatcagttcgtgccaaaaaaactatctgaactttgttccaaatacgagggacaacttaccaaggcactggcagaaccagttgaagctcttctagattcagccagtgaaaaaacctggccagcaattaggaagcttcttcaacgcgagacaaaatctgctgtttcgggttttgaatctgccatggcatcttttgagcttgatgaggtgactcagaaagaattactttcaaagctggagagtcacggaaagagcgttgttgaatcaaaggcaaaagaggaagctgcaagggtcttgattcggatgaaggacaggttctcaacactattcagccgtgatgctgactcaatgccaagagtgtggaccggaaaggaggacataaaggccattactaaaactgctcgttcagcttctatgaagttgctttctacaatggctgcaattcgattggatgaggatggtgacaacattgagaacaccctgtcccttgctctagttgacacagcaaggccagggactacagataggagcatccaatcgttcgatccacttgcctctagctcatgggaaagggttccagaggagaaaactttaattacacctgtccagtgcaaatctttatggaggcaatttaaggctgaagctgaatatactgtcacacaggccatagctgctcaggaggcaaataagaggaacaacaactggctgccacctccatgggcacttgccgcaatggctatccttggattcaacgagttcatgacattgttaaagaatcccctttacctgggagtcatatttgttgttttccttgttggaaaagccatgtgggtacagctagacattgccaaggagttccaaaatggatttcttccagccgtcctatcactttcgacgaaattcgttcccacgataatgaacatcctgaagagattagctgatgaggggcagagacctgcagccccagagaggcaaagagagatggaactccaaccaaaatccacaaggaatggttcacacagcaacgtgacatcggcagggtcatccagcataacctcttcggagagtggacccgaatattcaagcccgattgcacactgatcagttcatctatagcttttagctgaaaaccccagcagttgtagtttcaacgggtgagcctttggagaccgaagcgccttgcagtttttgtaagcttgcccttccccatctgatgtacggagattcaatggccccagccagaggttatttatgggattttgggcccagggagtttgtttgtaagaaacgctgtagaatatgttttatttcatttttttttgtaacagcttatatgatggttgtatagaagatttgcggttttatcatctcaacccaaggaggccaggggagcacagcagtgcattctacactactaaatacagttgattgcatggacacgaaaaatgtatgtacatgtcttgaaactgcagtccgattgcttttgagaatgacccgttttgctt

SEQ ID NO: 20406 - DNA, 1674 bp, Oryza sativa
  ref <308>: DATABASE ACCESSION NUMBER: AK070727
  ref <309>: DATABASE ENTRY DATE: 2001-12-06
ggtccctcgcagcagaataaaaaatcgccgccgccgccgccgccgccgccgctgcccgtccccgcaacccaacgcctgattcgcttctccatctgcttgcattcaaccgggttgtggaggaggagtaggagaaatccggtggatatcgatcggatccagatgaacactcgactggattccggcggacagaagtaaatccggagtcggttttttcgtaaatcgcagaaatcgaggtacagatattcatgctgcctcgatgtgttggaatcaacaagatgaacaattaacatccgaagcacaaagaatttcggataaatccaactaatcgatcgatcgtatatgcaactagtgcatatacatatctagtagattcctgttcataatttggaggaggaagatcagttatgagttaccggcgatttgtgaatctggtgcttgataaggtccaaggcaactacacagtgcggcgcatggacatgtcacgcttcttcctcccccgtaaattggcaacgccgctggacgccggagcacacgacggcgcggcggcggtggagtacggcaatctgccatgcccggtgatgagcttccgtgcatcggtctgcccgatggagacgatggagttcatgctccttggtggaaggcataacaagatagtcggcaccgacctgacggggcgcaccctcctgtacgaccccgacgagcacgtcgtccgctccctgcccaccctccccatgcccaagttctcccccgtgtccctcaccatcggcgacgacgacctttacatcctcgacgacatccagggcccgttcaccggcggccatgatcactgcttccacgccctaacctatagtagggagagcttcaccgacgccgacggcgactggtgttgccacactctcccgccgcctccttacatggtgaagcaacgcggcgacttccaattcgactcctacgcggtggtggatggggtggacatctggatatccaagcaaggcgtcggcacctacaggttccacacggagcgcggagagtggagcgcggtggcgagcggcggcgagtggtgcgcgatgccgttcaccggcctcgccgtgtacgtgccggagcacggcctgttctatggcctcgcgtccggcaccgacaacgtcctatctgcgtctgatctcattagcggcgggagaaagccggagcagcacagcctccttcctctggagtacacgccgcccaaggcgttgacgcaggtgtcttcccacctcgtgcacctgggctctgccaacttctgcatcgccaggttcttcgagaccggcttcttcgacgccgacgaacaacacaacccggagctgttcgctgtgttcaccgccgtcgaggtggagcgctgcgacgacactggagtgctccgcctcgtgaagcacaagtcggagatgtacaagcttatcagcgaaatatattattgggtgctttaatcagctattactccctccgtttcagattatatttattaaaatcaaatgcttaatttatattgggtccgtgaggggacagtaaagttctttgcttaatttatatttcttatttcccaatttccttgtaaatcagatgatatattttgcttggagatatcattggtttttccttgtaaatctttttactaattcatatcattggtttttcctgact

SEQ ID NO: 20407 - DNA, 1735 bp, Oryza sativa
  ref <308>: DATABASE ACCESSION NUMBER: AK099150
  ref <309>: DATABASE ENTRY DATE: 2002-08-28
gagtggttacgtcacgtcacgtcacagccaggccacgggcgtacgcgcgcgcgcgcgaggcctgagaagcaaggtattgggctgggagcgagggggtggtggcatcgcggtggtggggggtggagatgatctcgcagttcttcgtgctgtcgcagcgcggcgaccacatcgtcttccgcgactatcgcggggaggtgcccaagggcagcgccgagatcttcttccggaaggtgaagttctggaacgacgacgaggccgaggaggcgccgccggtcttcaatgttgatggcgttaattatatccatgtgaaagtcgcaggactattttttgtggtaactacaatggttaatgtctctccgtccctcctcttggaactcttgcaaaggattgcacgtgttacaaaagattaccttggcgttctaaatgaagattcattgcggaagaatttcattttagtgtatgaattgctcgatgaagtcattgactttggatatccacaaaccacctctaccgaggttctgaagtcatacatattcaatgagccaataatggttgatgctggtcggctgcctccacttggtcctgctgctatgttcatgcaaggcactaagcgtatgcctggtacagctgttacaaaatctgttgttgctaccgaacctggtgggaagaagagggaggaaatttttgttgatatcattgagagaataagtgtgacatttagttcaagtggttacatacttacatctgagattgatggaaccatccaaatgaaaagttaccttactggaaatccagaaattcgtctagctctaaatgaggatttgagcataggaagaactggctcttcttcgtatgattacagaagttcttctggaggaggagctgtcattcttgatgattgcaatttccacgagtcagtacatctggatagttttgacattgacagaactctacatttaataccaccggatggggaattcgctgtaatgaactaccggattactcaagaatttaagccacctttccgtgtgaccgcactaattgaagaagccgggccatctagggctgaagttctattaaaaatacgggcagacttctctgcaaatgtcactgcaaacacaatagtagtacagatgccagtgccatcttacacaatgagggcaagttttgaattggaagctggagcagttggacagacaactgactttaaagaaggatccaggagaattgagtggaatctaaagaagatcgttggtggttctgagcacacccttcgggcaaagctcacattttcccaggagtcatatggaaatctcacaaaggaagctggaccagtaaacatgaatttcactataccgatgtacaatacttcaaagttgcaggttagatatcttcagatagcaaagaaatccaagacatacaacccctataggtgggtgagatacgtaacgcaggctaactcatatgtggctcgtctatgagatagcgatgctttgtatacatctccctctggtcatttccccttttccttgcgctattatcttcgagggacttcaagcaagcttggacagagtgtcatgcattgcattgtaattttatagagcaatcccaaacttaaactcttctcctgcagttaatatctacctagggcaatttatttttccttgtgtaatatgcaggagatacatgatcatatttttgtatgctgtgaaaatgaatgaagttattgttcatc

SEQ ID NO: 20408 - DNA, 1645 bp, Oryza sativa
  ref <308>: DATABASE ACCESSION NUMBER: AK070728
  ref <309>: DATABASE ENTRY DATE: 2001-12-06
gatacgatcgcaactaggctgtgctgtggccaaaaaaaatctaaaaagcactcgtgcagcagcagagaatcagagagaaggaagaggaaaaaaaaaccgcagaaaaagaattcgtaaatgaatcatcgccgcggtcgtcgtcgccgtcatcatcatcatcatcatcctcgccacgaggggaacaggaagcgcaggagggatcaagcaggagctgtggattccgcttccgtgcacgtggtgttgcagggttcaatggtggagtgagctgaattggggagatgtgattttaccggttcagccatggctcaaatccaaagcagctcactggtgaactgcacgctgcttgcggtgctatgtgggaaggttacagacaaacagcagaagccacctggtctggtgcccgaggtgaagcgaccacggctttcatatccattcccagagctgatctcgtctgggagattggaggtgcatacgctgatcaatcccacagttgatcaattccggaaagcgcaacaggctgtgcagcccaacttgatgtacctccagggtcagcagcttgagaatgaggaagaaattggtacacttgtctggggcgatgctgatgtatctgatccacagatatttagttcactcattagtccaccttttccgaccatagtttatttggaagttcctgctggggaaaagcttgctcaatctcttcagttaaaggggattccatatgtattatattggagaaattcattttcatcgtatgcagcatctcattttcgccaagccttgatatcagttgttcagagctcctgcagccatacatgggatgcatttcagcttgcacaagcttcttttcgactgtactgtgcaagaaataatgatgcgcaaagtgttaagcttgggcctcgtttactaggggatgctccaaagataaatatcttccttcctgagaatgaaatggttgaggaagaaggtagctctgaacattttccagccataaagatatatgatgaagatgtgaacatgaagcttcttatttgtggagcaccatgcatcttggatgctagtttgttgggctcactggaggatggtttgaatgctctgctcaatattgaaattcgagggtgtagactccagaacagagtcagtgctgctcctccacctcttcatgctgaaactcttccacatggggtggttacaatgcgttgtgatatcacaacatgcagttcttcacacgtgtcattgcttgtttctggcagtccgcaaacatgttttgatgacaagcttttggagaaccatattaaaaaggaaattgttgagaagggccagttagttcgtgctgtcttagttagggaggacgacaaaccatcttcagttgagcctttgacttcgatatctgtggcttctggagcttctacttttgaagtctggatgaccctacctaagtgggcaggacaggttttgaaatatcttgctccggaaatctcttacaaaagcctggttccacttggaattgcttgtgtaaatggaactccagtttcttcgtttgatagacaagatgtggatcggcttcttttcttttgcaaaaatgaagctattgtaaatggtctatattctcatctgccaagatggtcagcatcccttgttaagg

SEQ ID NO: 20409 - DNA, 2077 bp, Oryza sativa
  ref <308>: DATABASE ACCESSION NUMBER: AK070729
  ref <309>: DATABASE ENTRY DATE: 2001-12-06
ggcattccttcctccattatttctccatccctttcccctctcctcctctcctctaccttctctctaaaagactggatacagaacaaaaaaaagggaaaaaacagaaagaaaggaaagaaagaagaacacctaccaagcaagtcttggtctttgagttcatgggctgtggaattgttcccaggaatcccctctggctctgaaaagattcacaccgagcaacagttctttgatttttttccccctttgttttgctgaagaattgcttgtacagaactgcttctttcctgtttccgcttggttttccggtgtttattttgttggaattttcttgggccctttcttcttcgcttgtggaggcgaggggagaagagaggcatgggaaagcaaggaccttgccgtcattgcggagtcaccagtactcctctctggagaaatgggccaccagataagccagtgctctgcaatgcatgtggctcaagatggagaactaagggttcgctgacgaattacacaccaatgcatgctcgggatgatattgatgctgaggaacctagagctagcaagctgaaacctccaacattgaagctgaaggaacagaagcaactgaagaaaaatccaagccacatcacaatggagaatggaccattttctgatcaaaacttccgtaagatgggagatcctgacctaagtaatcgatctggttctggatcagcactatcatactcagagagttgtgccccctatggcactgctgatgcaagtgaaatgactgcttcagcacaatcacatgcttgggaatcacttgtgccatcaaagagaaggagttgtgtcactcggcctaagccttcacaaatggaaaaacttgcaaaggatcttaattccataatgcatgaagagcagctactttacctttcaggatcctcagaggaggatctaatttaccatagtgcaactcctgtggattcctttgagatgggatatggaagtatgcttctcagaccaaattcaaaatcactggaggaagaatcagaagcaagctctattcctgctgataataagtcatatattactagtgaatcttactcagggtcggtctcatttgtatatagtgaaagcaaggcaacaagcaaccaaaatgttataactgaacagccaaagaagtttctggtgcaaacatcagataatgctagaagggctaatctccatactgaaaatcaggatactctggagaatgcaaactcacctttagtttccctacatatggagggaaaagacagtgaagaaacaagagtaaagaccagtgcttcaaatcgccttacaaagtccaccatgaatcctctgaaaaggccgcatgacacccacttccaaagctccgtagaactaagaggaaccatgaggagtcctaaaagagtttctaaatatggtgatgctatgggtctaaagtgccaagcgtcgtttatgccgaaaccaggcaatggcaaagatttagcctgcagtgacagagcacttaacttattcatgttacccccggataaactatccatgctggttcctcctcagtatgccaacactgattctgatcaagacctgttgctggatgttcctcttaatgctcggcacccagaggccgagcttctttgccagccatctcaactgagctcagtagcccacagctccacctcagaggctgggaatgccggaggagaggggcgccttaagcagccctagttccagttccagttaacaagcaacttaggaacaggaagtagctgtagtttactttagtttccctggatcatggttccctttatttaccggccactgatggggcgttctgcggtttgttcatgctcttatcgtcgtcgccctggtttactaggcaatgtgcgtctgccaagttggcaaaaattgtgtgttcagctaacacttctagctgtgcttttggagtagacttgtgcttgtttgtagcatatggcttttggagaaggtatataactcaacatggctgtatggaaaagaggtaatctccttatgggtaaaatgaaaaaggaaagaaagatggaagttattaggagct

SEQ ID NO: 20410 - DNA, 2705 bp, Oryza sativa
  ref <308>: DATABASE ACCESSION NUMBER: AK070730
  ref <309>: DATABASE ENTRY DATE: 2001-12-06
gcccgccgccgcaaccgcctccggcgatccccatccatcccgcgccgcgagcggagcagggcgccgccgttcgttcgccctgctgcttctcccgccgcatccatcccggttatatatctatttattcaagtgtgaggtagttggatagaaagcaaaagtccctggtgcaaacaactttaggtgtcctgtgtcccggtatttgattttgtttcatgcaacggacattgggggcaggataagtcgagtcatgggaaaatccgagcatggcaatctactggtatctctcagtgatgggctgccccattatagtcttgcagcagcagttggcctggcaataggagttgctgggttgtgcaaggcgctgcatagcagcttggtgataccaccagtttctcagaagaagttactttcgaactcagatagactttattacactggaggcctgaaaaatcttggcaacaattgctttcttaatgttatcctgcaggcacttgctagctgtgacgggtttgtttcctctctagataatttgcttggaagtgaggatgtgctacctgaggaaaagtccgaaaaaatgcctcttatttttgctctaagttctcttataaaaggtacaccgtttactctttctaaaatgcacctttggaagggagttggtgtggaatcagtacttagcaacttttaagttcttttttattgatttgtctgtaattatctgtgcaatacataatttgagtggaaaataaagtgttggttcctgtgaccctagtggtctcaggaattaccgagcagtggtggtctggtggaatcgttacatactgtaatactgtaaacacggttcgtttttacaggtatactctgatgcagtgttgacatttatgaatctatttacataaattgctgaacatcatatcatgtcattgcattggttggtaaaatgaattgcttgcagctcacagtttgatgttcttgctccacttcacacatcacggtttcttccttcaatatgaaagaaaaagcatgtctttttaactgttgttttatttttcttagaaagaatataacttgtgatgctcccagtttcaagttctatacttgtaaaacttcatttagttggttactcataaaatttcttttactagtttatgaactttacttaaatgttgtagacttgagcgtagttcgagacaaaaggactgaactgagtccacacagagtaatggatgctttgagcttctacgtcggccactttaatttgacaagagagcaggatgcttcggaagcctttcatcatcttttgacctcactgagggatgaattttcccgttgttatgtaccaaataggagttctctggcagacatcaccatgtttccttccaaagtatatagtcaaagggaaggtaaccagcctgaatgcaagcgatggaaacaaaacctatttggtccctttgatgggactattggcagcatattatcttgcagaaattgttcatctgtgctgtcattggacttcgaaaatttctactgcttgcctctctcacctgtggctactataaatggagatattatcaatggatgtagtttggtggattgccttgagcactttacggcgttggagcatcttgacaactatcgttgtgatcattgttggcacaatgttgctgccaaatatttgtctcttaaatccgaagttgatgaggaaaaaattaacaaactacacacctgtgtcgactatggcacttgcagttgcaggcatatatttaccccggaggaaatgacatgttcgatatcttctcaggcaacaaagcagctggctatcactcatttcccaaagatcttgtgcattcatttgctacgcgcttctgttggtctagatggtgaatttgttaagcgtgggggacacatttctttccctttacttcttgatctttcaccatttgctggtggtgcattaatccctggacagggacctaaaccttcagcaatgaacaagcaaagacatggccagcaaactctccatctgtggcgacagctgaatgcagagatgcctgtgaatatgttccccgctgccactgatggggactcatcaagtcatcattgtggtgatgaatcaataaacacacttggacgctcattttacggatgcagatagtaggttcttgtcttcatcatcattgacagacaagttatatggcctctcatctgtcgtggaacactacggcgtatgtggaggtgggcattatgcagcttaccggagagtaacgccaaattcggattctaatgaaccagtgcaatctcttgcaagttttagaaaggagtggctttacgtctcggatgatcatgtgtcccatgtttcagagtgtgaagttttggcagcggaggccaccctgcttttctacgaaaggctgtagcaacctgttgagtagtaaattaacttcttttctggacaatggaagtataacttccagcctctgcaacaactaagaacacatacaaccatgtctatgaacactaggatttgaaccttggtgggtggatccacgactccaccaccacatcaacgggaagcacgcttccctagtaaatttacttagggacaacacattttttagggagatctccaaaaaagtttatgaataattgatactcttttgtttgagaacttaatcttgaataaagaatcatcaactcattcttttttttcc

SEQ ID NO: 20411 - DNA, 1851 bp, Oryza sativa
  ref <308>: DATABASE ACCESSION NUMBER: AK070731
  ref <309>: DATABASE ENTRY DATE: 2001-12-06
gatctttccatatccatatccacccatatcacatctctgatcaatccttctgcgtgttcgtgaattgggaaattaatttggttttgagacaaatggaggcgacgtcgtcgtcgtcgtcgttgttgaacgggctgaactccggcgtggtgctgagcctgatcgcggtgctgtggacggtggtgtggcagaatctgcagcggctgcagctgcagacgctggtggggcggcacatgaaccggcacgcgcggcggctggcggcgctcgtcgacccgtacctgtcggtcaccatccacgagtacgagggcggcaggatgaagcggagcgcggcgtacgaggaggtcaaggcctacctcagcgcgtcgtcggcgcgcgacgtgcgccacctccgcgccgagggcgccaaggacgccgacaagctcgtcctcagcatggtcgacggcgaggaggtctccgacgtcgtcgccgccgacgacagcaccgacgtcaccgtctggtggtgcgcgtactccacgccgccgccgcgcaccgatggaggcgggtactacggctggggcggcggcggccgcgcgcaggagaatcgccggtactaccgcctcttcttcctcgaccgccaccgcgagctcgtcatcaacacctacctcccgagcatccgccgccagggccgcgccgtcatggtgcagaaccggcagcggaagctcttcaccaacatctccacgcacaactggagcgacgtcgacggcctcgtccggtcggcgtggagccacgtcgtgttcgagcaccccaagacgttcgacacgctcgccatggacccggccaagaagaaggagatcatggacgacctcgacatgttcaagaacggcaaggactactacgcccgcgtcgggaaggcgtggaagcgcggctacctcctgcacggcccgccgggcaccggcaaatccgccatgatcgccgccatggccaactacctcgactacgacatctacgacatcgagctcacctccgtccactccaacaccgacctccgcaagctcttcatcgagacgacgagcaagtccatcatcgtcatcgaggacatcgactgctcgctcgacctcaccggcgcgcgcaagaagaagaaggaggcggccgacgacgacgacggcggcagcaaggacggcggcgcgccgcccaagccggacatgaagaaggacgcaagcagcaaggtcaccctctccggcctcctcaacttcatcgacggcctctggtcggcgtgcggcggcgagcggctcatcgtgttcaccaccaaccacgtcaagaagctggacccggcgctgatccggcgaggccggatggacaagcacatcgagatgtcctactgctgcttcgaggccttcaagttcttggccaagacatacctcgacgtcgactcccaccgcctgttcgccgccgtcgacgagctcctgtcggaggtggacatgacgccggcggacgtcgccgagaacctgacgcccaagagcttggacgacaatgccgacacgtgcctcgcagcattagtgaaggagctcgagaaggccaaggagaataaatcaaaaggaaaaaatgctcatggcgaagacaaagacgaagacgaagacgaagaagatgacgatgtagaagtggtcgggaaggataagtagctagccgccattggcgccttgctggagtggttgctagcttctcgttttttctagtccacgtagcttatgatcacagtaatagactaagtttttttaagaaaattattttcattgtggaataatttgaccacatgttgtgctaaataatttgactcgattttcttagtgaactgacaatctgcttaatttgaatgtt

SEQ ID NO: 20412 - DNA, 1220 bp, Oryza sativa
  ref <308>: DATABASE ACCESSION NUMBER: AK070732
  ref <309>: DATABASE ENTRY DATE: 2001-12-06
gcccgtctcgcctcctccgcaagtgacgtcgacgcctcatctcccctccctctttttccccgcagcgatacggcattcgtgacctcccgattgttgccaacccccctcgccttccgattgctgccacccccgcgcctcgccgcttgcccgtctcctgttcgtccctcgggagcgggaggctagggccgacagcagcgttcgcgccggcgcgggattgggttctttgttcttgtcagtgctgtgtttgctcgcaagggtcatcgtgagaatggaccagatttacatggctgctgtcaataacaagacttcattgcctgatgatgagccaatgaagaaaattagtggagatatgcctgtgactgctggaaacgcttgctttgactgcaacatttgccttgattttgcagcagagccggtggttactctttgtggtcatctctactgctggccttgcatctatgagtggctatgtccaggggttggatcgactgccagtaacaacagcagtttggcaaggcgacagtgccctgtgtgtaaggctacactctccccagacatgctggtgccattgtatggtcgtggggggagtctgaagaaatcactgaatggtgtgcccattccacgacgaccaaccgtgcagcgggaggcggttgagcatcaaaacacacacaataacatcgatgatcggcaccatgagaacatggaacccagccctccaccacaaccgctgcggcattcgagccatcattccagtgcaactgaatttgattttatttacccgccatcaccaattgggcgtggcttgatccactcgacggctggtggtgtgcttggggggatggcagtggcggtgctaccatgggcattccgtggccaggtgccaccgagcatgttcatgagtccccactatgtcacggcacacaatatgagctctagagcgaggagacatcagatggaagttgagaggtcactgcatcagatctggttcttcctcttcgtttttgtggtgctgtgcctgctcttgttctgaagcaagatggtggtgtattccttttgtaaatacgggaaggcaagacactaatgggtggatgcatatggtaaaagagggtggttaacactgttggtctgtatcgataagcatgtgcctaaagcatgctgatatagagatgtaatgtgacaagacttaaggtgaaatgcacatttcattcttctcttgtcct

SEQ ID NO: 20413 - DNA, 1154 bp, Oryza sativa
  ref <308>: DATABASE ACCESSION NUMBER: AK070733
  ref <309>: DATABASE ENTRY DATE: 2001-12-06
ttggtgccgcaacgcctcacgaactccgcgcgcttcccctcctcgccgccgccgccgcggcgtgggagaatgaaggccatcggtagcggcggcgagtggtggtggaacctcccgtccctccgccgcaagcccgaccggcgccgccgcggccggcggaacacggacccgcgcggccggcgccgcggtcccccaccggagccgctgtcgtcgtcgtcgtcggagtccatcggccaaagccgcggctggcccatcgacttcccgttcacgcaggccgtgaccgccgcctctctcacgcttacgggtgacaccatcgcgcaggtccgccagcgcatcgtcgaccgccgcctccgcggccccgaaccagacagcaagggtttggtaccggacttgttgatgagccatgattggctacgcgcgcttcgtatggcttcatatggatttcttctttatggtccgggatcgcacgcatggtaccagttccttgatcagtgtatgccgaagccaacatttgcaaatctatccactaaggtcatactgaaccagattgcgcttggtccttgtgttattggtgtaatttttgcctggaataacttatggatagggaaactgtcagaacttccatctaaatatcggaatgatgcccttcctacacttctttttgggtttagattttggattcctgtatcgatcattaacttttggatggttcctttgtctgctcgtgttgccttcatgtcctcttgtgccattttttggaacttctacctgtcaaccactatgagcaagtgaaacctctagtataccttcagggcatgtacaagcctcatttgtcatgatacatgtggttccgtagcaaatgttttgcttgggttattgtgggactaaatgaactgctacggatgagggtttgaaggagctaatttttgctctggtggtagagtacatggtagagtcacctcacctcctgtggacaattctgtcgcctgcctcgtcattgacggaattctggtagtggtctcgaggacaaagtcgatggagaaagaaattgtgtttctctaaacatgtgtgagccatctaccatctacctctaatttgataggaaagatgcttgtaattttgatcatttgttcaataagctaaacttgtatgcaagt

SEQ ID NO: 20414 - DNA, 1109 bp, Oryza sativa
  ref <308>: DATABASE ACCESSION NUMBER: AK070734
  ref <309>: DATABASE ENTRY DATE: 2001-12-06
gactacaccttcactttctcttctcatcatctatatcacgatcgatcacaaagaggttaacagtaacacatggggttcggctcgagggagatggcctgcgcgctcgtggcgctggtgctcgggctctgctgcgtcggcggcgcacgggcgacggggaggatcgacgaggggctggaggtgatgtggggcgacggccgggggagcgtctcgccggacgggcaggtgatggcgctgtcgctcgaccacacctccggctccgggtggaggtccaagaacacgtacctgttcgcgcgcgtcgacctgcagatcaagctcgtcgccaacaactccgccggcacggtcaccacctgctacttcatgtcggaaggggagtgggatatccacgatgaggtggacctggagttcctcggcaacgtcaccgggcagccgtacacgctgcacaccaacgtcttcgccaatggcaccgggggcaaagagcagcagttccacctctggttcgaccccaccaccgacttccacacctactccatcgtctggacctcgcagcacatccttgtgctggtggacgggacgccgatccgggagatgaagaaccacgcggacaaggggatcgcctacccgtcgtcgcagcggatgcggctgtacgggagcctgtggaacgccgacgactgggccacgcagggcgggcgcgtcaagacggactggtcgcaggcgccgttcgtcgcgcggtaccgcaacttcaccgccacggaagccgcgtcgtcgtcgtcgccggcagggtacgaccagcagatggacgccacggcgcagcaggcgatgaagtgggcgcgcgacaactacatggtgtacgactactgcgccgacagcaagcggttcccgcagggcttcccgcccgagtgctccatgccgtagagtggagtggagacgcgccaaagcctcggtgcactttgatgaacgcggactcgatcgaactcacgcagggcacgcattgacctcgtttttttatttttacttctcttgattgaattgattcattctttctatgtaaagtagatatatatatatatatatgtatatgtatgcacgaaagatttaaagaatggagtgtg

SEQ ID NO: 20415 - DNA, 1250 bp, Oryza sativa
  ref <308>: DATABASE ACCESSION NUMBER: AK070735
  ref <309>: DATABASE ENTRY DATE: 2001-12-06
gtttctcggcctctcctcccccggccggcgcttctcatctcctcctcctctctccggcgacggcaacagctcgggacggcgtggctcgaggcgacggaaatgtctctgcggggcggagcgcaaggacgagctctccgtgcaggaacaagctcgacggcggtggcctttactccaccaccatcctctcccaattcgccggggaggcgatctcctccctccctcccatccgccggtggggtcctctcctcccacgcgccggcgcgccgccctcttagacgtcgtttcctcctccgtgtcgctagatgggtcgaggagctcggcagcggcgtgcggggattgggtaacagctgggcgtcggtgacaaacccctacgatgctgctgcttctcccctcgctgatccgtccggtgtcacacctcaccgcccgtccggacatacgtcgtctcccctatttcaatattgaagcgctcgatccgccggcgtagcggtcgacctggacggccgccacccaagcgctgtcgcaccttgccgtcctccccgtcccgtgccttgccgtcgccacatccattcccccatcgtcgtgcctaatggagaggaggagcttgtcgtcgacaccaccaggtgcgtcgactaacaattacgggcaacgcaagcaagaaagatggcggggatgcaagatgcgactagctgaaacaaggacaacgagaagtaagtataggtaatcaggttgctgtggagggaaaaggcagcagtgatggaggtgatgaaggaatcagtacggaggaagagagaatgtgttcagcacgtgctcaatgcgaaaacagagatggccagttggggaaactaaagtttcatttgcaaagcatactaagggcgagttcagtattagaatgtctcattcttatttccatcgccgctgcctctcatctccaccaccattgccacctccacgcctctccaccagcgccccatcctccatctagacacgcttcctgagttcgagttcaagtacaccagatagtcaactgaagagaataaactactgcaatcaccttttttcaggaacatcactttcatcaaagttattctctcctaggcccaattcagttaggcctgacaatttgccaacccatattgtaaatggtccataaaaagcatttgttgatatagtattttgagcaaatgttgaaagatcaggtaatttccctgacaaactgtttgttgacaaattaagaacctgcagatttgtgc

SEQ ID NO: 20416 - DNA, 2348 bp, Oryza sativa
  ref <308>: DATABASE ACCESSION NUMBER: AK070736
  ref <309>: DATABASE ENTRY DATE: 2001-12-06
gatatttagaaacacgtgatgccccgttttgacagtaatggatccccccaaatccactcacctccaacagttggttccccatctccatcatctgtggggagagagcccgagaaatttagggttgagaggtgagtggcggcggaaggaatccacaagttgcaagggtgtggaggcggaggagtggcctcgattggggatcggaggtggtgaatctcggtggagaggcacaatccaaggcgataagcgtcgatttgcaagggtggttcgtgggcgaatgggaatcaagggcatccaggcggagggtggcgtcggcgtccagccgtggtgaggaaggtcgccctcccgcagtggcgcaccaggggggctcctcgcaagctgggagtgagcaatccaccaaggctggaggtggagagatgaggggccagatgaacaaaggggggaagctgcagcaatatcgtccagttcagaaggagaagaatcaaactgaagagaagattgcgacatctgcagtgactcctcagactgcaacccagcaaccaactccaccacccaattctcgcactggtatgcaaactaacccacagagaattttctgccacagatgcaaaggttttggccacatggctagggattgtagcaatgttgtcttctgtataaattgtgccaaacccacacataggacagaggattgcatctatgacaagcagccgaggcctatggcaaagctagtagggtatggtgctccaggtttaggttgcatcttaattcaaaacactaagcctgacccacctaaggagcataataatcctctggctatgatctctactgtctttggtggagaattgacagaagctcaacttgagcaaggtttcacgcaacaatttaagtggaattgggtttggaaagctaaagcaatgcctaatggaagctttcagatgagatttcgtaacaagataaagtttgatgagcttgcaaactttgattatttcaatgtcaagggcactgatgtgcaagttaatgtgaaagaatggacccagaaatctgaagcagttgggaagttgcatattgtctgggtcaaaatcactggaattcctgaggaaatgaagggttaccaagccttgtatgaaattgggtcaaatctagggcctgtcttggaggttgatatggctactttcagagctagcaatgtgatcagggcaaaagttggaatgatggagctgggtgttctgcctttgaaactagtgttaacttctcccaagggacttttgttccaagctcatttcagtctagaggaggtggtggaactggggtggtttagtgatcagctagatgacacttttgagaaaattgagatacaagaaaatactctggagggtagcagtcagagagagggtaagcaagttgtggtggtggatcccatgacagaagatcaccatgtcagtaagacgggtaacgggctattgaagtttgtcagaagcaagtcctggtgccagaattgatgctgggagaacataagatcaaatgtgcacagatcttgagagacatggagttggcaatgcaactgcagaaaggagactgtattctgactcagtgctgtgaaggaaggaaagaggttgggaaaaaggaaatgtcacaggagcaggttgatactctgcagcaaccgatgaatcaaaagttggctgaagaattagaaagctcttagacagatgttccaggggataaggagaatagagtcagttttgatatgggtttgaatcaagaagacaaggacaaagtagatccgggggacagtgaagattacatggattctcaggagtctaagggaagttttgctaagaggttggggattaatctaactgaagaagctcttggaagtcaagatgaagagatgaggagaagcaagagactgaaagacaaggaagataagaggtcccaagagatggcaatggaaaggaaagaagcacaaaatgctttcatcaataaaaattccctccttcatacatgaatcaaatgtctctttaattgatattgctagtgttttaggggtcaatctgggttgtgctgttgatgatatagcctctaatattaatctgattagagacttagagatggccagaattaacctctttctgaaagagggaacaaattctgaaggtcaacattgtcttgattcctttgagaattcaaatcctgatttaaatgttttttctgatgatttggattctgaaactaatgatgaggattttaaagaaattgagcatgtgcttaaacagattcaatcttcagctagaaaaatgaaacagagaaaggggaaccttgagattttcaaggtaacccccaaagttgtc

SEQ ID NO: 20417 - DNA, 1496 bp, Oryza sativa
  ref <308>: DATABASE ACCESSION NUMBER: AK070737
  ref <309>: DATABASE ENTRY DATE: 2001-12-06
gacatgagccacaagaaataaaagcacttgctagctatgcactgtagcagcattgccgctttgctttgcttgcttgcccccacacgctctctctctctctcactagctaattagctgctactacatcttccatctctctcctctctctctctctctagaaataaggaaggagagaaagagaaagagagagaaaaccagaaaagaggaaagtgagatagctcaatttctccttccttcctctctccatctaatctacacatgcacaaatgttgcagctgatatatggcttagctagcatatgcaaagcaagccttcctgcagtctagtcacctctcaagctacatactcccagtactgcttcatctagctctctctagtagctagctctatcatcatcgatcatcctcctctcaccggccggccaacccaagaagagattattcctcttcatcttcttcttcctctctgttcatcactggcttcggcggcggcggccgcggcggcgatcgatcagctgtgagaagaagaagaagaagaagaagaagaaatgtctgcccagatcgctccggcagagcaagtgtgctatgtgcactgcaacttctgcaacacgattctcgcggtgagtgtcccaggaaacagcatgctgaacatcgtgaccgtccggtgtgggcactgcacgaatctgctgtcagtgaacttgagaggactgatgcactcagccccagcactacaagatcatcatcatcatcatctccaggagagtggtctgagcggatgcttccgtgatcaaagtggctatccggagtttggtttttctgcagcttcgtcgtcttccaagctcaggctgcctcctgctgctgctgccatggtttcctactcgcagcaaaaccagcagctcgagcaagctctccatgctcgccctccagagaagaggcaaagggtaccttcagcctataacagatttattaaggaagagatacgaaggatcaaagcaaacagccccgacattagccacagggaagccttcagcacagcagccaagaattgggcacattatccaaacatccattttggcctaagccctggccatgagggtggcaagaagctcgtcgacgtcgaccccatcccaactgctccatcttccaagaagatccaaggtttctactcatagattgaggggatcaatctgccgataccgataccgcaaataggaggaagagcatcaagagcacaaaacatatatatactgtgagtaaagaagcaaaggaaaaaagaaaagaaatgctgccaccttacctttgttcatgaccaaaaaacttgtgaagacgtatgtcataagtacatagaagaaatcaactcatatagagtgaaaaaaaacatacaaaaaatcaagctactatagctcatcgatcgactgaaaggctgaataaaccattcgaccataatgttgttacatgtataagtatgtttgaagctagctagctggctagttcttt

SEQ ID NO: 20418 - DNA, 2676 bp, Oryza sativa
  ref <308>: DATABASE ACCESSION NUMBER: AK070738
  ref <309>: DATABASE ENTRY DATE: 2001-12-06
gattccaattagtgatcttgaggggctccatctgcaacttttcaccttggatatatttgcatccttgcttttcccagctctcctcgccctttccccttcttagagctgattctctcgattgattacctagtactactgcaattcacattgtcagctcttgcttgttcccaggaggatcagtttcttgctgagcaatggatcctgagttcgggagaggcatggcgcctcgaaagagagagccatggcggacgacgctgctgctggcgtaccagagcctcggggtggtgtacggcgacctgagcatctcgcccctgtacgtgtacaagagcaccttcgcggaggacatcacccactcggagtccaacgaggagatcttcggcgtcctctccttcgtcttctggaccctcaccctcatccccctcatcaagtacgtctccatcgtcctccgcgccgacgacaacggcgaaggagggacgtttgcgctctactctctgatctgcaggcacgccaatgtgagcctcctcccaaacaggcaggtcgccgacgaggagctctccacgtacaagctggagtacccgcctgaagtggctaacaggtctcgaatcaaggagtggcttgagaagcacaagactctgcagactgctctgctgatcatggtgatgattggaacctgtatggtcatcggggatggcgtcctcacgcccgcgatatctgtattctcagcggtttcagggcttgaactctccttgtccagggatcagcatgaatatgccgtcattccgataacatgtgtcatattagtgttcctgtttgcactccagcattacggtacccatcgtgtcggatttctctttgcaccaatagtcctagcctggttgatttgcatgagcatgcttggcttgtacaatatcatccactggaaccctcaagtttatcgcgctcttaatccctattacatgctcaaattcttgaggaagactaagaagtctgggtggatgtccctggggggaattttgctctgcatgacaggatctgaagcaatgtttgctgatcttggccatttctcctacagtgcaatccagcttgctttcactacattagtataccctgcactgattttgggatacatgggccaagctgcgtatttatcgaaacatcacactctgaactcaacctaccaaattggttactatatatcggttccagagagtgtaaggtggcctgtgcttgtgctggcaattttggcatcggtcgtcggaagccaagcaatcatcagtggaacattctccatcatcaaccagagccagtcactcagttgcttcccaagagtgaaagtggtgcacacatctgagaatatccatggccagatttacatccctgagatcaactggctgctcatggtcctctgcattgctgtgactgtcggttttcgcgataccaagcatatgggaaatgcatccggattggcagtgatcacggtgatgctggtgacgacatgcctgacatccttggtgatcatgctgtgttggcaccggagtccggcgctggcactcgtcttcttcctcttcttcggctccatcgaggtgctctacttctcggcgtcgctgatcaagttccgggagggggcgtggctgccgatcatgctggcgctcatcctcatggccgtcatgttcatctggcaccacaccaccatcaagaagtacgagttcgacctgcacaacaaggtgaccctggagtggctgctcgccctgggcgacaagctgggcatggtgcgcgtcccgggcatcggcctcgtctacaccgacctcacctccggcgtgccggccaacttctcccgcttcgtcaccaacctcccggcgttccaccgcgtgctggtgttcgtctgcgtcaagtccgtcccggtaccgcacgtgcttcccgccgagcgctacctcgtcggccgcgtcggcccggcggggcaccggtcgtaccggtgcatcgtgcggtacggctaccgcgacgtgcaccaggacgtggactcgttcgaggcggagctcgtcgagagcctcgccaccttcatcaagctggacgcgctgtaccaccgctgcagcgacgccggcagcgggagcgagcagctcgacgacggccgctacgagcgcgagaacgcgctcacggtgatcgggacgaaccctctccggcgatgcctcagctacgaggcctcccacgacggcgtgtcctcggtggacgccgcgcgcagcccgaacgggatagtggaggtcccggcggcggcggcggcggcgccggtgacgaagaaggtgaggttcgtggtggaggcggcgagcccggaggtggagaagggcgtggtggaggagcagcaggagctgtgcgaggcgagggaggccggcacggcgttcatcctggggcactcgcacgtgcagaccaagccgggctcgtcgctgctgaagaagctcgccgtcggcgtcgggtacaacttcctccggcgaaactgccgcggcccggacgtggtgctgcgcgtgccgccggcgtcgctgctcgaggtcggcatggtctacgtcctatgacgtcaccacgagatctcatcgatcaataccctgtaaaaaaaattcaaaatcaaatctctctgcttgtataagaattaagaagcagattggaagaaaattgggcgaattttctccg

SEQ ID NO: 20419 - DNA, 2169 bp, Oryza sativa
  ref <308>: DATABASE ACCESSION NUMBER: AK070739
  ref <309>: DATABASE ENTRY DATE: 2001-12-06
ttgtggttcctgttgaatctatatacttagagcctaaagcaatgcttgatttgttactctaatagtggtaatgaatagtgcctttttatttttctatatagacacaccattatctccgacctttttattttctatatagatacaccattatcctgaccttgtttcaacttttaactgttcctaatccgagactgaatagatccttaagaagattgttgaatctgttcattgtgtgataaactaatagttttttttgtgtgttttctgctctaggtgacatatatgtctttttttacctttcgtcttttttttttcagcatgaagttgcaaaggctgaaggtctaagctcatcttcaatcctgaagctctctactttgttcatcaagtgtctatttatgcaagtttcaaattttcttatatggttgcatccatgtttctaaagatgttctgggtattattgcatctaagaaatgaccgctgtttcttgtgctgagtggcacaacatctcctacactacatgttataaatgttgttacttactttgctttaatttaactgcaaataagcatagaagctaaattgatagtgcaaataagaataacatgttagatgtatctgaatgctcactaaactcacagtgtggtggcaaatgtactcgcatccctataaatttcatctgctacctcaattttggttccttcctgatcatacttttagggacaatctacatataattattttatctgcctacctgctgcttgtcacaattttttattcaaattcttgcaatattttttcagctacatcaaaagaattgctagttgctgacatataatatgctttctttatgaaacatatattatctgctgatcaaagattttattttttgtttttttaatgttttaagcatagtatgacagagagttgcatattctaatttcaaatattgtacgtactctttcatatactggtttagagagcattactgaatgcactgcccttgtaatactaagtcaagcatactcttcatacatcaaacctactagactgaaatgatttaagttgttgcaaaatgatagtatgctatttactcaaaattgaaagacattagtgaatcttgtgttgttggcttctctaacgaaattgtgctgaatactcaataggcattaaacctcagatcaatactcaatagacattcaatgaagttcatatttacagaaaattgtttctcatctgtatggtctcatcaagtcatcataactttattaattttcagacatttaatagtctcacgttcatgttcttttttgttggatcttgaccaacaatgctttgcaagttgcaacatcttatctatatttatttagtgctgagtgaattttcttttgggaaactttgcagcctcatctttaaaaaaatcaaggtggtacatgatcaagtcaaacccttcaagtcctctcacaacacagcgtgaaagccacaaagtatctactcatttagttaggccttctgcatcctactccacacaagcttcagagcagaacccaaaagagggtacaaaagacctgaaaactgttgaagatccatttgattcccctacctacaacatacctgagaagccagtgacatttgctgaaggggcttcctacagtcttgtaatagttgcgggacttggaattgcagcagtggctggatatgctgttttcaaagaacttatatttgaaccaaaagagtacaagatttttggaaaagcgctagcaagagtacagaatgacagtcaggttacagcaaaaattgggtatcctgttactggatatggcaatgaaagtagaaatcgtgcagctcggcagcgcattcctaacaggtttggacagatgaggacggtgttgaacatgtggaggtaaacttctatatccgaggaccacatggagctggaaaggtgtattcagagatgttcaaagataacaatgacaggagttggaagttcacataccttattgttgagattgtgtctccgcatcgtgtacaactaatgttagaatcttacgtaccagcataaggatgcaagaaacaagcagttagcagtggcagaattgttgtaaggttcatgcctccacacttacctatccaatgtgtacatctctcatatttagaaatcatcctttgatt

SEQ ID NO: 20420 - DNA, 1662 bp, Oryza sativa
  ref <308>: DATABASE ACCESSION NUMBER: AK070740
  ref <309>: DATABASE ENTRY DATE: 2001-12-06
gatccaataccttgagagacaggggggcaaatattccgccacttgccttgattctgcttgctgcggctgctgccccgttgcttgacgtctacagcactgggagagcaccaaccgcgcatcatacgcatcaagagcagagagcgcgcagagggagaggggtgaggaggagatggctgcgaagtggcaggaggcgccggcgccgggtgtgagggtcctcctgttcgccgtcgcggccgccgcgctgctgctggtcgtgtcggcacggaaggtgggggagacgtgcgcggcggaccggaactgcgacgccgggctgcactgcgagacgtgcgtggccgacggcaacgtccgcccgcgctgcacccgcgtcacccccgtcgacccgcagaccaaggcgcgggacctgccgttcaaccggtacgcgtggctgacgacgcacaactcgttcgcgcggctcggcacgcggtcgcggacggggacggccatcgccacggcctggaaccagcaggacaccatcaccgaccagctcaacaacggcgtgcgaggactgatgctggacatgtacgacttccgcaacgacatctggctctgccactccttcggcggcgcctgccagaacttcaccgcattcgtgccggcggtggaggtgctgggcgagatcgagcggttcttggcacggaacccgtcggaggtggtgacggtgttcgtggaggactacgtggagtcgcccatggggctcacccgcgtcctcaacgcctccggcctgacaaagtacgtgttcccggcgtggcggatgcccaagagcggcggcgactggccgcggctcagcgacatggtccgcgacaaccaccgcctcctcctcttcacctccaagtccgccaaggaggccgcagagggcatcccctacgagtggcactacgtcgtcgaaaaccagtatgggacgaaggggatgatcaaggggaggtgcccgaaccgcgcggagtcggccgccatgaacgacctctcgaggtcgctggtgctggtgaactacttcagggacctaccgaatttcccggtggcctgcaaggacaactcggcggagctgctcgacatgctcaccacctgccatgacctgtccgcggacagatgggccaatttcatcgccgtcgatttctacaagagaagtgatcgaggtggtgcggctgaagccacggacagggccaacggcggactggtctgtgggtgtgggagcgtctctgcttgcagtggcaatggtacatgcacgaccgctcggcacggcggcacgcccaaaggcatctttaacgcgacatcgggcgccacggcgttgctgcggccgccgacggcgacgttgcaatggcagcagctcatcatactggtgccatctacgctggctgctctactcttgagcctttgagagaacatggcagaaacaccaagcatcaccaccgcatcctttccccccaaattttgctgtacatagattgcatctgcctcccagaaacagattagatcccgctttacattgtacatcaaacattcgcaagagttttggatacctgattggttgggtctacattgtaatcgatcaagaatttgtttgtactcattgtacgcaagacatgcaagctccgatgaatgagcacatcaaaaacacgtacttccatc

SEQ ID NO: 20421 - DNA, 1847 bp, Oryza sativa
  ref <308>: DATABASE ACCESSION NUMBER: AK070741
  ref <309>: DATABASE ENTRY DATE: 2001-12-06
gatatctctagtcgaatatgggggtcttgtggcaccgggtcctcctattcttcacgatcactctgctataaattaagaagccaccagataatcaatcgcattttaacgtatcgcatccccggccacaagctagctgcttgcctgcggcgatccacacatggaggagaagccgcagcacggcagcttgggcggcttggtggccggcgtgagggaggagtacgagagcgggaggaccaaggagctggagtggaggaaggcgcagctcgggggcctcatcaggatgatcacggaggaggaggacgccatcttcgacgcgctccacgacgacctcggcaagcaccgcgtcgagtccttccgagacgaggttggggttcttgccaagtccgtcaggaacacgctgcaaaacctcaagaaatgggcttcgcccgagaaggttgatgtgccgcttatttcatttccatgcaacgctcgggtcgtgccggaaccaatcggggttgtgctcattttctcatgctggaatctcccaataggcttagctctagagccactctccggggccatagcggccggcaacgccgttgttctgaagccctccgagtttgcaccgtcaaccgccgcgttcctcgccgccaacataccgaagtatctggacgccaatgccgtgaaggtcgtacagggcggggcggaggtaggagaggagctcatggagcacagatgggacaaggtccttttcaccgggaatgctcgtgtagggcgcatcattatgacgaaagcagcgaaacacctgacgccggtcgcgcttgagcttggctcgaaatgcccgtgcatcgttgactgccttgacagtaagagggagtgtcaggtcgccgtgaatcggataatcggagcgaaatggtctacttgtgcaggacaagcttgcgttgccatcgattacatacttgtcgaggaacagtttgcaccattcctgattgaactgcttaaatctacactcaagaggttctttaccgaaccagagtacatggcgcgcatcctgaacgagaagcatttccataggttgacaaaccttctagaggatgatcaagtgaaatcctccattgtgcacggcggcaacgctgaccccaagacactgtggatcgagcccaccatcgtgctgaatccaccgttcgactccgacatcatgatggaggagatattcgggccactgctcccaatcataacggtaaagaaaacagaggattgcatcgcgttcttgaaatcgaagcccaaaccgcttgccatctacgccttcaccaacaacgagaagttgaaacagcggatcgtcgcagaaacgtcctccgggagcgtcttgttcaacgacgcgattgtgcagtacgggctggacagcgtcccgttcggcgggatcggggagagcgggttcgggcagtaccacggcaagtacacgttcgagctgttcagccacaggaaggcggtggtcaggaggagcctcctggtcgagttcatgttcagatacccgccttgggacgagtacaagatggggatgttgcgccgcgtcttcaggttcgactacgtctcgctcgtgcttgcgctgctcgccttttggctgctcggcataaggcgatgaaggatcgatcaatcgtctgcagtgttggttcataaaatgtgtgatcgtcgtgccatgcggccaatgcacatgccggggacactattttatgtgatatttatgtatttatttccaagaaacgtgcttgcagttactaaataaactcaaaaaatataactacctgttagtgcattgcaatattgtatcaaacagtttgatcatccaatacattccgattcatgtgctc

SEQ ID NO: 20422 - DNA, 4317 bp, Oryza sativa
  ref <308>: DATABASE ACCESSION NUMBER: AK070742
  ref <309>: DATABASE ENTRY DATE: 2001-12-06
ggtctgctactcctactctgctacctgcatgttcatgctccagatcagcagataatgcttgcttgtttgcttgctgcctgcgtgtgcgcgcttgtgaatatcttctttttttttaatggagtgatttggttgcttgtggactgattgactgactcactcactgaatgattggattagcttttgtgagtgggattgtggggattctgtgcttcagcataattggaacatggagagtgcccatgtttttgggggtgctttctgctttttctttagtttaatttgggggtaaaaaaccaaaatattccaacagtttcttcctttattttttagtttgtcggttgacaagttggtgcttccagtgagggtactgagtggagttttcgttctggggcctgcccctttcttcttcttcttttttagagtattcggattatgtttctgggttaaaatatgtgtttgaattattgtgttcgtataatggaaattcagaaaaaaaactggcatcttttgcatttggagctgttttccaggggtgtatgtactgaaatctgaatatttactgtttgagtcaaatctgagctgaactttaattatctatcctgaattcctgattgattaacaactgccactttgtataaacaacagtttcatagacatccatcgtaactgaacacttcatttttatcaaattttaagcagaggaagtcaaagacatgggtgtcaaatgtttgtgttttttatttttgttgtttcgtcaaactgaatgtgacatgtactcattagttggatctttaggatatcaggaaatgacaactgtatattaaaagttttatattgacaaaccaacatgaattctttggtattgctagagccttgcttaagtacttactcctgtgcaaaaattttgaggtttagtgccctagtgtgctcaggtttggtgcttttgtatttgaagtcttcatttgcagacgtggctgcaattttttatagaagggtaaattgtgaatgaaatctgagttgatctttaattgtatattctgtatatctatcaaccactttaatgattacaacaaaaattccagctttacatgaacatgccatgaacttccgttgaaagtgaataacttggctttgtcagttccccgtgtggccaatgttcatgcacgagactaatattgaatacaatttgttttgtcaaaataaactgatacctttgttgcagacccttccatggatgtatgacaaggaattttttttttactttgatgtatagtcaattagtttgatttttttttgttctgaattgattggaaaataatgcctgtatttacaattttatatcaacggaaaaaccatggattgctaatttgttattgatatgtgtaggtccaagaatgctatgagatcgctgctgagtatgaagggaagcatgactcccaaaagctcgatgaacttggcaacatgttgacaagcttggatcctggtgactccattgtgatggccaaagctttctcccacatgcttaatttggctaacttggccgaggaggtccagattgcatacaggaggagaatcaagctcaagaagggtgactttgctgatgagaactcggcactgacagaatctgacattgaagaaacttttaagaggcttgttgttgacctgaagaaatcaccagcagaggtctttgatgcccttaagagtcagactgttgacctggttttgactgcacatccaacacagtcagtgaggaggtcactgcttcaaaaacactcaaggataaggaattgtttggttcaactatactcaaaggatatcacaccagatgataaacaggagcttgatgaggctctccagagggagattcaagcagcctttagaactgatgagatccgaagaacccagccaactcctcaagatgaaatgagggctggtatgagttactttcatgagacaatctggaaaggtgttccgaagttcttacgccgtctggacactgccttgaagaacatcggaattgatgagcgtgttccttataatgcacctctcattcagttctcttcttggatgggaggagaccgtgatggaaatccaagagtgacaccagaagtcacaagggatgtatgcttgcttgctagaatgatggcttcaaatttatactgctcgcaaattgaggatctcatgtttgagctgtctatgtggcgatgcaatgatgagcttcgggcacgagcagatgagctgcatctctcctcaaagaaagatgcaaagcactatatagaattctggaagaaggttccgcccagtgagccataccgagttgttctaggtgatgtgagagacaagctgtacaacacacgtgaacgagcacgccagttattatccagcggatattctgacattcctgaagaaaccactctcaccagtgttggacagttcttagagcctctggagctatgttacaggtcactctgcgattgcggtgaccgtgtaattgctgatgggacccttctggacttcttgcgccaggtgtctacctttgggctgtgccttgtgaggcttgacattaggcaagaatctgacaggcacaccgatgtcctcgatgccatcaccacatacctgggaataggatcataccgtgagtggtccgaggaacgccgtcaggactggctcttgtctgaactcaatgggaagcgcccattgtttggcccagaccttcccaagaccgatgagattgctgacgttctagacacgttccgcgtgatagctgagcttcccgctgacaattttggggcctatatcatttccatggcgacagctcagtcagacgtgcttgctgttgagctcctccaacgtgaatgccatgtgaagacaccacttagagttgtcccactgtttgagaagttggctgatcttgaatctgccccagcagcagtggccagactgttctccatagattggtacagagaaaggataaatggcaaacaggaggtcatgattggctattcggactcgggtaaggacgccggtcgtctctcggcagcttggcagctgtacaagtctcaggaggagctcatcaacgttgccaaggagtttggggtgaagttgacaatgttccatgggcgcggtgggactgtcggaagaggcggaggtcccactcatcttgccatcttgtctcagccaccagacacaatccatggatctctccgggtcactgtccagggtgaagtcattgagcagtcctttggtgaggagcacctttgcttcaggacactgcagcgtttcacggctgccactctggagcatggcatgcatccaccaattgcgccgaaaccagaatggcgtgctctgcttgatgagatggctgtggtggctacaaaggaataccggtccatcgtcttccaggaaccacgctttgtcgagtatttccgccttgcaacaccagagatggagtatggaaggatgaatataggaagcaggccatccaagagaaagccgagtggtggcatcgagtcactccgtgccatcccatggatcttcgcgtggacgcaaactcgcttccaccttcctgtctggcttggcttcggttctgccttcaagcacatcctggagaaggacatcaggaacctccacatgctccaggagatgtacaatgagtggccgttcttcagagtcacgatcgatctggttgagatggttttcgccaagggtgaccctggcatcgccgcattgtacgacaagctccttgtctccgaggagctatggcctctgggagagaaactgagggccaactgtgaagaaaccaaacagcttctccttcaggttgctggacacaaggatcttctcgaaggtgatctctacctgaagcagcgccttcgcctccgcaatgcctacatcaccaccctgaatgtctgccaggcttacacgatgaagcgaatccgcgacccggactaccatgtcacgctgcgcccccacatgtccaaggagatcatggactggtctaagccggctgcggagctggtgaagctgaacccgaccagtgagtatgcgccggggctggaggacaccctcatcctgaccatgaagggaattgctgctggaatgcagaacaccggctaagcgaactatcaactatgaagtgcctgaattcacaccgttttatatggactcttatcttgatttcggtcatttgctctcggccatttaattttgccgatgcagaggctcgtgcagtttctaatttctttcggaagatattttcaataatggagttgtacaagaacatcaattaatcaaaataaagtggatattatgttcatt

SEQ ID NO: 20423 - DNA, 1302 bp, Oryza sativa
  ref <308>: DATABASE ACCESSION NUMBER: AK070743
  ref <309>: DATABASE ENTRY DATE: 2001-12-06
gaacagtagcgctagcttatcccctcctactcccccccctcatcctcctcctcctcgctcgcccatggccatggccaccacctccgtcacctcgctcgcgatggccatggccgcggccgcctccgccgacgccacccaggccccgcacaagctctccgccctccccttccaccacctcctcttctcccgcgcgccgcccctcctccgcgcctcccgccgcctccccctcgcgcccctcgtcgcctcctccgacgccgccgccgccgccgaggccggcgtcgaatggagcgagacggaggaggccgatgagggttcccaggaggaggaggaggaggaggtggtcgaggagcaggcggaggcggaggaggaggtggtggcctccgtggaggaggaggaggaggaagcggtggaggaggagttcgcggcggagccccccgaggaggccaaggtgtacgtcggtaacctgccgtacgacgtcgacagcgagggcctcgcccagctcttcgagcaggccggcgtcgtcgaggtcgccgaggtcatttacaacagagagacagggcagagccgtggatttgggttcgttaccatgagtacgattgaggaagccgacaaggccattgagatgcttaaccgctatgatatcaacggaaggcttctgaacgtaaacagggcggctccaaggggctctcgtgtggagagacctccaaggcagtttgctcctgctttcagggcttatgttggcaacctgccatggcaagtggatgactctaggctgctgcaattgttcagcgagcatggagaggtggttaacgcttcggttgtctacgatagagaatctgggcgttctcggggatttggttttgtttccatggcctccaaggaggagctcgatgatgctatttctgcccttgatggacaggaattggatggccgcccacttcgagtgaatgtggcagctgagcgaccacagcgaggcttttgattccatatggcgttggggagcatgtctgcacgtttgaacaagaatgctaaagtgttatgcgttaaggcggaagctgatggttgtcatttacagagcgcgcgttagcttcctgattttgagtcctcccgtcctttttatgtgtcttccaagctgatgttatgttaaattattctcaaaaatatgagttcaactttccaagtaggatatttataatgatgatgtccttagtattttttttccgtgataatccaaaagttcacttgtcgaccatatatctgagaaaaggagcaaatgcatggcagcagccagtgcttacccct

SEQ ID NO: 20424 - DNA, 1924 bp, Oryza sativa
  ref <308>: DATABASE ACCESSION NUMBER: AK070744
  ref <309>: DATABASE ENTRY DATE: 2001-12-06
gtttggcctcccgcctccgcctcctctcgcctcgcctccgccacccatggcttctcgaaaccctagccccgcctccctctccacgccgctcctctccgactccatctcgcccacgcccaccaccaacggccacgcggggcaccataaccacgacgacgacgacgaggagtcgccaacggtgtgcggcggcgatggcggaggagggggggacccgttcgcgttcccatcggaggatcggccggcgtggtggtcgccgcggggggtgtccccggccgacccgttccgcaacgggacgccggggtggtgcggggcgtacgagctcgtgagggcgctcgtgtgcgcgccggtggcggcggcgaggctggtgctgttcgggctctccatcgcggtggggtacgccgccacgtgggtggcgctccgcgggtgggtcgacgtgcgggagcgggcggcgcaggagggcgccgggcccatgccggcgtggcgccgccgcctcatgtggatcacgcggatctccgcgcgctgcatcctcttctccttcggataccattggataaggaggaaaggaaaacccgcgcctagagagcttgcacctatagttgtctcaaatcatgtatcatacatagaacccatatacttcttctatgagctgttcccgacaatcgtttcttcagattctcatgattccataccatttgttggaacaattatccgagcaatgcaggttatatatgttgacagattctcgccagcttcaaggaagtctgctgtaaatgaaataaagagaaaggcggcttgcaatagcttcccacgtgtcttgttattcccggaaggcacgacaacaaatggaagatttctgatttctttccaacatggtgcattcatacctggctaccctgttcaacctgttattgtgcgctatccacatgtgcactttgatcaatcatggggaaatatatcattaggaaagctcatgttcaagatgtttacccagtttcacaatttcatggaggtagagtacctccctgttgtttacccacctgagatcaagcaagagaatgcccttcattttgcagagaacactagctatgctatggcacatgcacttaatgttattccaacctcttattcatatggggattcaatgatcatggctcgagcagtggaagatggaaaggtgaactgctcaaattatatggtggagatggcttgggtaaaagaaacatatggtgtgagcacatcagaagcaatggcactcttggaagactttttgtgtatgagcccagacaaggacggacgtgtgaatgcgcaagatttttgggctcattttggccttaattgcacccctctttgcaagaagatatttcagtacttcgattttgaagccaaggaatccatcacattccgtcagttcttgattggatgtgcgcacctcaggaagcagccatcgtttcaggacgcctgcgaaaccgcgtttgagaggtgtaggaatcccctaacatctcacatcggcagggagcagctcgccgatgtcctgcggtcaagcatgcttgagctgatgaccgataatgggatgatgaagctgttcaagacgttggacgtcgacgatgacgacggaatcagcaaggatgacctgatggcatcccttaggaagctccccttcatgatcgcgctcttcgcgggccggatcaacggggaagtctacatcgagatagtttgatcgactggattgatcgcaggggagagcaaaaatggtggatgggagtttgtaacgcggtgggagacgacagacctccgtctgtttttagagggatggtttccaaccgcttcaccgtccatgtagctttctcaggcgtgttggactaaagtggctaaccggtatagtgcgcaattttgtttcatatcgtaaaaatatatatttatatcc

SEQ ID NO: 20425 - DNA, 1216 bp, Oryza sativa
  ref <308>: DATABASE ACCESSION NUMBER: AK070745
  ref <309>: DATABASE ENTRY DATE: 2001-12-06
ggggcgaagaggaggacgccacgagatctgcagcgagagagagccagcgaagcgcgactccgttttaaccgccttcgccgccgccgccgcgatatcgatcccctccctctcgccgtcgacgccgtcggcatccatggcgccagggctctacaccgacatcggcaagaagaccagagatctgctttacagggactacgggacgcaccacaagttcaccctcaccacctgcacccccgagggcgtcactatcacagctgcaggaacaaggaaaaatgagtctgtctttggtgagctccaaacccagcttaagaacaagaaattgactgttgatgtcaaagcaaactcagagtccgatcttttaacaacagtcacggttgatgagtttggaactccagggttgaaatcaattcttagtttggtagttccagaccagaggtcagggaagcttgaactccagtaccttcatgaatatgctggcatcaatgcaagtgttggcctgaattccaatcctatggttaacctttctggtgtctttggaagcaaagagctctcagttggtgttgatgttgcattcgacactgcgactagcaatttcaccaagtacaatgctgcattgagtctaaccaattcagaccttattgcttctctgcatctgaacaatcatggtgataccttgattgcatcctactaccacctggtaaagcaccattcgaacactgccgtaggagctgagctgtcccacagcttctcaaggaatgagagcacactgatctttgggtcccagcactcattggaccctcacacgacagtgaaggctcgcttcaacaactatggcatggccagcgcgctcgtccagcatgaatggcgtcccaaatcgctaatcaccatctctggtgaggttgacaccaaggcaattgagaagagcacgaaagttggcttgtccttggtgctcaagcattgagtatgttttgcatcctaggaatttttcttcagttcttgtggattggaataacatggaaaaaacatggccacagctaccattgtggcttcattttgatcttgagttctttccccaccattaccctaggcaaacattagcattggctatatatttttatcctcggcgcctgttgttaataattttgggtgatttgagacctattgctgaatactgtcaaatatgatggagatatctctgtgttccacatctttgttg

SEQ ID NO: 20426 - DNA, 1335 bp, Oryza sativa
  ref <308>: DATABASE ACCESSION NUMBER: AK070746
  ref <309>: DATABASE ENTRY DATE: 2001-12-06
ggctcattccaaatcgaatccaccaacatcccccccccccccggcattgatctcgccttcatcctcgcgcgattcttgcgaggaattcgattcccggcgatggccgccgccgtcgtctgcgtcaccggcgccggcgggttcatcgggtcgtggatcgtcaagctcctcctcgcccgcggctacgccgtccgcggcacatcccgccgcgccgatgacccgaagaacgcgcacctgtgggcgctcgacggcgcggcagagcggctgacgatggtgagcgtcgacctgctcgaccgtggcagcctccgcgccgccttcgccggctgccacggcgtcatccacaccgcctcgccgatgcacgacgacccggaggagatcatcgagccggtgatcaccgggacgctgaacgtggtggaggtggccgccgacgccggcgtgcggcgggtggtgctctcctccaccatcggcaccatgtacatggaccctcgccgcgaccccgactcccccctcgacgactccttctggagcgatctcgactactgcaagaacaccaagaattggtattgctacgcgaagacgatagcggagaggaaggcgtgggaggtggcgaggggtcggggggtggacatggcggtggtgatcccggtggtggtgctcggcgagctgctgcagccagggatgaacaccagcaccaagcacattctcaagtacctcaccggcgaggccaagacgtacgtcaacgagtcccacgcctacgtgcacgtcgtggacgccgccgaggcccacgtcagggtgctggaggcgccgggggccggcggacgccggtacatctgcgccgagcgcaccctgcaccgcggcgagctctgccggatcctcgccggcctcttcccggagtatccgatccctacaaggtgcagggatgagataaatccaccaaagaagggctacaagttcacaaaccaacctctgaaggatctaggcatcaagttcacacctgtgcatgaatacctgtatgaagcagtgaagtccctggaagacaaaggattcatcaagaagacctccaataccaaggagcttcacaggcaaagttctccccctcaaaattcacccgcgagcatgctgatgtcgaagctttgataggtttctgaagaaatcccttttgaccgacggcttatctcagagtttacatagctcactaatttgattcagttcgatatctctggcaaattgccaatttctgggagttcatcctaaaagcagataataagaacaaccaatgtgtatatcatcagggatatgagttgaattattaaaggatgcttcagataaggttatgtg

SEQ ID NO: 20427 - DNA, 1352 bp, Oryza sativa
  ref <308>: DATABASE ACCESSION NUMBER: AK070747
  ref <309>: DATABASE ENTRY DATE: 2001-12-06
gggaaaaccccacgacgccgtcgccaccgttcgtctccgcctccgcctccgccgccggaaatggcggccacctccctcctctccctcccctcgctccgcctcacccaccgcctcctcgtccccgcgtcgtcgtccgccccagcctcccgctcccagttccaaacgctcgccgcgaagaaggcagccgtcgccacgggcaccggcgagggcggcggcggggggcgtggagcgggcggcgggctgctgtcggtgctcgaccgggcgatggcggacgaggaggagtaccgccgggcgcgcgcgcaggtgcaccgtaagggcgtggaggtggaggggtacgccatcgagggggtctccgtcggcgggcacgagacctgcgtcaccgtgccgtccctcaacgtcgccttcgacatcggccgcgggccgctcttcgccgtgagccaggactacctcttcatcacccacgcccacctcgaccacatcggtggtctcccaatgtacatagcaactcgtggcctctataatttgaagccacccgttgtatttgtaccaccatgtatcaaggatgatgttgaggatctacttcaaatccatcgtagaatgagtcaagtcgaccttaaagtggaattggttgcgcttgatttgggggagacatttgaaatacgtaatgaccttgttgccagaccatttgagactcaccatgctatacccagccagggttatgtcatctactctgttcggagaaagttgaaaaaacagtatgctcacttgaagggtaatcaaataatgaaaatgaagcaatcaggcgctgagattacagatactatactatatccagaagttgcctttacaggtgacacaaagtctgattttattcttgacccacgaaatgcagatgccctgagagcaaaagtccttataactgaggcaaccttcctagatgaccaaattgatgttgatcatgctcgggagcatggccacatgcatctctctgagataatggagcactcccaatggtttagaaacaaagccattgtactgacacatttctcaaatcgatatagtcttgaggatattagacaagctgtttccaaactacagtcaaagttatcttcaaaggttgttgcactgacggaaggcttcaaatctgactatagatagtgtatagaagtaggtcagctgtgcttctcacccttacttgctgagaataacttgagttacttacactaggaattggccattcatgaggaaaaagggacagaattaataggtttgtgctgtttggcttttgtatgtggcatttatatctcctatctttctatattagaaaataaagtttatatagcattataact

SEQ ID NO: 20428 - DNA, 1166 bp, Oryza sativa
  ref <308>: DATABASE ACCESSION NUMBER: AK099151
  ref <309>: DATABASE ENTRY DATE: 2002-08-28
gacctaccacccaaacggcaagcggcagtgccaatggagcagcaacaggcggcgcccatggcgaggaacaggaaggtggtgctgcgcgagtacatcgccggccggccgccgagggaggacgacatggtgctcgtcgacggcggcacggtggccctgcgcgtgccggaggccgccgcccccgccccggcggtcctcgtgaagaatctctacctctcctgcgacccctacatgcgcggccggatgcgggacttccacggatcctacatcccgccgttcaagcccggatccgttattgaagggcttggagtggcgagagtggtggattccacccatccgggattcagcgcgggcgacattgtctccgggatgactggttgggaggaatacagtctgatcgacaggcctgaacagctgagcaagattcagcaaagtgacatacccctctcttaccatttggggcttcttggcatgcctggttttacagcttatgctggtttctatgagatctgctcaccgaagaagggcgagtttgtttttgtttcggctgcatcaggagcagttgggcaaattgtaggacaactcgcaaagcttcatggatgctatgttgtgggaagtgctggaacaaatcagaaagttgagctcttgaagggcaagtttggatttgatgcagctttcaactataaagaggagcctgacttgactgcagccttgaaaaggtatttccctgaaggtattgacatctactttgagaacgtaggtggtccaatgcttgatgctgtactcctcaacatgaggacccatggtcgcattgccgtatgcgggatggtctctcagaatgcgctgactgatcctgtagggatccacaacatcttctgccttgtaccaaagaggataagaatgcaggggttcatccagagcgaccacctccatatgttcccacagtttgtcagtgacatggcaaagcattacagagatggcaagattgtgtatgtagaagacatgagcatagggttggagaatgcacctgctgcgttggttggtctattcagtggaaaaaatgttggcaagaaggttgtgtgtgtgtcacaggagttaagtcagtttacattctgatgagtatcagaaacctctctgaattgaggtgataagtaatagatgtttgtctt

SEQ ID NO: 20429 - DNA, 2538 bp, Oryza sativa
  ref <308>: DATABASE ACCESSION NUMBER: AK070748
  ref <309>: DATABASE ENTRY DATE: 2001-12-06
gagtggcttgttttttttgttggcttatggcgatttcgttttcttgttggacacatcgattcaatttttttaaaatcgatcttctcccattggtggattggtgggggaagggcgttttgtggctctgcttttacgcaagaggactacctttttattctcgtctgattcctgtgaatatttttactgtattattattcgtcatttcgttctgaattttaggggatttttgtttcttggtggagagagatcccaggtttcggaattggggtggcgttttgttctcctcgagttggggaattggaagaggcttcttttgtctcttctccaagcgttttcttttggttggttgtaggcttgtagctggtggcagtttcggtcaaatttccagattgttttcgctgaaatttccggtgatctagctgtgaaatgacggttaatttcagttccgattagacattcgtgaagatgagctgcatctggatcataataatttagtggtttgatttatcacggtaggatttgtggcgtaaatcgcattgctgaaactctgttgctgcatctgcgagtctctctgagagagacgtgccgtctaatgcacgtctcctacacacatccggcctcagataccgggcaacgttcttgcattcattgcaccggctaggctgcaattgaagtagttcgccgctgcataatcttgtcttcatccgtggttctgcaattgttaggtaggagtagttcgatataatggtcaaatggacttcttgccaattgtcatactctcttacaaaccagttggctaagtttacgacagcttctgatgcagagtatttttctctctgatggtatgaaatgtttagtgctggtaacttactagtactaatggataagaagagattatagaagctttattcgtgtacctttaggctttagtttaggagaccaatttaagcacaatcgggtagattagcagaatcaaagcgattccttatctcacaacctttgctccattgctatatctttgttatcgttgaaaacgtctgaatgtgatggcttaaactaaagtgaccctgaatagcttagctatcaagaaaaggaggaagcttttttttattcctttgccccaatgttgtataaccaaactgtggattattcttattcccatgacctgctggtttagctctgttcagctgttcacattttaaatgatactgtagtcaaacgctgcattgaacaaagattgaaataggaaccaaccacctttgtttaatacttcaaagtgtagctgatcagctacccttgacgctgctggcaaatttgacaaccctacagctgaaaccttttgaagagtattgttctgttgaagcctcttttgcagcaaagtggaattcttcattagcctgaaccatctatttacgagggtagcatgtgtttcaatgctaatgttaagaacagtttatttttactttgcagtgacactgttgtacaattgcttccactttcaatttatactgatcatttcctctctttactttaggggtattttggtcatcatacatgggcttaatgagcacagtggaagtatttgcactttgcggagctgctcacatcatgtggctttggagtatatgcaatggactggataggccatggtggaagcgatggtctacatggttatgtgccttcactagattatgttgtagaagatatagatgtacttcttggtaaaattgtgcttgagaatccaggggtcccctgttttcttcttggtcactccactggtggagctgttgttttgaaggcatcattgttccctcgtatcagagcaaaactggaaggcatcatcctaacttcaccagctctgcgtgtaaaacctgctcatcccattgtaggggctgtggcgccaatattctctctgttagcaccaaagtttcagttcaagggagctaacaagagaggcatcccggtgtcccgcgacccggctgccctgctagcgaagtactccgatccgctggtttacaccgggccgatcagagttcggaccggccatgaaatcctacgcatctcctcctacctgctgcacaacttgaagaaggtcaccgtcccattcatggtcctccatggaaccgcagaccgggtgaccgaccccctggcttcacaggacctctacaacgaggcctcatcgaggcacaaggatctgaggctgtacgatgggttcttgcacgatctgctctttgagcctgagcgtgatgagatcgccacagacatcatcgactggatggagcgaatgctagctctgcaaaccgtgtgaaggagagcagtttgcctgaaaaaggagaaaagaaaaattgtatgataagttaggaaaatggccgtgtatgtcattgatctcattcttgatggaattatctgaaagtgatctacaagcttcaagtggtgattttggttgattgtttcatgtaggactgggtcgaaaactgaaaaagggtttgtgatctgtaattatatatatacacccgcaataatagaattaagattttt

SEQ ID NO: 20430 - DNA, 742 bp, Oryza sativa
  ref <308>: DATABASE ACCESSION NUMBER: AK070749
  ref <309>: DATABASE ENTRY DATE: 2001-12-06
ggccgcctcaccctcctcggatactcctccgctcgctttgcgccatcgccgccaccgacgccttcctccctaagccctctccctcctcctccgccccattcctcctcctcctctccccgtccacgccgcgcctccacatccgctccacccgccgcctctcactcgcgcagctcgctgcatccgactccttccaatcctcttcatcctccgccgccgcgcttgacttcgctgagcccggcgccgccgacgagtccgatgtgccggaggagtctgaccaggaggaggggtacgcgccggaggccgaggaggcggcggatgagatgatgatgaggaggaggaagccgtcgaggcctccgcggaagttgcggaggagcctaaggacgtagaggaggtcagcgagtacgtggagccgcctgcggaggccaaggtatacgtcgggaacctaccctacaacatcgacagcgagcgcctcgcccaactcttcgaacaggaaggcgtcgtcgaggtctccgaggtcaatcagtgactaaatggacgcagttttatattgacccctcatcatcccagaaatagcatacaatctaggtgatattgttggcttggataagttaattaagtttgtcagtatttaaatagctaaatggttcatccctctgtctgaacaaatttataaattctatggttcttttttttccttgccaagtaatgcaaatcaacaatgacttcaatgccttatcttttt

SEQ ID NO: 20431 - DNA, 744 bp, Oryza sativa
  ref <308>: DATABASE ACCESSION NUMBER: AK070750
  ref <309>: DATABASE ENTRY DATE: 2001-12-06
gatcctctccgctctccacccatcacttcctccacctcctccacttccgctcctcctcctcctcctctctccttcggtggcggacgggatcaggagcggccgacaacaggcgagagcaggagcgaccggcaaccacttctgccggtggcaggcaggagcgggagtggcgagctcgggagcggccgacgaccactttctctggcggtggacgagagagggagcgagagtggtggggagctcggcggcgggcaggagcgagagcgcgggagggggggtgggagcccggcggcagcgggtttgatacggtggagcggatggtggcgatggatctagcagtgatgagcttggcggtgggatccgcatggtggggagctcggcgacgatggatccgataggctctccccatcccgcgcggatcccaccgcctacccatcccgcgcacatggatccaatgcatggttctagtggcggcgatgggagacggggatggcggcggcgatgacaacaaggatgaatctcgggctcaggagctgctagggttctagatttttttttgccgttttttctttttgcagcctgacgatttatgtacccacatgtgaaaatacaattttcggaagcggttgttctacccgcatgcaaaaatcgcagacacctggatgtaggcgggctaccccacccgcctacgaaaatcgattatgaccatatgaaaaaatcatttatgtagtagtgttatgttttttg

SEQ ID NO: 20432 - DNA, 2052 bp, Oryza sativa
  ref <308>: DATABASE ACCESSION NUMBER: AK070751
  ref <309>: DATABASE ENTRY DATE: 2001-12-06
gaatcgagtatcgcgtaaaagaagaaatctcccgtctcgttctcgttctcctccgctccttgcgccgccgccaagacgagcggagggccgggcggcgatctccatctggcaagcagagcagcggaggggaggaggggatcctggtgcgtcctctttctgatccatctctctctctctctctctctctctctcccaccccaccgggacctggaatttgcttgcgttcgtgaatttgatagccttaaacctctcttatttcaagtaataacagtttgtttgtttacctaaaagttcgggggttcaaccgaacccccatgccccaagttggatccgcccctggtttgaattgctgaaacataatttcgagctagttaaacgaagagacaacatgcctggaaatgtaaaaaaaaagtatgctgatttgaatttgattgttggaactgccctataggaaactggtaaattttagaacaaaaaaccttgcttatagtaaaatcgtgaatggatgatatgcaaagacatggtgagaaatattcactcgctcatactacaactacttaagaggaccatatttgctcactctggaatagctgctgacctgctgtgaccatcatacaccccctcaccgcaatgcaggttccatttgaagtaatcggagaatggtatgttgagaattagattaaagcttccattttaaaattgtaattgtttgggctgtcagctatttgccattattcacaagtgataattgtgaccctacaacgaagaggctaacagtaggttttagaatttcagtaatgttatatctcaaaagccaactattacatttgcagggaaggatattagtgattttctactgctgtttcgtcagaaggacaagaactgaagaattcagttagcaacagtatggtgttgccttcatcaaataccagggccacttcttccatggcttaccctgtttccctgagcagcctccaccaccaccccaacaaccaccatgctttttttcttccctcgaaaacaaaccatgataatactcataaacctattgaatcccctagaatttctagacggtctctcatcttcctccctgtcctcccttctcttctatacgcttcatcatcccctgccttagatgacgcaaacattccatccacctctgccattgataccaccatcacagatcggatcttcatggacttcagtgtctgccctagctactttcgctctgaccgcactttaggagctgagcttgctacatgtcctgattctgaacctcttggtcgtgtaatttttggtttgtatggtcgactcctccccctcactactgccaacttcaaagctgcttgcacttctgctgcataccggggaacacttgtccacaagctccttcagggccagttcttcgttgctggccgccaaggtcctcggcgtgacaggggcgaggtccaacctcccaccggacttgtgaggaatgctgagactattgaccctaaagcatttgaactaaagcatgcaaggcctggcaccctctcattgtgccttggacagaacgatgacgatgatgacatcaagctcaatcctaattatcacaatgttgaattcttggttaccactggaccagggccctgcccagagcttgatggacagaacattgtctttggaactgtattggaaggaatgaatgttataaccagcattgcaactattcctacctataaaccagctgaaaggatccgcttcttcaatgattttgcccagttgattggtgatgaaagagctcaaactgctcgagcgttgtgggatcgcccgctaaaaactgtttatatcagtgattgcggagagctaaaagtgaccaaaccatcactttcccctccaagtctgccataaaaaaccacagaggcaattttgtgtacctacacttattcttctccctccaatgtcaactgtatatatgccatctagtattaactgacatctgctgtgtttctggcccaaaatgtgtacgacgggtctctgattcatcgaagtaaatatattacagtgctgtgc

SEQ ID NO: 20433 - DNA, 3130 bp, Oryza sativa
  ref <308>: DATABASE ACCESSION NUMBER: AK070752
  ref <309>: DATABASE ENTRY DATE: 2001-12-06
ggccgtcatttggtaccttggggcgcccacctccccttctggtcgacctcccccatgcctgccctgctgcagatctgggaagaagaagggaaggagaagaaagggaaagaaggaagcggaggaaatcgaggtgaagatggaaatgtggggtttgattacccgctgcccatggaggcttaggtgatgccacttcggaatgcaactagagttcatctcatcatcagtgaaggcaagtgaacgtagcggtggtttgctacagctttaacctgttattttattctaccttcactttgaaaattatatatcatcaaccgatatattattatttgttgcacagaggatttacctatctgaatcacacttattgattttacactgtatatggttatactttatgctcttggttataatacccttatactgatctccatcgaaggaatttggttccgatgttatactctggatttcatactgcatttgcatcacttgcattgcatttgaagttatgtcgtgaacctatggttgcgaccgtaccggtacaacatcgtatattgccgtaatacgatgcagcttcacaccttgttgggtgtgaaggcaggagtacatatcattgcattgcatatgcatttattcaccctgttgggtgtgaaagcaggagtacatatcattgcattgcatatgtacatattgcaggatgttacgtgaaatatcgatcgaagatatctttgagaagtgttttcttctctgggatttgtgagtatatggatttgattggtgacgtcatgatatttttagtctatggatattcaacttgtctttatgtgaatcataacttagtatttaattaactatataatccacctgtggtttaagtagcttgttaaagccgtttgcttgctgagatttattctcatccccttatagtcttttcaggtacttgctgttgatatgtttgcgtgaagggatgggattagctacactgttgcacgacatgatctcacttagtcatgattattgtaatatgctgataggattacttgtgtttagacataatgggttaattaaacactagaagtgttgaccattaatgagctaccttttcaagcctatccctacatgtcagtccattgttgtatcataaccttaatctatatgttgatgcttccgcgatgttttcttgtctaaggtagttgttgccaaaattttcttgttttggcacttatgtgtggttgtttagtggcatcccaggcttatgtggttttcttgggtgttacagttacagcagttccccctcacgaatctcccgagccacttctggaagatgaggtaaatgagttgcacttgctgatctgagtctaggttgttgcaagatatgaaatagtaaataagggttgctatgatcttgatcctagtttgacttaaattccggatgttttgtttttcaaaatgataaatttgaagttcctcaattgatataaattcctaccagaaccaaaaaagtgccatcatgattaaaccatgaacttctcatgctctatgatcaagatcatacacccacatatatgcacatgctaaactcctacactgggagctaagcaatattccattccatttccatactaccccaaaataaattctctatgctttcacgtgctttcttcttctaaaaagaaaatcctttcagaaaaaaataaataagagggaaggagggaaaggcatggttatgaaaaaaaataagttatgctctcacaagcatgagcatgaaaaaaaagaaaaaaaaagagaaatgtgtagctatgccctctcctaattaataaaagaatgatttatgggagaagaaagtaagcacaaaggagaagcattttctttatttttctttatataccatttccacaatatatcacacactttgcacgatcttgatattgagtatgtttagttatctattttagtctacgtttttaacttagtaataaatctgaatgcaagtatgccatgtttgatccctaccgagctaaacatatcaaaccttagagtaggaatcaaaaaggcaaaaatggtaagaaattcatattgatacacttagagagactaagtgaatcatttgaggaacttggctttcttttgcaaaatcatttgaaaacctccgaaataagagtcgaataaagattgggtgattggtgctataattgatgttgtctttcaaccgcccaaggcaaggagaaccggtgtctcgtgggaatcagagataaggataagccactgtgccaaagattttttaatctgagagagagtacatataccttgcacttgtacctttaagatatacagcatagtagcaactcctgatcaacaatcaagtttttgtttcctttcgtccttcactcgggatgagcaaaggttcaagcttgggggggttttttgacggtcgttatcgatcagtttcgaccatcaatattaccaaaatagaggagaactaattatgcttgcaatgcatcaatgcatatacatgttagaataataatattccgccagtattaggttcactaaccttttgcagagaatgatcattaaatggaggagaatcggcatcaactaagacgataaatcattcggacgatgtcgagaatcagacttatgcatgaatgggctaagaactcagaattgacacgatgaattgggccaaaattcacaagtctgcataaaggagcaatagaggaggccaccagccgaagatgggccgggatggcccagcccatggtttggccgaacccatcctgatgctgttggatgcagggttcggcgtggacgtccaggattgcatcccaatgacggttggagggcacttcggataattctgcttccacaaccgtcataactacctctatataaggacttcactctcttcacttcaacacacacctcaagcaagagctctcttatattctctcaagttagtttaatgttcttaagctagtggaataggaatagagtagaaatcaggagtccggaagccttcggaagagttcgggtatggctatagtaactcttctcttctcttttgtaagctatgtactttatttagaatactcttctttatacatttatggtattgaaatactttccgagt

SEQ ID NO: 20434 - DNA, 761 bp, Oryza sativa
  ref <308>: DATABASE ACCESSION NUMBER: AK070753
  ref <309>: DATABASE ENTRY DATE: 2001-12-06
gtttcgaaccgattcgcccccctcctcactcactgtcgtgcttgcctatcgtctccgctcccggtgcgcagccggcgagccgcagccgccgcccccctctccgcgccggcggcctcctccgccctctctgccgccagtccccggccgatcccatcgccagtcggcgggcggtctccccgcgggtggggtgggggcgggacggacgatgaagccggtggtggggatcgtggtgtcgaacaagatgcagaagtcggtggtggtggccgtcgaccgcctcttccaccacaagatgtacaaccgctacgtcaagcgcacctccaagttcatggcgcacgatgagaccgaggactgtaacatcggcgaccgggttaagcttgatccttctaggcccttgagcaaaaggaagcactgggttgttgccgagattcttcgtagagctaaggtgtattctccatcagctgctgcagcagcagtttctgctcaacctggtgccacagttcaacaggcagaagctgctagcaaatcataaacatagactcctcttctgcaataaatggacactttttcgggattttcttttatgttgtgtaactgtagtatcatctttgtggctcccttcaaatgcactcgtgtttttgaaccatgtgaatggtggttatcaactcactgagggtgcatcttcaaatacttcgaaattcatggatgcaacagaccatatccatatgtagaacggaatcttctattatgaattgtattcatcc

SEQ ID NO: 20435 - DNA, 2233 bp, Oryza sativa
  ref <308>: DATABASE ACCESSION NUMBER: AK070754
  ref <309>: DATABASE ENTRY DATE: 2001-12-06
ggatctctcccccccaagcaaaaagcccaacaaccgcccccgcgcgccgatggagacgagccgccgtcccgcccgtccgcgccttgcgtttctgaggccgttcaggcggaacgcatgagcaaggcgttcccccacggccggttgcttatcgcacagggcctttctgctacgccggcgcccgaccggctcggcgttttcgcggtgcgcgcgcgcgtggctggcatgcattatccgatacggatcgactcgatcgaccgaccagctggtcgcaatcggactcctgttccgattaggaatattggtgatcggtgcatgcatctcttatccctctcgtctatataactcagtcaggggacaaacgagttcgtccaagtgcaagtaaccccacgttctttgtgcttgtgaccgcagtcgtggtttgcaatctttgtgttcggtgaggtttgtttgctgcatgccatggccgagcagcagcagcagcaagcgccgctgctgcagaggccagccgctgcaccgccgtcgtcgagccggctgccggacttcaagcaatcggtgaagctcaagtacgtgaagctggggtaccactacctcatcacccacggcgcgtacctcctgctcgccccgctcccgggcctcgtggcggcgcacctctccaccttcacgctgggcgacctcgccgacctgtggcaaaacctccagtacaacctcgtctccgtgctcctctgctccacgctgctggtgctcgtctccaccgcctacttcctcacgcgcccgcgccccgtctacctcgtcgacttcgcgtgctacaagcccgacgacgagcgcaagtgcagccgcgcgcgcttcatgaactgcaccgagcggctcggcacgttcacgccggagaacgtcgagttccagcgcaagatcatcgagcgctcgggcctcggcgaggacacgtacctccccgaggcggtgctcaacatcccgcccaacccctccatggccaacgcgaggaaggaggccgagatggtcatgtacggcgcgctcgacgagctgctcgccaagaccggcgtgaaccccaaggacatcggcatcctggtcgtcaactgcagcctcttcaacccgacgccgtcgctgtccgccatggtggtgaaccactacaagctgaggggcaacgtcgtcagctacaacctcggcggcatggggtgcagcgccggcctcatctccatcgacctcgccaaggacctcctgcaggtgtaccccaacacgtacgccgtggtgatcagcatggagaacatcacgctcaactggtacttcggcaacgaccgctccatgctcgtgtccaactgcctcttccgcatgggcggcgcggcgatcctcctctccaaccgcggctccgcgaggcggcgctccaagtaccagctggtgcacaccgtgcgcacgcaccgcggcgccgacgaccggtgcttcggctgcgtgacgcagcgggaggacgctgacgggaagaccggcgtgtcgctgtccaaggacctgatggcggtggccggcgaggcgctcaagaccaacatcaccacgctgggcccgctggtgctccccatgtcggagcagctcctcttcttcgcgacgctcgtcacccgcaaggtgctgaagcggaaggtgaagccgtacatcccggacttcaagctggcgttcgagcacttctgcatccacgccggcggccgcgccgtgctggacgagctggagaagaacctgcagctgtcggactggcacatggagccgtcgcggatgacgctgcacaggttcgggaacacgtcgagcagctcgctgtggtacgagctcgcctacgccgaggccaaggggcggatcaagaagggggacaggacgtggcagatcgccttcggctccggcttcaagtgcaacagcgccgtgtggagggcgctccggtcggtgaacccggccaaggagaacaacttcaccaacccgtggatcgacgagatccaccgcttcccggtgcccgtccccaaggtgtcggccatatgatccaaccacacgcgttggctgtttgcactgaaacattattactagcagtagcttagtagtagtagtagaaatgaactaggatctattcgttattgcttgtgtattgatctgatcatatctggttcgctgttcttatgtgaagttgctctgtcggtctggcatgtaagaaggtctgatcataagttcacttcaaaagttaatttacatcttc

SEQ ID NO: 20436 - DNA, 2129 bp, Oryza sativa
  ref <308>: DATABASE ACCESSION NUMBER: AK070755
  ref <309>: DATABASE ENTRY DATE: 2001-12-06
gtctccaatcccctcccgctcgcacaatcgacgcccacttccgccgatccggccgccgtctcccgcactgcccccacctcaaccgccgctgccgccgatcctgcggtctcgcctcgcctcgccgccctccgcctccgcctccctcccgcccctcgccgtcttccgcctatccccgccgtcgcggccccctcacttccccacctccaccgccgctgcgccgatccatcatcctgctgcctcgatccatcatagctgcgcgcgctccgccgtcgcgcctccaccttcccctcgaaagcaactcgccttctccactggtggcctccgcctaaccccgtcgccgccactagtggatcgcgaccgtgccgacagatcacacacatttcagagttagtctccacaccaacgttgtcgtcactatcagattgtaggcaaccaaccaaccagtccaggggccccaggagtccaggcttgctttttgaaaacccttacctactccacaagcaattatgagaattgagatgttggaaaaactctgtgaatagtgtttgaacttttcgaaaaggccataaaacccgagggttcaaagtgagtcagaagaactgtatccaggggattaaaagcagcggcctttgggttgttgcttggagtaccaaacttcggaagggttcgtcagatcactaatggaggtttgcgccgcccgcgccccaggcaagattatccttgccggcgagcacgccgtcgtccatggctcagccgccgtcgccgccgccatcgacctctacacgcgctgctccctctgcctcatgcccctcgctgacgacgaggcggccgccacgttggagctggacctcaaggatcctggcctcaccttctcgtggccgtgcgggcgcctccgcgaggtgctgctgacagatgaggcggcgggggcacgggaggcgaggccatgctccccggaccggctggcctccattgccaggctcttggaggagcacgagatccctgaggccaagatctggctctccgccggtctctctgccttcctcttcctctacacctccatattggggtgtagacccgggaaggtgacggtgagctcggacctgcccatggggtcggggcttgggtcatcggccgccttctgcgtgtcgatgtcgggggtgttgctgacagctgccggcgtggttactgcagtcggcggcatcagcggcgagggcatggggtgggagttggtcgggaaggatgatcttgagctagttaaccggtgggctttccagggggagaagattatccatgggaagccttctggcatcgacaatgctgtcagcactttcggaagcatgatcaaattcaagaaaggggaattgacaaaccttaaatctagcaacccagtgaaaatgcttattacggatacaagagttggtaggaacacaaaggctctggttgctggtgtctctgaaagagcctccaggcattcagatgctatggcttctgtattcaacgcagtgaactccattagtgaagaggtgtcaagcattgttgagttagcagctaatgatgagatagctatcacctcaaaggaggaaaagctggcggaactcatggagatgaaccaaggtttgcttcagtgcatgggtgttagccattcttcaatagaaactgtactgcggacaacattgaaattcaacttggtctccaagttaacaggagctggaggtggtggttgtgttttgaccctgataccaactatgctatccaacttagttctggagaaagtcattgcagagctggagtcgcatagttttcgctgctttaaagttgaggttggtggacagggtcttcaagtttgccaaggaggctgctcctattttaatggagatgttgtataatactttgtagttatggattagtcaacggtttgagatttgttcttcacactgtttcttctagattaatccattagttatgtccttattttagccccgggcagttcctgtatcaaataatcctaccgtcgcatgattgtccttggggtttgtatcaaatacaacttttttgctgatgcaactgttgtacgagggaaagtgctatggtagatgtgactactacctccaaatttatctattttatcc

SEQ ID NO: 20437 - DNA, 1672 bp, Oryza sativa
  ref <308>: DATABASE ACCESSION NUMBER: AK070756
  ref <309>: DATABASE ENTRY DATE: 2001-12-06
gagcatccatcgcaaaatccacctcagctagctacccaagcgcacgcgccaccgcccgcgcgcgagctgagctagcgatcaacaccggtcgaacacctagcgagcatcaccaccatcatcaccatgcaggcgtacatggcggtcgccgccgctccggcgccaccggcctcgctgacgctgctgccgcgcaccaccaccgtcatcagggacagggagcgcttcgacgcggccgtcccggtggcgccgctcgtgctgaggcatggcgccggcgtcaagcacaaggccgtcgtggtgatgggcgccacgggcaccgggaagtcacgcctcgccgtcgacctcgccctgcggttcggcggcgaggtcatcaactccgataagatgcagatacattccgggttggatgtggtgacgaacaaggtgaccgaggaggagtgcgccggcgtgccgcaccacctgatcagcgtggcgcgccccgacgacgagttcacggccgccgacttccgccgcgaggcggcgcgcgccgcggcgggggcggttgagagggggaggttgcccatcatcgccggggggtccaactcctacgtcgaggagctcgtcgaaggcgacggccgcgcgttccgggagcggtacgagtgctgcttcctctgggtcgacgtagatctcgaggtgctccgcggtttcgtcgcccgccgcgtcgacgagatgtgccggcgaggcctcgtccgggaggtggccgcagcgttcgacccgcgccgcaccgactactccaggggcatctggcgcgccatcggcgtgccggagctcgacgcgtacctccgctcccgcggcgacggcgccgacgaggaggagcgggcgcgcatgctcgccgcggccgtcgcggagatcaagttgaacacgttccggctcgcgtgccgccagcaccgcaagatcgagaggctggaccgcatgtggcgcgcccgccgcgtcgacgccacggaggtgttcaggaggcgcggccacgccgccgacgacgcgtggcagcggctcgtcgccgcgccgtgcatcgacgccgtccggtcattcctcttcgaggaccaagaacgcagcagcatcgccgccggcaaacctcccctcttcgccgccggcaaggccacttcaggcaacatctccgtcttcgcctccgcggccgccgccatggcggcggccgctgcaatctgagaagcgcaggcaccaacctacttacatacacatacatgaccaaacacaaaaacgcagagcaccatgccactctcaagacattcaggctgctgccaatcgccattgccgatcaaattcagagctcgtcagtcggatcaaacgatgaaggctgctgcttctgcggtcaacatctcgatgacctgccaattgcaatgcaaagcaagattgttcatatactggtaactggttgactcctttttgtttttgctgtgtttctttgtgagatgaggagattgatgaattgcgcgcgagagtgtaacttatgagttttgagttttttttttctttttggtttctcctctgattttgggtgtgtaacagtaggagtaaaaactaaaaagtattgacttggatgttaattgggggattgatgtaatagcctctccttgtaacatagaaatcatgagctgaaataattaaatcgttgagaccttgc

SEQ ID NO: 20438 - DNA, 1242 bp, Oryza sativa
  ref <308>: DATABASE ACCESSION NUMBER: AK070757
  ref <309>: DATABASE ENTRY DATE: 2001-12-06
ggagggtttcgccgactcgcgagtggagggcgctgctcgtcgccaggctcgtcgccggcgggatggccggtcgtccgtcagcatcctctctccgtcaaactgtttggtttcgccggctctgtctgccacgcccctctctttcgtcgactctctccgttgagctctctggttccatgtagataagatgtcctctgcacacgtatatttgagattcaataaaggtcagacaatcacataagtgaaggtgtgcttgaagattgtggccagcttgtgaaagctaattccattcaaggtaataagactaataacattgatgtggtttatacaccggggtataatctaaagaagactcctccatggatgtgggtcaagttggttttcacaactctaaattggtgagaagtttatttcccttacatcctgtgttcactaggcatgtaatttggtataacatacacttgttcgaatgcttatgcatttaggtttgttgtttccctcctcccaaagcctcaacaatgccgcctcccctcctcctcctcttcttcctcctcgccggcgtgggcgccaccaccacggtggaggagcccccggcggcgctgtccccgccgcacaagaacgcgacgctctctgagatcctcctgcgctacggcctgccaccgggggtgttccccaccagcatcaccgccttcaccctcgccgccaacggcagccttgccgtcgacctccagggcccctgctactcccactacgagtacctcacctactttgaggcccgcgtcgtggggctcctccgctacggctctctcaccgacctttccggggtcaaggtccgccgcttcctcgtctggttcgacgtcatccgagtcaaggtcgacctcccgccgcccccgcactacgtctacctcgacatcggatggatcacccgcaagcttcctgccgacgagttcgagtccccccacaagtgcgacgactccaagaaatgccgcctctcgtccgcgctcgccacggctgccgtgtggtttcaggtttgacgtgttcctcccctttgtgattccgagctgtttgtgttcgataggttcttgatttaggcttactgggtgctggttttgcttgccaaattagtctcttgttagaaattaatctgctgccaagtaacaagcgaatttaatttctcggattgtgtttttgtgccgtcaatttcaaagttaatagcggaactatgctgagaatttgtggtgtttc

SEQ ID NO: 20439 - DNA, 496 bp, Oryza sativa
  ref <308>: DATABASE ACCESSION NUMBER: AK070758
  ref <309>: DATABASE ENTRY DATE: 2001-12-06
tgcccaccattcccactttcgcccacacacacacccagatccacagccatcctcccaccgccgccgccaccatctccaagcccacgaacacccacagccaccgtgagctcgagcgaggtaagaaaagctttagatctgagcgacttcgagcgtcttcaaggtaaagttttctcgaaaccctcttcttcttcttcctcctctggctcccccacctgttcttctacggtttcttggttaggttgcttgcagagagcgagagacccagggccttttagatccagggctcccagatctgctgtttttctttcatcttctttgtgttctagtgttaggttggtagccaagaggggttctttttccacacctcacttgctagatctaccaccaaaaagccatctgtttttttactgtggctgtcgatttctccctccttcctgcctgttcttgattttggattcggaaccaggcaaatctttgttactactgttttagtatc

SEQ ID NO: 20440 - DNA, 947 bp, Oryza sativa
  ref <308>: DATABASE ACCESSION NUMBER: AK070759
  ref <309>: DATABASE ENTRY DATE: 2001-12-06
agaaatcaaagaggcagttgagcttcctttgacccatcctgagctatatgaagacattggcatcaggccacccaagggagtcatattatacggagaacctggaacagggaagacactacttgccaaggctgttgctaactccacatccgcaactttcttgcgtgttgttggaagtgagcttattcaaaagtatcttggtgatggtcccaaactagtcagggaactgttcagagttgctgatgagctttctccctcaatagtctttatcgatgagattgatgctgttggaacaaagaggtacgatgctcattcaggaggggagcgtgagattcagagaactatgttggagcttcttaaccagttagatggttttgactctcgtggtgatgtcaaagttatactagcaacaaatcgcatcgaaagtcttgatccagcattgctacgccctggtcgcatagatcggaagatagaatttcctctgccagatattaaaactaggcggcgcatcttccagatacacacatctaagatgacattggcagatgatgtgaacctggaagagtttgtcatgaccaaggatgagttttccggtgctgatatcaaagcaatatgtactgaagctggacttcttgctttgagagaacgccgaatgaaggtgacacatgctgacttcaagaaggcaaaggagaaggtgatgttcaagaagaaggaaggtgtgccggagggtctttacatgtgatgtgctcactggtcgccagtgacggggtgggtaaccttgtaggacgaatatatatttgatttatcacataggctatgctgccttggtttgtaaaatacttgtgaaatttgttttgttacttcttgggatggagttggatagaacaaattgcatttctcatgatttgccttctcaagtactgcactgaataatgaactgtggctaatgc

SEQ ID NO: 20441 - DNA, 1473 bp, Oryza sativa
  ref <308>: DATABASE ACCESSION NUMBER: AK070760
  ref <309>: DATABASE ENTRY DATE: 2001-12-06
gcgcccaccgctgccgcctccggcgatccccatccatccggcgagcgagcagggcgccgttgttcttcctgccacatccatcctggtgagcacatcctccgccaccgccgacccccaaccatcgcgcgagcgagcgagcgaccgtcgctcgtcctgctgcttccgccacatcggtggaccgtggacatgcacactacaaatgtcagggtttaatcggatgggttctgatggcaattttggcaaaggtccacgggagctcactggtgctgttgacttaattagccgttacaagctcctgaaccatcatagtttcttttgcaagaaacctttgccactggcaatttccgatacaaattatcttcacaatgttgtgggagacacagaaatacgtaaaggggaaggaatggagcttgatcaactctttcaggatgcatacctaagggagaagacctcttacattcaaccctttgacatggaaacacttggacaagcatttcagctgcgagaaacagcaccaatagatttgccttctgctgaaaaaggtacgccaactatatcgggtaaatcaaagatcaagtccaaagacaaagtaaagaagcataaaaggcacaaggagaaagacaaggacaagtacaaggatcagaagaagcacaaacatcgccataaagatcggagtaaagataaagaaaaagaaaaagaaaaagaaaaggaaaaagaaaagaagaaggataagagtgcgcatcacgattcaggagctgatcgctccaaaaaacatcatgagaagaagaggaagcaagagggattggaagatttggcaagtggtcataaccccaagaaagtacaaaagcgcaaaaatcaatgaaatgagcaatgggtttcgttagttctcatgcaagatatgacaagtttgtttctggttagccttgtaatgtgactccgtgttgaatgctgtcaaaggtagctttgaagttcttgcttggcaatatcacttcccgaaggtactatgcagctacttgtaacggaaattttataccaagctggtgagaagcacaaagattgctgttacgttggattatgatgtacagcagttctgacgaaacttagaacttatcacacggaatcgttgaacttgtaatttcagctttatgctcgctagcaattcttcagtatgtcatgtcttgtattttagatgaaaaccgggttcgttgtcaagccgcattacacgcccaaatactacagaacccaatagatacttggtatttatccacgatccagcaaaaactatgttggtgatgaacacaaggaactactacgttggtatttatccacgatccagcaaaaactatgttggtgatgaacacaaggaactactacgttgtatcttctgtatcagtattgtttgacacttggcagcaatataattgaagactaaagtcatggatcaacgtacggcagggaactgcttaattagcg

SEQ ID NO: 20442 - DNA, 3210 bp, Oryza sativa
  ref <308>: DATABASE ACCESSION NUMBER: AK070761
  ref <309>: DATABASE ENTRY DATE: 2001-12-06
gactcctccccctcccccctctcgccgccgcccatcgcggagacctcccccgccgcgccgccgcccctcccccgcctcgtcgtctctccggtgacggtgagcccctcgttcaccgcgcgaccgattcgattcgatctccgcgaggctcaccccacgcacggtcctcgtcaaggtacgccagcggagcaaccccttcgatccatttctccgtgctgttcaatctgtttgggatttgtgtgttgttacgtatgtcagagcttcgattcgggaagcggatttagatgatatgtatggtcggaaaacaaaaaaaaaaattagaccacgaattttgggggcatgatgaataacgcaaaacgatggctgtgggttttatttaaataaaccttagagctcgagacgattccctttcggcgcctctcttctcgagcgatgatccattgatcgcgttgtctgatatttgcaaggggatcaggagaaggaagggggaggaaagatgaatagggatgtgggactgacaggaatggcccactggtcagatcttacccgaaacgagtttcgtgaagtaacatattgctcaaatctaatgcttatattacctcaaatctgatgtttatttaacctttaaaacctggtgatttgtgttatcataagcctgtggtattcagaaatttatgcagatatttatatacgatctcatatcgaaggtcatgtagatcagttgatgtactatctgtccgattctgcagtaactagactcccccttttggtgttatgggctccgttctagtagataagtacgcgatttggccgactgatggctgcgattttgctataatactgttgctatctactgccttgcgtgccacagtggtgagttcagactagattattattgcacaggttcacatagagtttgggcaggatggatgtttaaagagaactcgtagtacattacttctgatatgccctgtttgttatttgtcctgatttattgctccatctgcatgctaattcttagggtagtcccaaccctccacctaggatggtgtctatggcattaactacattgccatgtagtacttttagcttatgtggcactatattaattaagagagagagagtgaagagaggaagaacctgggtctcatgcaagacacagtttcaatacgagaacctatgcactagacactatcaagttttgcattgggagataatagtgtcttcataatagatgaagaataaatatgattggtagagaagagagatgatgtatttattaatgacccactttaagaaaccatgggttgtagagtgtagtttctattgtgatgtcttattgacatggcaccatagatactgcttatggacactatgggttgggactgccctatctgaattcaccacttctttacattaattactatcagtttcatccatatcctaatctggtagtttgagccttttgaggtacatcctcacacaatcggcctatatgtacagggtggttatttgctactacctccgtttcgaaatgtttgacgccgttgactttttaagtatatgtttgaccgttcgtcttattcaaaaaatttaagtagttattaattcttttcctatcatttgattcattgttaaatatatttttatgtaggtatataattttacatatttcacaaaagtttttgaataagacgaatggtcaaacatgtgctaaaaagtcaacggtgtcaaacattttgaaacggagggagtatgtgtttactcgatttatcacaagttcacaacagctagattattatcttctcacggttctgggcctatggtctaatattcgcagttgtattcctctccctatactattcaacacttttatatcgctggtttcagccataaattgaacactgaaatctagcagtctaagtggcatcctaacacaatcgacctatatgtatgtggtggtttgcttttcttttttttctacaaggatcattcatgcctggaataattccaagacatcgagtaaaagcagaacaaatgtggtggttgtttgctccgtctacaagctctgctcatatcaatttccatgtatagtggtgatttcacatggtcactcaccatgtttggttgtttttgtacatgcagatgctgatgcacaacgtgcaccacctccgtggtggccagcttgttgatctcaacagggtgaatgcaggccctgaccataaccgcggggtgccagccaatggtgcccatcagtttaattggtcagggttcagtctcatgctgttcggtgcagccccgatgatggttttgccttggcaggtggtacatgtgccgtggcctctgctgcttcttgcgttgatgacctggttcatcggctgcctcaggctctacggttttcaaatcgcttttcctgtatattatcatcagcacggtggcaacaacagccaaggtgtagcagcgccagcaagcacaggacgttaagacacataccactaattcttttgttgcaaaccatcctataaaagcagggaatgggtcaaccatgacttgttgaaaatctagaccacgggatctgatatattttcctaattcacatataattggttttattcttacataactcgtgtgtgctgccctgaaaccctcagtgtcatgttcatgccatatgggatcccatgcgagtaaacagtttcacacaccattcacaaattgggttgtgggtgtaaccatacaaaacttacattactcttgcaacgtgcagggatggaatggtgaataatgcagagatggaggaggagaacgccattccggatgagggcagtctggcctggagcggctacgccctgatggtcttatcagtgttggcattgtggtctggcttggtcactggaccggtggcggtcttcctgtccttcctgcttctgctgcttgggtgcggctttcttcacctcgccatgctcgcaccgtccaagcccaagatgttctgattgatcacaagcaattccaacacggggcgattataagaatttttggtatcgtgtgtttataggtttgtgcgtgtatggtatattggtatgtgcttcatagaacaccaatcatgtgtatatatatttatatgagtaaagtgtattggcggtccttaaacttgtaggattatgacatataggtccctaaactcttaaaatgcatattcagattccagaatttgtc

SEQ ID NO: 20443 - DNA, 807 bp, Oryza sativa
  ref <308>: DATABASE ACCESSION NUMBER: AK070762
  ref <309>: DATABASE ENTRY DATE: 2001-12-06
gagaagcaaaagcagctgagctgagctagctatagccatcacagcaagtgtcaggtggagactagcttagatagagatggctccggccttcgtctccgacgagcgcgccgtcgcggtgtcggtggagaggctgtggaaggtctgcttggacgtgcactccctgcccaaggtctgcgccggattcatcgacgccgtcgaggtcgaggggaatggcgggccgggcaccatccacatcatgaagcttaaccctgccgcggacgcagggagcgtatacaagaccaaaatagtggtgtgcgacagcgcaactcacgtgctaaaggttgaggtgttggaggttaagagcagggtgggcaacctcaagtcgcactcgacggagacgaagctcgaggccaccggcgacgccacctgcgtggccaagctcacggtggagtacgagctcgaagacggcgcctcgctgtcgccggagcaggagaagatgatcgtcgacggctacttcagcatgctccagatgatcgaggcgtacctcgtcgctcaccctgctgagtacgcctaaaaatattgtggtcatgttactgtggcgtggtcgcatgtgagaagaattattctgtgtttaaggttatgtagtaatttcagtattgtgtttttgcttcacgagtgaataaaatacacataagaatgtgttgtgtttgatggttaatatatatggaagattgtggatcagtgtaaaagtagattagaaatataataatatttgtgagtttatttgattacggaggttatctgtactttttataaagttataacact

SEQ ID NO: 20444 - DNA, 1378 bp, Oryza sativa
  ref <308>: DATABASE ACCESSION NUMBER: AK070763
  ref <309>: DATABASE ENTRY DATE: 2001-12-06
gatccaaagacacatgtgacatgtgcaggtgcagcgtactcagtgcttcagtattgtagcgagtcggagtcagtagagcaggcagccaagaaatggccgatgcgcacggtcaccgccggcgggtggccctgccgtgcgcggtgcgcctccggctctgcctcctcgaggccgccatcgacgcgacgcagcgccgggacggcgccatcaaccgtcctctcttctccctgtacgaccggcgggcgcccgccgacccgcggccggacgccgccggcgtgagctccacggacgtcaccgtcgacgcgtcccgcggcctctgggcgcgcgtcttcacccctaccgcgccggagcacgagcactcctcgtcgtcgtcgacgacgacgccgcgccccgtcatcgtctacttccacggcggcggcttcgcgatgttctcggcggcctcccgcccgttcgacacccactgccgcacgctctgcgccggggtcggcgccgtcgtcgtctccgtcgactaccgcctcgcccccgagcaccggttccccgccgcgtacgacgacggggaggccgtcctccgctacctcgccaccaccggcctccgcgacgagcacggcgtccccgtggacctctccgcctgcttcctcgcgggagacagcgccggcagcaacatcgcgcaccacgtggcccagcgctggacgacgacgtcggcggcgactccgccgcctccgtcagacaaccccgtccacctcgccggtgtgatactcctggagccgtacttcggcggcgaggagcggaccaaggcagagcgcgcgctggagggcgtggcgccggtggtgaacatccggcggtcggaccggtggtggagggcgttcttgccggagggggccgaccggaaccacccggcggcgcacgtcaccggcgacgcggggccggagcccgagctgcaagaagcgttcccgccggcgatggtggtcgtcgggggcctcgacccgctgcaagactgggaccggaggtacgccggcatgctgcggcggaaggggaaggcggtgcgggtggtggagttcccggaggccatacacgccttctacttcttcccggagttcgccggcgacatccggaagctcgtcggtgaaatcagggcgttcgtggaagacagcatcatgtccaagcaatccattgcttagctgtgattactccaactagctataaattatcggagtggttcgtatttatataattgtagtacttatcttttgagggaacttaattatagtacttataatggagtaattactctccatagatgttttcggttcgttcaaacttttgaaatttgctgattactcactctgttcagtattgagtttgactaaattgcattagcgtt

SEQ ID NO: 20445 - DNA, 1778 bp, Oryza sativa
  ref <308>: DATABASE ACCESSION NUMBER: AK070764
  ref <309>: DATABASE ENTRY DATE: 2001-12-06
gatggatgggcagtgggaggagccgcagcacgcggggcggcggcggcggcagccggagcccgggaagaacctcatcaagatcccttcctaccaggaggtgttcgggagtggcgcctcatcctccgccgcgccgccctcctacaaccctccacccaccaccgccgcctcctcctcctcctcctcgtcgtcgttttcgcaggccttctccttcctcaaatccaccgagttctactccccgccaccgccgccaccacagacgaccaccccaagaccgcctcaggctagctcagctgctcaggcgccaaagaacgccattcttgtgagccataggcagaaagggaatcccttactgaagcacatcaggaacgcgaggtggacgtacgccgatatagtgccggactacgtgctcgggcaatcgtcatgcgcactgtacataagtctccggtaccatcttctacaccctgactacttgtattatcggataagagagttgcagaagaatttcaagctccgcgtcattttgtgccatattgatgttgaagatgtcgtcaaacctttacatgaagttacaagaacatcactgctacatgactgcaccctcttgtgtggatggagcctggaggagtgtggtcggtacttggagaccattaaagtgtacgaaaacaagtcagctgacagcattcgtgaacatatggataatgactatttatcaaggttgacgcatgctcttacatccattcggcatgttaacaagacagatgttgtgacgcttggctcatcttttgggtcactttcacaagttatgaatgcttctatggaagaactagctcgatgcccaggaattggtgagcggaaggtaaaacgacttcatgacactttccacgagccattcaaacgggtttccagccgcccaaacattgtagtgcctgacactcctgacagagagaaggcgtcaggccaaccttcatcgacaaatgatggtgcacaggatgctgtggagaagccagacgcatccgtgaacaagaagagttctaatgtaagatcagcccttactgaagcctttgccaagtattcagaaaagatacgcaaccagaatcgtgattcaacaaatgtggctggtgaaggtactagcaagtcaactatgggagatgaaaaagaccaataattagattaggggtagcttggtaggaggtccatgacagttgagaacaaaaggagtaagaagaaactagctgagattcaattgacctataaagctaccagttcaactaaaggaagtagcttacggacttaaggctgctagggactctggggccagaagatgcttttcccgcattcctgtttatgcagatcagacgagaagggctatctctttactagaatccgatatgatagaaggagcagctctagcttaagcctaagttgatccttactgttcaagatgtctacaacacagtaaggtaggcgaagctactagtttacttgcttgaaaaaggcaaccttagctgattcacattacctcttgttatttcaatccttccatgtcccccatcaaagcagctacaatgagtaaggaagttagcagatgaaaaataccaataattagattagcggtagcttggtaggaggtccatgacagtccaaaatgctgagttcaaatgtaatgtccccggtttggtaatggttgttgtagctgcagctttttctgtatttttccgtgtaatttgctccaaagagagacaggaacaccgccaattttattagcaaggatgagtttc

SEQ ID NO: 20446 - DNA, 987 bp, Oryza sativa
  ref <308>: DATABASE ACCESSION NUMBER: AK070765
  ref <309>: DATABASE ENTRY DATE: 2001-12-06
gaaaggcttcgtcacttccacacatcctctgctccgctctgctccaccaatggcgcccaccacccccgcctccttcctccgcccgccgccgctgccccaccaccaccacccccgcatcgtccgcctgccccctccctcggcgaccttccgcgtcgctgacctcctcggcggccggggtctctgcaacggcgaggtcggcatccgcaaggagctcgcctccgactcccccgccgcgccgccatccaccaccacttcttccgacgagcccgcggagtcgccaccgccgcggccggctgcgtccggggtggacccggacgcgttcgacaaggagatgatgggcctcaccggcggattccccggcggcgaggtcggcctcaaggacttcgtcgccaagaacccgcctccccccaagccggcgcacaggaaaggtctcgccgccgccgccacggtggagcggccgagggcgccggagctgccgctgttcctccccgggatggtggtactcgtcaagaaccccaacaacgcctaccacatgtactgcggcatcgtgcagcgcgtcaccgacggcaaggtcggggtgctgttcgagggggggatctgggacaggctcatcaccttcgatctcgacgagctcgaggggagggagaagggcccgcccatggtgaaccctaagtccgtgctgctcgagtccctcgccgcggagatggaggacgatgtggccaaggaggaggagggagaggaggccaagaagaagaaggaggaggaaggcaccgccgccgcggcttgaccaccattgctgcttctgcttcttcttgtatgtatacagctatctatattttcttagatgatggaagtgaaaggggtatatatatatatattatctattcgatgagtaatttcgaagtgagtaaatgtgttgttgttaattgctatatgtacagttggaatcttagtgtgaattggcactatgaaacaaacgattcggag

SEQ ID NO: 20447 - DNA, 1214 bp, Oryza sativa
  ref <308>: DATABASE ACCESSION NUMBER: AK070766
  ref <309>: DATABASE ENTRY DATE: 2001-12-06
ggtcctctcctcgtctctctctccccaacctactctcttctcctgcagtccagctctcggttccttgctcctccaagtctccgtcggatccatcctcccctaccccgcgaaaccctagcctcccgagcccctcgccgccggcggatggcgacggcttgatcggccctggacacccgccccgcctcgcctcgcctctgcctctccccgctccccccgcgcatctgatgttcctctcccgcatcgtcctccgcgacctggactccatcgactcccccgccgcctccatggcgtcctccaagaagctggtgacgcgtgacgagtgggagcggaagctccgcgacgtcaagatccgcaaggaggacatgaaccgcctcgtcatgaacttcctcgtcaccgagggcttcgtcgacgctgcggacaagttccgcgtcgagtccggcacccaaccggatattgacctggccaccatcacggatcggatggaggtgaagagagcggtgcaatcagggaatgttcaggaggccatcgagaagattaacgatcttaatcccacgattctggacacaaatccccaactgtactttcatctgcaacaacagaagctaatagaattgattcgtgcgggaaaaataaatgaagctttggagtttgcacaagaagaactcgctccaagaggcgaagaaaatcaagtctttcttgaagaaatagagaaaactgtagcacttttggtttttgaagatataaagaactgtccatatggggaactattggatgtttcccaacgattgaagaccgcaagtgaagttaatgctgccattcttacaagccaaagtcatgagaaagatccaaagctccctagccttctaaagatgttaatttggactcaaaaccaactggacgaaaaggcagcatatccacgaatcaacaatttctccactgccgcacttgaagatccagcgatttgaggccgctcggggggggatggctaaagaatgtaggcaccataccatgactgttttcacacattgtacttcctggatctgttgtgctcttcacctgcaaggctgcaacagtgaatccagtgctttcttcggtctttgatctcaaatgcaaaaaacgtggaatcagaaaaaaaaatcgctcgtgttgtacatgatgtagaagatgttcatcacattttaatctgtgaaaaatgttcgatttgatttgagtcc

SEQ ID NO: 20448 - DNA, 2727 bp, Oryza sativa
  ref <308>: DATABASE ACCESSION NUMBER: AK070767
  ref <309>: DATABASE ENTRY DATE: 2001-12-06
tgtccccaaatcatctggaatccaacgcctgacctcgccgcgcggcggcatggcgccgccggagttgacggatgacgtcgtggaggagatcctgctccgcctcccgccggacgatccctcgtgctccgcccgcgcctccgccgtctgcaagccctggcgccgtctcctctccgaccccgtcttcctccgccgccaccgcgcgttccaccgccgacgagcacctccgttgctgggcttcatccaccacgtctccgacgaacccgcccgccgcgtccccagcttcgcgcagttcgtcccgaccaccgcgttccgccccgccgaactggagcacaagaattgttggccactcgactgccgccacggccgcgccctcttccagtccagcaacgtcgagctcaccatctgggaccccatgaccggcgacgtgcggcggcagcgcgagccctacggcaccctctgcacgttcgccaccgccgccgtgctctgcgccgtgcccggctgcgaccaccacgactgccacggaggccccttcgtcttggtcttcgtcggcaacgacgaggacgacgacggggaggagatcgcgtcggcatcctcttactcgtccgagaccgggacatggaccgccgcttccaccgtccaccatgacgattccctcgaactcgaaagcaagcccagcgtcctcgccggagacgcggtccacttcctcacctacttcggcaaagccatcctgcgctacgacctcaccaagctggaactctcggtgatcctcccgccggtggcgtacggggacggcgacgctctcctcatgacggcggaggacggcgagctggggctcgccctcttcgacggcgaggcctccatccacctctgggcgagggtggcgggtgcagggtgggtgcggcgcaatgtgatcgacctctacgctgttctccccttctttgatcctgtacactcgctgtccctggttggcttcgcggagggcaccgacatcatcttcctccacgccattcatggcgactacaggatggagctcaagtcactgcagatcagcaagctgtgggagaaggacagatgcttcaatatcttcccctacatgagcttcttcgttccaggtacatcctttaccaatttgctagcattaggatttggggatcgttcagttcaaagtttcagaatggagcatgcctcttgctcaattcaccaatcgtgattcagggatatcttttctgtgtgtctcagaccttccgaaaggaaaaaagaatgttcagtatgtttctgacggtgacatgaaaacaatgttgaatatacttgtttggctcataattagcatcaatcagatagttataaaaagttctgaaaataattgataacactgataaaagagggattcattgatattcagtactagattcagtatgcttcagaattcagagagtgacatgaaaacatttttttggatatttggttggttcacaagtaatactagaatgggcgacgataatggattgagagaagtatatgtgacacttggaactttaacttgttaaggatccactagaatgggcagatatattattctgataaaccttttttgtgtgttgacaataacgattataacttgtctgcacccttttcaggtcgtgataagacaaattgccatcgccagcaattgcagcagtaaactagtagcaaacaatgtgtccaaattttgctaatctgttgggttcaattaagcgtcttgttgttggtatcctaggaggtcttgtttatttacttgaagctagtgatatggaaaactctggactgaaggtgatgcatcccatctttgctgatcttggccttagttcaagttggttgttttcactttatttcatgtcaatcttgctgtcaagctgtaataatttgcaaaactagcacaatgtcttcaggatgtcgaagaatgtaagacgttctggctgtttgctaaaactgatgggatatggttggttcataagtaatactaattcagcaacattaacaaaacggtgatgataatgtgcttggggaaaagtatatgtgacactgggtactttaacttgtcgaggatcaactagaatgggcaagatattttgttctgttatcattttctgtctgttgacaatgcttgtttttggtaccttttgtcagtagtaggaatgctctctcaaaatactttgtgaatattggttgtaaaacgattataacttttctgcatctttttcaggtcgtgatagaaacaaattgccatctccaacaattatagcatcaatttagcaaacaaaatgggtccaaattatgctaatacgtcagatcgagcctctagctgttggcctcttggttgattacttgaagctagtgatgtgcaaaactgttgactgaagctgatgcatcccttctttgctgcttggttagtagtcataagaaatttgataggttgagaggattcttcagaaatttcttttggtgttgctgtgagtgctttattacactgctaaatgaagagacgatttcttatttttggtgtgtgtgtactgtgtgtctgtgtggtgtgtcattccattaaggagttcagacacagacacacaaaagcatggtgtgtcattccattaaggagttcaggccctgtttagttcccacgcaaaaaattttcaccatgtcacaatgtttggacacatgcatggagtattaaatatagaaaaaaaactaatt

SEQ ID NO: 20449 - DNA, 2968 bp, Oryza sativa
  ref <308>: DATABASE ACCESSION NUMBER: AK070768
  ref <309>: DATABASE ENTRY DATE: 2001-12-06
gctgaggatgcaaccctcccaactccctttcctctcgtcgtccttatcccctttcctctcgcgattctctctctccctctcctccggtcttccccacccgcgagcaccgatggcgcaccagcggctggactgcccggatccggcgccactcctccggcggcctcacatggggagggagcttcggggggcctccccacggtgtgggctcggcgggaggcctccacggcggcgtgacggacggtgcagtgggtggcctctcccggcggcgtgaccatggaggggcgcagcgggtggcctctgctctgcggcgggcggccagatcgggctggtgtgctcgatggcgggaggattcaccacggtgtgctctctctagcttccttccttgttgatttttgattttgtaatttcggtctctccgtgctgttattgggtgcatggtgatgaggttgtgagaaatttgttctcgattcttggtacatacatggatgatgatgatgatgatgaatgtgctttttcgtactagtgtgatactagctgccagcagtttagtagaattttggtggaagaatcattgctctaaggtccctattcaatgaccagtcattcaaaatgaagccataatcagtcttctaaaaaaaccataatcaaaaactgcacactaccatgcatacaactgaagaacaagagcaccatgccaccaaacacatcacccgaattcagggcaaaacaaaacaaaacggcaaaatgcagggacaatacctggaaatgccgactcctccaggagctggaggcccagcagaagccggaggccgcccatatcgccaagaacccgaggtacagccacgggagaggctgataggcgctgctcaacaccgggagaggagacgaagcgtcctgcatcatcctcttcttcttcttcttcttcttgttgcacaggtaaaccaaaacccctctcaaatttcggttggaagggatcacaaagttctcaattgcttggatttatggacggattgacgagagatgcatgcgtccatgcaggaccagaagctcatggagcagtagcctggatataaaaacagacttgactttgttattttttcccttctcttttgtgcatgtcttggacagacggttctagtattaggtctggcattttttttgggggaagttcgtgcatgtggccgcttttttttctcaccagaagcgttatgggggagtgtaggagtagttagggttgttgcttgttggagggaaaatacgggaggcaaacgtgtttcttgatgaatttaaaaggtgacgaagaaactttttaaatttatggtgagtctcttctcgtgttccttttgacttgtagatgtatgtgagtttaagcgtttaatcaaggcagcatgaaactaatataaagtagtgtctcgatcgaccacaaagaaaataatccaggaaaatgtttagtccacatctaaaaaaaaccttttattatacagaaaagtgtttacctcatatttaaaataaggataattttactattcttgagaaaatacagggagttatgacattttacatatccctagattaggtgcctcgagataccaaaatttttagtcttggtacctctaagtactttcttaagaactataaaattttacctaaattaaagtgttcaccatatatcttaaaaaagtgtctaccacatatgtagaaaagagaagtgcctactacatatctgtttatcacatgaaatacggccaaatgcattgtatttgctagtaggtactccctctgtccaataatataatgaattttagagagttgtgacaattgacagagagttatctagattcgtaatattaggatatgctacatcttattagaatccgttatattatgggattgagagagtgcagaagactagaagaaaaatacaccaaaaaaaagcacgagaggaaaccagataggtgggcatatctgcggacgcagtaagggcagttccaacccataacactagacatggtgttatcgaaacgacaactgcatacgtcgaaagacgtggttactcaacagtggttgaaaaaacgaagtgtattaaattttgaatttcacttgggatccccccattacatggccctaggggactatttatagccccattacaggttcttactactagggtttaggttgtacaggggaatttacatgattacccttacgaaagggacatttacaggggtccataatgttataggggctcatgggcccctgatgggccgtctggcgatcgccggccctatagcccttaggcttgatggcccggaaaggcttcctcggccatcgcgggggcgaacttgccatggcgaagtcgtcttctttcggcaggtagtcttcgccttgcacccttcgcctgagacgcctctggcctagcaaggcactcgtacgactcttcgccttacgccgttcttgctccatagccttcgccacgggtttcggcagatttagtcgaaggcctcatgctatccgccaacacatggtttccataaactccacatcatcaagaaactagtactagacactactcttacaatgcaaataccactattccatacttcaatttaatgttacttatctcacatgatgtcttggatgttgtgtcggaaccatgtctcatgcaagacatggttttcttctctttcctcatttaatgttacagaattgactaaaaacaataatacaaataatcaatttagagcattacgaatgtataagaagtaacttagtcaaatcaaaaagtaatttatatatatgataaaagtaacttacgtatataataaaagtaatttacaaacataaatattttttcgtcgcaatatagtcatgtaagatcttgttgtagagatttaattgtaacgaacacaatggtgtaatcggattgtatatcggacaagtaattttggagaaaattttataagaaggg

SEQ ID NO: 20450 - DNA, 3101 bp, Oryza sativa
  ref <308>: DATABASE ACCESSION NUMBER: AK070769
  ref <309>: DATABASE ENTRY DATE: 2001-12-06
ggaagtgaagagcacagaggatggtgattttgttcatccttcacggcgaattctcccaatttcttccatttaagttcttcttggttgtctgattattaggtttctgcttcgaaaatgctggtttgctctgctgctggctgcttgggttcaacctgatctggtgcttcctagtcgaattcaaggagagccgaggaaaatatttgggaggggcaatggcagaaaccgcggtgagtgcatctaagggtgtgataggtgccctttttgagaagctcactaagctggtggaggacaagtgcaccaatctcgtaggcatgtcaaaaaatattgtgttccttaaagatgagctcccaaccatgagcgcgctactcgagaagctagaggatgcagatgaacttgatccagtggtgaaggcttggaggaaccaggtcagggagatggcatatgatattgaagattgcatcgatgactttgtgcaccacgtgggaggtggtgatgtggaagctggcttcatcgataaggtttctcactttctcagaactttgagggcccgtcttgagactgccgagcatatcaaggatctcaagattcagctaatagagataaatgaacggcacaagaggtacaaatttgatctagatgacactcctagttctagctttgtggccattgatcctcggttgccagcactgtacagtgaagccgctaatcttgtgggtattgaaggcccaagggaacaggttataaagtggttgacagatgcggatcaacaaataatggtcctaccaattgttggctttggaggtctgggtaaaactacgctcgccaaggaggtttatcaaaaaattggacagcaattcaacaccacggaatttgtttcagtttcccaaaggcctgatgtaacaagatttctcaaaggaatacaatcaaaacttccgataaggctgtcttctgaatattgtgaagttaaagacatcattgacaacatcagagcatatctacaacatagaaggtacctttttgttgttgatgacttgtgggatgcacctacatggaatattattcggtctgtttttccagaaaatggcatgggctgtagaataattgtgaccacacgatcggaagatgttgctagatgggtatgctgcaatcatcgacgattcatttacagaatggagcccctcagtgatgaaaactcaagatggctattctttaacaggatatttggctcggaagatggttgcccttcccaatttagagaaatttccgctcagattctgaaaaaatgtagcggtttaccacttgcaatcattaccattgctagcctattggctaatcagcctgcaccacacaagaaagaatattgggagagtattcgtaattctattggcacctgggggtctggcacaaatcccacgttggaagggatgaggcaaattttacaccttagctacaaggatcttcctcgtcatcttaggacatgcttcctataccttggtatttatcctgaggacttcaccatcaagaaggatgatttgattagacaatggctggctgaaggctttgtccatcatttccatggggggagttcagaggaagttgctaagagttatttcaatgaactgatcaatagaagcttaattcaaccagaagaaaccaaatatggggaggtagtttcttgtagagtacatgatatgatgcttgatttgatcttaagtaggtgtgcagaggataattttatctgcgtggcatacaatctagaagaattgtctggaaaacatgaattcaaagtccgtcgattattggtcgactctagagttggtgattcaggagataccaaaatatcaggaacacctgctcctagattgttgcaactcagatcacttcagctgtttggagtatctgtatccctgtctttgttgccactgtctaagtatatccgagtgttgatattacacttgggaaaaaccgggacaggaggcaatgaaagagttgatgtgaccgcaattgggcaattattccagttgaggtatttgaagattgtaagcctccatcatgcgctcgtactagagcttcctactgaaattcgaggacttcaatatttgtcaacattggaaatagattgcacaaatgagaacagtttgccatcagatattgttcatttgtcccgcttgtcccacctgattgttccaagtggtatagggttacctgatgggaagataggcagcatgaagtccctatgcactctccaaaaaattgagattttagatatcaagagcgccattggccttggtgagctgaccaatctaaaggaccttgagctgtacagtaaacaggctctgtcagagagagagattgatgcgctggtaacttcccttggaaaacttcataagctcatatctctgcgcatgtctaagtttgcagaatgtatctggtatgatgaggataaccggctcggttcattgtccaatcctcctctcaatattgagagactccacctgggaggatggaggttgcgtcgagttcctagatggatcaatggtcacctccaaaacctctgcttcctcgttcttgatgttacagagatgtcaactgatgaggttcggctccttggagagctaccttcactcagtgaactctgcctgagcgtgaagcgtttggctccatgcagcgcatccctcgtattcggtgcagggttcccagcattggagtgtcttgaattcttttgcggtggagatatatcacacctgtgctttgaggcaggggttatgcccaatctcagaaagatcattctgttttacatagatattgaatggagcggcaccgcaccagttggcattgagcacctactggacaaacaactccgatacatccaattacatccggttactgacacagcagtggatgccgagcgtatcagcctcgcattcacagaagctataagagcacatacaagccgtggtggtgctggaccttacctgcgcttcgcccggatccgaagtggtagcctcataggtgcaaactctttaatccggcacagttttacttgtcatagagtttctgctttgtttctcctgaatcacattcttgccattcttttttct

SEQ ID NO: 20451 - DNA, 2041 bp, Oryza sativa
  ref <308>: DATABASE ACCESSION NUMBER: AK070770
  ref <309>: DATABASE ENTRY DATE: 2001-12-06
ttggcgctgtcggagttggatgccaccaaggccagcctctccctgccgtcgtggagatggagctacagctacctggagaagatccggagcatgtccgtcgtcgggtcatcgtcgtcgtcgtcgtcgtctcgctcggcaagatccagtaactacagcagcaccgtctccagcaccgagtccggcgccggctctcaccgtcgtcgctgcaaaaccggcgctgcctccggcggctccttcctgagagtggtagggttccaagtcccaggccctcgcgatatcgccagccaaatggtccgtgacggcttcgtgcttgccctgatcggagcgttcggccgcgcgccgggacccgtgctggagaggtggttctccgagctcgacgtcggctgggtgctccggccaactgatcagcagcagcaggaggaggaggaggaggaggaggccgagcggctggtatggcggtggacgcgagcgctcaccgtgatggcccatgcgctgagcgccacgcagggccacctccacgacgagaggtcagccgccgccgccgccgccgccgccgtcgccgtcgttggaggtgtggaattcgcaatctcccagccgccacatcacacggcgcccgcggtagcttcttcctccgatcatgaactgctgctacgcggcgtcgtcggcggcggcgatgacctctgcctcgtgcggttcactgacacgaccatctccaagatgatcgccttcgccgccgccctcgccgccgccggtaaggccgggacttgcccaactccaaccgcggatagcttctttgggctcatggaggtgcacacctgcatctccgacgtgtcagagatcctcatgcccgccttgaaacaggaggctctcgatctccggctacctgattcagaacaaatgcaaagcctagtcaacaagatcggtgaagccatggcgaacacacaggacagcttgggtgaagccatacggaagacggccaaggatgctgaagctgttactcctgtcttgagcgccatggattcctgggaaaaattcacacagactgaaggaatccacagggctactcggttaatcgtggactatgcaagtttgttctggggataccgtagagtgctggagtccatcctatgttgttacaggagtgaaagtagccagaattgttgggagatagtacaaagcctgattgagcaaatgatcatcaccttcctggaccagctcgagaagaaatccgagtcattctctgaccctagcctgaggtacatcttcttgattaacaactcctacttcatacaggaccagtttcttgccaccaacaccgattacagcttcccatcgagcaaagggatcagatattggcactaccagaattgttacctcgatgtctcatgggagcccgtgctgtctttcctttacctatacaataagatgccaaagttcttccccaaacactccccgcagctgctggccagattccagtcggaatttcagaaagcgtgcaggcatcagaagctgtggaaagtcccgaacaccgagcacaggaactcgctgcgaaaagccattagtgacaaggtcatcactgcatacagaaagtacctggagggccatctggagccagagaaaagtagcagcgatctgctggccatggaagacatggtgaacgagctatttgaaggatgaaggagtactaattcctgttttagaattacatggcctaattggccatgcgtataggataaattttgaagcagctaacaggacaaggggctaaggttaaacaagttcattcgatgcctcttttttctagtgttctgattttttttaaggaaatcttcattctaccttgacaaggaataatatgtacttcagtcttgctgtgccagatttgttggcacattgcaatgcgtgcttcctcttgtattagatcctcctttccttgttcatggcttgtcccgctcggcctcaggggctccgacagatatgggagaacagagacaggcagttcatgttcagtgtgatgtttatctagttcagtttgctaacc

SEQ ID NO: 20452 - DNA, 988 bp, Oryza sativa
  ref <308>: DATABASE ACCESSION NUMBER: AK070771
  ref <309>: DATABASE ENTRY DATE: 2001-12-06
gatcaaagcacactagctcacacagtgaggtagcatagctagctaagccagcatggtctttaagaagaacgccatgtcttcctcggttctcttcctcgccgcgctgctgctgctctcgtccagctccatgagcagcgcggcacggtggctcgaggaggagtacccgccgcaccccaccgtgccggagttacccaagccggaggtgccgccgcaccccgccgtgccggagctgcccaagcatgaggagccgccgcaccccgtcgtgccggagttgcccaagcacgaagagccgcctcaccccgtcgtaccggagcttcccaaacctgagctgccgccacaccccgtcgtgccggagttgccaaagcacgaagagccaccacaccccgccgtcgtgccggagttgcccaagcacgaagagccgccgcaccctgccgtcgtgccggagtttcccaagcacgaggagccaccacaccctgccgtgccggagctgccacacccagctgtgccggagataccgcacccggccggagcttcccaagcacgaggagccgccacaccccgtcgtgccggagctgccaaagccggaggtgccacacgccgccgtgccggagttgcccaaacctgagctgccgccacaccccgccgtgccggagctgccaagcacgaagagccgccgcaccctgtcgtgccggagctgcccaagcacgaggagccgccgcaccccgtcgtgccggagctgccgaagcctgaagagccgcaccaccccgaggtgccggagcatgaacagccgccgaagcctgagagccattaccccgaggtgccgatggccaagccatgatcggatggcgatgcagagattattgatcgggcccatcatatcgcatcctgaataatcatgggtttatttgtatatgtgtgtatgatatgatcatgtaaactgtggtgtttgctaggaatgtgtgagtgatgcttgatgtttcagccatcc

SEQ ID NO: 20453 - DNA, 902 bp, Oryza sativa; identical to SEQ ID NO: 17993
  ref <308>: DATABASE ACCESSION NUMBER: AK099152
  ref <309>: DATABASE ENTRY DATE: 2002-08-28

SEQ ID NO: 20454 - DNA, 3793 bp, Oryza sativa
  ref <308>: DATABASE ACCESSION NUMBER: AK070772
  ref <309>: DATABASE ENTRY DATE: 2001-12-06
gtttgtttatgtgctttttttttttctgatgcagtgcaacattgctgccttccatgaaatgatttcttccaaaagaatggaatgataatttcatcgttcagcatgatgcatttttccactgtatgtctgtaggacccaaacctctttttttttaaatgctcaatcatcggtgcaattgtgtatcatatgtcagattgttgcatgtgtatctgtcagattggtgcaatcatgaatcatgttacaagcttatgtcttggtggcccttttaagttcattaatttcttatttcagcgctctcagtggagtttaccaagtctcaagttgttacatcaatcccaggatttttcttttgcatatggtattctgcgaagaagcattggctagcaaacaatgttttggggattgctttctgcattcagggaattgagatgctatcacttggatcattcaaaactggtgctattctcttggtatgggtggtttgtactgaactgaaacttatattttctggcagaaatcttattacttttttttcaacattcttccattaaaatcattagttagtggagcatgacaatacaatttgaattatctgacattgtagaatttatgcttgtctttcatttgcctatgaaattaaaattcggttatatttgtagaaaccattgcactgcttgctgtactgtgtaaatcattatttacttgtaacgcttatgtatcatgggatttcccaaatccgctcctgctcctagcctcgctcgccgcgcccatcatcatctccaccggcgatgacactgcggccttcgattccaccatcgtggggcggtccatcaaaggtataatcgtgcccgcagtttggtgcaccatgggcggatttgggactgctgctgcgtttgcacggggatcgtagcgccgttctatctagggtttagggcctttggggtggtttggggtttttgctgtaagatgcgtctgatagcatcttggtattttaggtattcttggggtttagtcatagaattgggttttggagtgggtttgtggaggggtgattggaaagttgcaactcttttgccgtgaataaatctgcagtgacatgcctttcctttcacttcaaaaccaatgcatttcggtaatgtctcaaaatttgttttgtatatggtggtttcggcctttttggttgaaggataagtattcccgttttacgaagtatacagatggatgatttttacctgaataacatctcttaatagctagaccgtacccactttgtttcgattcatctctgtgcttggtatgaacttcttttcgtgtatagtccttttatttacatattccttttagcgcaacacttggattttcgtatggttcgcatatttgttttgtttcataatccccttgtaagtttgtatcttaaaattttatggttccaatgtcctattattattttttttctgtgtttttttgacagtcttctacataacatgatggtctaattgattacttatcagcagacaacattgttaagttaactgactgcattttgttattgggaacttccatcaagcttattattaagtatatgaaattgttaagttaacttactgtattttgttattaaacacctcactctgagtttatttatagaatttccattctaaacatagaaatctcttgatctaattagcgaagatagttttcgttgtaattctgttagtttgttgtaaaatacaccatgaggcaactctaaactgtgtgggaagaccaagaagaagaccattttcttttgataaggaacgttcagtgactcaattttaactaggatttttttttgcttatggaaaaatgtgttctatcaaattgattgttggtgtgacctattattcattataggggatgaaattgttaccaatgggaaggaaaagtttattttacctcacaatttatggatctgcggtaagttccatatgcccacaactttctggtataaattgtgttggcacactcttcaggaaattgcaattagttctggttacatcacatatcattggtattccgatgttcaggtaggggttggctcctatgctgtacactatttctccacattggttgcttctattctggaaaattttggtttaagtgaagagatgcacaaccctgtaagtttgtcctcttgaatgtgtcaatgatatcaattaactgatccatttatttacttgacatggtatatttgcttgctgtctgctggcttataatttctgctccataaggcagaaagcacatataatctattgttaaggaaacatctcgcaacgatcaacggggcgaggttggagtccatccacaggaggacgacgtgagagtggccgcagctggagccaaggccgaaaaagaagccgaagctggtggcaatgtcagcggtaagcagagcacagcaggggaggggaggggcgccgtggtcctgctgcatcccggtttgacacctttggattgcataccagaattttccatgttcagctcgcaataattcatcttcaggtaatatgacagtagtccaggtttttagatgattcgcagcaaggagtgaaaataaattgatcagcactgcaacattgatcttttttgtgggttgtcgctttagctaccactctgcttatttgcaagctcgtgatattcatactttgaagtcctttcatatgatgctaatttcatattcattgggagcataacatggaataaattaatggtcaaagtatgttattgaacaccgtgtaaaaaatatatcccttaaaaaatacatgccttcagtaataataggttcaaagtatgttattgaacaccgtgtaaaaaatatatcccttaaaaaatacatgccttaagtaataataggttcaaagtatgttattgaacaccgtgtaaaaaatatatcccttaaaaaatacatgccttcagtaataatagcagtcaagcaacatgctttggggttgttctccatttaagaaattgaggtggtctataacttgggcagtgtaaatattgaagcatcaatgacagatatgcgcaatggaacaccaccacatcagttttcttccgttgctttgtataccctataccatttctgaagatcactataataccaaaccaactgctaacattttctttatgaaacaagcaaccatgcggtcggtggaaaacaattagaggtgcagtgtggagtggtttgtaatccagctagcaagcttatgcgcactcaagatgaaggaaggggatgatgcaatttggagcacctctttctgaccagatggactcagttttcacgggcccaggaactaatgaaaaattggttcatatgtatgttgtgcaggcaatagctctcttgaaaggttctcacagccttacagatcagtagatcacaatgggcaagggcaagattggaaggaagtgagaacataacatgcatctgatgaaggattgacagcaggatagactgagaataagccggtccttttcttttccctttgtttggacataatattgaagaagtgggtatacatttttcagaagaatgtgagcataaatgttgatttatacagtactgaaaaacaattacatagagttgattcatttgttagtacgaaattagtagtgcatacctgaattctgaacatgagcggtctcgacaataaaaacttgagatcctaacaccattctggtcaattgtttaaattttatattagaagtgtattgatatattcaaatttaatttaagatgagcccattgtgccgtgcgact

SEQ ID NO: 20455 - DNA, 801 bp, Oryza sativa
  ref <308>: DATABASE ACCESSION NUMBER: AK070773
  ref <309>: DATABASE ENTRY DATE: 2001-12-06
ggctacgcgctcgacctcctcgccatcctccaggagctccgcgtcgcctcctgcatctacgtcggccactccgtctccgccgtcatcggcgccatcgcctccatctcccgccccgaccttttctccaagctcgtcctcctctccgcctcgcctcggtactattctattctactactgcgtcttcaccaagcagcatacgagtatctcatactactctttattactctcccttatatggattggggaataaataggagtattggactttaatttaattttggtggtgatgaattcggctaaaaacagctccccgaatgggtactagtaccgaggtacgtcacgaggaaattttttgtcgattttgggggcagatggcggcttttgtcttcatagaggaatcagctgtcgatttgcggggcttgtcgtcatgggggaaattggagactcgcagggggaattggttggacgcttggactaggattccttatgtagatgcctctccatcagcatggggcttatggctcgtttaattcactgcagccagggtgagaataggggatcttgcttcaaaggggtgcctgatttctactgacaaattaacaactttcgtgctactggtaatctaggcatctccaattggtacttacccttgatttaactatggacgggtggggcgttggctgtatagaacctccaaatctcaaattagatagctgtattgtcaagacagacaacttgcaaggtgtactgctgtatgtgattagctactcctactctacataattgaattcttttgcctct

SEQ ID NO: 20456 - DNA, 947 bp, Oryza sativa
  ref <308>: DATABASE ACCESSION NUMBER: AK099153
  ref <309>: DATABASE ENTRY DATE: 2002-08-28
gccttcccctcttctcccctcgcctcggcccgccggcggccggccaccaccgccacctcctcctccgatggatctcgccgccgtccacgccgccctcgccggcaagtcctactcctccgtcgccccgctctgcgacgacctcttcctccaggccgcgtcccggggcgccgccaccgacggctggccctacgccgtgcacctcctcgcccacctctacctcaacgacctgaacagcgcgaggtttctgtggaagtcgacgccgcaggaggcgaaggacgcgcggccggagctcgccgccgtctggaggatcgggcagtgcctctggaaccgcgattacgcgggcgtctacgcggccgcgcaggggttcgagtggagccctgaaatcgccgacttcgtggccgccttcctagaaagctacagaaagaggattttccagttgttgacttctgcatattccacaatcagcgttgctgatgtggctcacttcatggggatgaatgaggaggatgctactaactatgccatgcaaaacggttggagcttggatgcggcagccaggatgcttactgtcgtaaaaccaaaggttaagactaaccagaagctcgatgcaagcaaacttcagcgattaactgaatgcgtcttccacctggagcactaaagtccagcattacgggcatcccgcatgactcttaagaaacctatttatcatatgatgccaagccgagattgccttttctccggaaatcagagttagttcagtgttgaatttccatctgcaattgatttctggttagcgaccttagcctttctctgtaatggttgcttgttgatatggttggtggtggttcttgccagacttacactgaagtaaatgacactgcttagtgtcaactcgtaagttaacgttgttttttgaagtatgagttgaaaattgtttcccgttttac

SEQ ID NO: 20457 - DNA, 2121 bp, Oryza sativa
  ref <308>: DATABASE ACCESSION NUMBER: AK070774
  ref <309>: DATABASE ENTRY DATE: 2001-12-06
gaccgccacctccctcctcctcatcaagcattcaggctctcctatcccaaaatgctttgctttccaagcaagcacactccctctctgctttggagattagctctcgtttctcttagtagcagcagctggtgtggcagcatctcatctcatgatctctgattcttcacggctgctgctctcttcccatctcatctcacatttcccagggccacgaaggaactgggttgtactgaagtccaagcagagccacctaccttctcttgcttctctcatctcttgccacaattattggaccggaaattcatgaagatcctctgccggtgctagaacatggcagtctgggtatggcctgagcagtaaagatttgttcatctttgtttattgggatttcttctttgtcaccttcatccctttagactctcccctttagacctctagtgttgctgctgtgcttgtgtatccatggcggcaatggcctcttctccccctacaacaccaaatctcggttcgcagcctacatgggtgccctatgagccaaccagggattgctcccagggcctctgcagcatgtactgcccgcagtggtgctacttcatcttcccgccaccgccgccggccttcgacatcaccggctccagctccgacgactcctccggcccaaccttctcgccgctcgtcatcgccatcatcggggtgctcgcgagcgccttcctcctcgtcagctactacaccatcatatccaagtactgcggcaccttcagctccctccggaacagactccttggctccagcgctcaccgcggcagcggcggcggcgccgacggcggagacaattccaggagccaggagccgtggagcgtcgcgctgtcggacgggatggacgagacgctgatcaacaagatcacagtgtgcaagtacaggcgcggcgacggcttcgtggacagcacggactgctccgtctgcctcggcgagttccgcgaaggcgagagcctccggctgctgcccaagtgcagccacgccttccacgtcccgtgcatcgacacctggctcaagtcccactccaactgcccgctctgccgctgcaacatcgcgttcgtcaccgtcgggatggtctcgccggagccggaggcccgcgttccacgggaggataggagagacaaccacgagctggtcctgacaattgacaacccggagcatgtgcgcgaggagccacagaacgtggtgaccggtgtcgccgtcggcaacggcggccgcaaccacgaggcgaaggatggtccggggaggtcggaagatgcaaatggcacagctgagatcagagaagacggcgccttgatgccgcccacaagggcgccgtcgtcgttgtcagacacgcaccgtgaaggccggatgtccattgccgatgtcctgcaggcgagcctggaagacgagctgatggtggccagggagagcggcctcctggcaggctcttcggggtcctcaagacggtgtcacggggagcacagcaaggacggcggcggccgcagtggccgggcattgccggacggcgcgaatatgaagagattggcgccggccgggagatcatgcttcagcagcaggagtggcagaggaaaggactccgttcttccaatgtgaggcaaccaaggtggttcttttgacagggaaacatgacaagaaacttttgtgtgttcttccggtggagatcaaatgatcaatgtgccggctgcatctgcgatgcgcgtatggggatttcatcctgttttgatcacttcccgtgatgcccacatgctgaagaaatccttctcctgcaatgcatggtgagtggtgagatctcctacatgtttctactagataactgtatagggtttgagaagttttcctttttctttctttcttccatgttgccacccctctctatacaattgggatctgctccagagcagcctctctggattagtgagttaggcattactagatcaaagactctccaagtgagaagtgtgacactttcagttctttttccacctccatttttgtgtgcttttgcgtctaccattttatcttcctaggtgtcattgtggcacaatttggggattgaatgagaaccgtggccaattcagcttg

SEQ ID NO: 20458 - DNA, 1654 bp, Oryza sativa
  ref <308>: DATABASE ACCESSION NUMBER: AK070775
  ref <309>: DATABASE ENTRY DATE: 2001-12-06
tagtgttctccatcagtagcagtatcagacaacacttcttccactcactcaataataagcagcagcaacactactctaatcaatactcaattctacacttgtactactacatcagcagcagtggactagctggaggaagaatccattgttcataagcatggggctcatcaggcggctgatcccatccggattccctgcaattctcagaaggaggatgaggggccgggcggcggtgttcgcggcggtgctggtcgtgttcctggtggcgtgcaccgccgcggcggcggcggcggcgattaccatatcgaggaagcaccagcacaggccggcgtccggggcggcggcgaaggcggcgtgcgacgtgttcgcggcggggagctgggtggtggacgagtcgtacccgctctacgactcggcgacctgccccttcatccgcgccgagttcgactgccgccggtacggccgccccgacaaggagtacctcaagtaccggtggcagcccagcccgccgtgctccacgcccaggttcgacggggtggcgttgctgaggatgtggagcgggaagaaggtgatgttcgtgggggactcgctggcgctgaaccagtacgagtcgctgctgtgcatgctgcacgccgccgcgcccaacgcccggaccaccgtcacgccggcgtcggggaaggtcgatcccctcaccaccgcccgcttcgaggagttcaacgtgacgatcgtgtactacctgacgcactacctggtggacattgtcaacgagaaggccgggcgagtactcaagctggacgccatcgaccaggcacgcaactggctcagcgccgacgtgctcgtcttcgattcctggcactggtggccgcgctccggcccgacccaaccatgggactacatccaggagggcaacacggtggtgaaggacatggacaggacggaggcgttcagcaaggcgctcaacacctgggctagatgggtcgacgccaacctcctccaggccaacaccagagtcttcttccagggcatctccccctctcactacaggggccaagattggggcgacacggcgagtgcgacgtgcatggggcagacgcggccggtgaacggcacggcgtaccccggggggccgatcccgcagcaggcggtgctgaggagcgccctcgccggcatggcgaagccggtgtacctgctggacttcacctacctgtcgcagctgaggaaggacgcgcacccgaccaagtacaacggcggcatcttcggcgacgactgcacccactggtgcgtcgccggcctcccggatacctggaacgtcctcttctacgccgcgctcaccggccagcactgatggccggctgctgacctgctgtcatcacggccggtgatatgattgagataggatatagtggaaataattaatcaacaggaaaaaagaattatagatacagattgattttatataggtctatatggaaagaatttttctcgaaaaaaaagaaacagaagattattgttaccaaagtgacagaagaaatgcctgattctctctcagaaatgggggtgaattaaagatgctgtaattggttggcaaagaaggataagaaagaattaattgttctcatgtggttataaagataaacagattgttttggcagtt

SEQ ID NO: 20459 - DNA, 727 bp, Oryza sativa
  ref <308>: DATABASE ACCESSION NUMBER: AK070776
  ref <309>: DATABASE ENTRY DATE: 2001-12-06
gagggtgcagcgtgacgagaggggatcgagcatcccgtcaccttcccactcctcatttgctcgctcggtcggtgcctcacgagcgtcgtcgccgtcgtcgccgccgttgcgcaacgacggttgctgctttcccctcccttcacatcaccgggacgatggggacgaaggtccggcctgaagggagggcttggggatgagggatggattgcctccactcctcttctcgtcgtcggccgccgcctccactttccacgccggtcgccgctactcttcctcaccgacgaccaccgccttccaactctctctctcgctgctctttggccctcgcaaaacgccggatccagcggctacgagctcggcaccgccggatccgactcgtcatacggcgggcgtgcggttggggcgatggagcggcatgggcaggcgcagcggcgtgtagcggcatgggcaggcggagcggcgtacgggcgagcattgcggcgttgcggactgctctatgacggttctctttattttgcttgttttttttctaatccgattgattgccgggtgaattaagggtcatttgaatattaggaatgaaaaaatggaggaataggaaaaacgtaggattctgacagaaatataaatgcaaaacagaggattgcaaaacgcagaaaaaacacagtaatgaccgtttgattgaaccgcaggaaaaacgcaggaatcggatgagagagatagacgc

SEQ ID NO: 20460 - DNA, 579 bp, Oryza sativa
  ref <308>: DATABASE ACCESSION NUMBER: AK070777
  ref <309>: DATABASE ENTRY DATE: 2001-12-06
gagggaaactggtggacacaatcaggaggccattcacagcagcttcaacgtttcatcgatcagcaacaaggcatctccagccactggccatgttggctcagaggaacggcattagcaggaggggccttctcactttcctcacctccactgcagccatacctgaggctggtgaatcaagaaaggctctactgcaagagtatctgaagaaatcaaaggaaaacaaagaaaggaacgacaaagagaggctagacgactactacaagaggaattacagggattactttggtctgatcgagggccctgcaagacagaagaatgaagatgagcttacagagtcggagaaaggaattctcgaatggcttgacaagaacaaatagtcagaagctcaggataatatgcatgcctaaattctggaaggttttcttacagttattgctttagttatgcagtcttgtgctgcttatctgagaggcatgctttcttgaaggtcatcctttgtagtgccggtactctggcagtaatgttgtaattacaagtgtgttcatagacaaagtataaaaaatgctgaacgatctcaac

SEQ ID NO: 20461 - DNA, 744 bp, Oryza sativa
  ref <308>: DATABASE ACCESSION NUMBER: AK070778
  ref <309>: DATABASE ENTRY DATE: 2001-12-06
ggttcggctcttcttcttcttcgtcttcgtcttcctccaagaagaggaggaagaagaggaggagcggcgccaagagctgctccttcggctccaccacgtcttcgtcgtcgtcgtcgttggcggcgtcatcatccgatgattccgccgccaccacgccgagatccgtgttgccggcgtcggcggcggcgtcctcctccggcaccaaaaagccggcggcggtggccgtgacgcgggaggacctggaggtggccctgcggaggatcgtgtcgagcaaggaggagctggccgcgatgctcgccgaggcggagtgcgccggggagctcgtgctggaggagatcgcggccgcggcggcggacgagggcgagctgaaggagacgttcgcggtgttcgacgccgacggggacgggaggatctccgccgaggagctccgcgccgtgctcgcgtcgctcggcgacgagctctgctccgtcgacgactgccgccgcatgatcggcggcgtggacaccgacggcgacgggttcgtctgcttcgacgagttcgcccgcatgatgatgtatggctgcgcgtgattatatattggttactaggttttgatcgatgtacgtaatgcatgttaatcgatcgtctcctgtatgtacgtgtcgttcatctgctgttcattgtctccactgatttcttttgttctctttgtacgtagtacgagtttcacagaagaaatgaacagaacggtcagtttagatcgct

SEQ ID NO: 20462 - DNA, 1044 bp, Oryza sativa
  ref <308>: DATABASE ACCESSION NUMBER: AK070779
  ref <309>: DATABASE ENTRY DATE: 2001-12-06
gtcctcagctcccacctccgtctccgcgcacgctccaatggcggccacggctgtgaccctgccgtcctcgccggcccccttccccgtcaccaccaccgcctcctcctcccgtaacgtccgcctcctcctccgctccccgcctcctcgccgagccctccgcgtcgccgcctccgccgcggccgacgcgccacccaagccggcgccgccgccgacctcgccttcgggcatcgtcctcgtcgaccccaccgaggcacagaaggtgcaccgcctcaaggctgtatacgaccagaaggtggtccccctcatcaccgaggagttcggctacaccaatgtccaccaggtgcccaaggttgagaagattgtagtgaattgcgggttgggggctgaagccggtaactccaaggggctcgaatccgccatgaaggacctcgccatgatcaccggccagtggcccgtcaagacgaaggccaagaagtccgtcgccagtttcaagatccgcgaggggaacaccattggtattgccgttacgctccgcggcagggtaatgttcaacttcctggataggctcatcaaccttgggcttcctaggaccatggacttccttggtgtcaaccccaacagctttgatggccatggcaacttcaccataggccttcgtgatcagggcgtgttcccggagatcccgtacgaggtcggtgggaagaagaatggaatggacgtctgcatcgtcaccaccgcgaagaccgacaacgaggctctcaggctgctcaccctccttggcatgccgttcgcggagcacatcaagtcctccgtggtgatccggaagaagaggttgaagcgccaccacttcatgagcaagggcaggggaagacggtgattgcaaaccgctgcctaggcacgttgagctttgcttctcactttgtcaattgtcattgtttttgcaaagtttcgtttagaagtttgatgattttgttatcttgtcacgtgctgtatttactgtcagaagacaaaatgaaaaggctttgctttggtcaggtcattcgc

SEQ ID NO: 20463 - DNA, 1563 bp, Oryza sativa
  ref <308>: DATABASE ACCESSION NUMBER: AK070780
  ref <309>: DATABASE ENTRY DATE: 2001-12-06
gaccccttttcccactagtacttgccgtgccttcctctctcctctcctcttgtctccattgctttctcgggttctcctccactcctctcgtctcgcgtgagtactcgcgacctcaccgccggcggcgacgagcggcggcggcggcggttgaggaaggaagggggagggagagcaggaaatgcggatgctgtccaaggcgtgctcgctcgtggcctcctccctcccgcggtgctcatcctccgctgcccccacgatcagagggcagccgtcgttgctgccaagcgtgcgcaaggaatggcttggcaagccgctgctgtacggaatcggcacgctgctcgtcatgcctctgaggacgctgcacggggtgggacggatgtttggcgctgggcggttcctctgcaacatgaccagcgtctcgtcgtcgctgcaaattgagctcgtaccctgccttcaagataactatgcttacatcctacatgatgttgatactggaacagttggagttgtggacccttctgaagcaacgccaatcataaatgcactagaaaaaagaaaccagaacttgacctacatactgaacacccatcatcactatgaccatactggtggcaacttggaactgaaggcaaaatatggtgcaaaggtgattggttctgcaaaggatagggatagaattccaggcattgacataactcttagtgagggtgacacatggatgtttgctggtcatcaagttcttgtaatggaaactcctggtcatacatcaggtcatgtgtgctaccacttccctggatctggagcaatatttacaggggacacattgtttagtttgtcatgtggaaagctttttgaagggactccacaacagatgtactcttcactccagaaaattatagcacttccggatgagacaagagtgtattgcggacatgaatatacattgagcaattcaaagtttgccttgagcatagaaccaggaaataaagacttacaggaatacgctgcaaatgccgctgatctccgcaagaggaatacacccacggtgccaacaacaattgggagagagaagcagtgcaatccttttctgaggacctcaagtccagagataaagaataccctgtccatcccagaccattttgatgatgcacgcgttcttgaagttgttcgacgagcgaaggataacttttaactaaccataaaaaaggaaaatttcacgtccatgacccaattgtcatgttgaggagagaagcagacaaagaactccacaagagaaacaaaagaactacaaggtatatgatgactacataagatcgagctagtttgtttctaaaatgcttcggcaaaattgtgtcgcggtgtatgtagcttttggcagtggttgtaaaatgtcgtccaatagcagctggtgattctttctatcaactacaaataagtgtgatctgttatcatcaactctgtaaaaagaatgcgagttagagattgatagttctcccagaatctcaatcctgtccttatgactcatttcatttgaagtgtttaagagtcagttcttacggagtaggc

SEQ ID NO: 20464 - DNA, 1223 bp, Oryza sativa
  ref <308>: DATABASE ACCESSION NUMBER: AK070781
  ref <309>: DATABASE ENTRY DATE: 2001-12-06
ttgggtagagagggccatggaactaaatattccacttgactagagcccgatcgagaggaacagaaagaagggaaataggagctatggtaagctgcagggtgtgtgtcaccggggccagcggctacatcgcgacctgcctcgtcaagaagctcttggaacgaggctgcatcgtccatggaacattgagaaatcttggagatgagaagaaggcggcgccgttgagagagctccccggcgcggcggagcggctggtgctgttcgaggcggacatgtacgacgccgacaccttcgagccggccatcgccggctgcgagttcgtcttcctcctcgccaccccgtttcagcatgaacccagcagcaagtacaagaacaccgccgaggcggccgtggacgcgatgcgcatcatcttgaagcaatgcgagcgatcaaagacggtgaagcgcgtcatccacactgcctccgtcaccgccgcctcgccgctccgggaggacggcggcgaggggtacaaggacttcatcaacgagtcctgctggactccactcggccagtctcacccatacagcagcgacatgtcggctataaatcaagtttacgcatcatccaaaacgctatccgaaaaggcgctgctgaggtacaacgagtccgagagcagggcgttcgaggtggtcaccctggcgtgcgcgctcgtcggcggcgacgccgacaccacccggctctaccacctgctcagcgtcccggcgatcgtggcgccgctcatcggccaggagtcttaccacggcggactcaagtacctgcaggcgctgctcggctccgtgccgctggcgcacatcgacgacgtctgcgacgcgcacgtcttctgcatggagcagccgtccatcgccggccgtttcctctgcgccgccgggtaccccaacatgaaggacttcgtcgaccacttctccgccaagtatccggagatcacgatcaagctccgagaggtggtaggggagggcgtgagggtgggagctgatacaaacaagctcacggatttggggttcagatacaagtatggggtggaggagacgctggaaggtagtgtggaatgcgccaagagaatgggattgctgtgatatgcggctgttgcgttgctcgttggtgtttagtaatttgcgtatgtgtagttggcaccgatttggacccagatgtgtttgtgcctttatgctaaaaaaaggttaattagatcc

SEQ ID NO: 20465 - DNA, 1058 bp, Oryza sativa
  ref <308>: DATABASE ACCESSION NUMBER: AK070782
  ref <309>: DATABASE ENTRY DATE: 2001-12-06
gaggtagctagctagcccgaagttatcatcaaactgatatctcctcatccgatcctcttcttgcttcacctgctgccctctgctccggtcgatcgcttgcatattgcatatttgcatgcagagctgccatgggaataccttctttctacaggtggctcgtgaacagatacccaagcatcgtctccccggcaaaggagagccgccctgcagatggcatcgtcgtctacgacaacctctacctcgacatgaatcaaatcatccattattccttccacccgcaggaccagatgaacgccggcacagatgtgtgcgctccgacgacggtcagcgaggttttcgagtccatgttcgactacctggaccgcttgtttcgcatcgtcaggccgagaaggctcctctacttggcagtgggttcgtcgtagatgtacagcagatggatcgttggatcgattctctcgtcaaattacttagtaccatattgtcgtttcaagaattaatcatggatttgtttttgttggttggcttggcttcaattatttctgcagtttatgtacttcttttattattctctctcactgcacgctctcttttttttaaaaaaaaatggtttaattccatgtgcagatggggttgctccgtgcgccaaaatgaacggaatgcgaagaggacgacgtttcgcctgggtagccagagtcaatcctttgcatttatttattttcttgcatgtcgatcagctagctagctgctgaagcaattgatcggtcgagaaaaaggcatccatgctttggttcaattttacaggcgagtgaagaggaggaaatgcagaagatatcagaaggggtctctgaccccaatgtcatcacgccagggactgaattcatggagaagatatcgcaagcgctcacgtactacatccgtgccagattgaatagcagtgatccagggtggaaacacatcatggttaattaattttctcttgcacttcttcagtataaatgtacctcgtattctttcttaatttcccgttttttttatccaaggagagtccatgcatgttc

SEQ ID NO: 20466 - DNA, 1367 bp, Oryza sativa
  ref <308>: DATABASE ACCESSION NUMBER: AK070783
  ref <309>: DATABASE ENTRY DATE: 2001-12-06
gaaaggcttgacgcagtctctgccgaaggtcagggtttggaaccttccaaaacttgtgatttgtgtaggttctttggaattctgactcaaacctatcaagtgacaagtatcttcgaaagccgaaaggtttgccggctcttgtctttccaagactaatagaagggttttcaatgaacaggcaactcagcagaggggaccaggagacatggaggtaagtatctatgtacctctgtgtcatgcttgtttctatcagggccgaagatggcaggtccatggattcaacgcggcgcaagacaagctgccaattgttgagcaagaatatgcaccgcaatcccgggtccgagatgagaagggatgcttcctcgagcttgctcctgaggcaggagatcatatcggtgattaggttcaccaccgcgttgaagccctcggtgtcggagatgaacaagcggaagtggtgatcctgtaggatgaatttgagcacgtctccgttgcaccaaacaagtgcgatgtagttcatcatcagctgcgtccggtgagacttgccagaaggtgtccatcaggaaggatgcccgaaccttctccatcattccccagatagcatcactcagcttggacctcttccgcgagaagatgccattgatggcgtcgtcaaatgccggccccggccgcgcctcattcttcccggagccggagccggaggacatcggatgcctctttgaagaaggcgagtgatgacgacgaccttctgtctcggagctcgagcagcgtcatggagaggacctgcaccatgattaggagagctctcatccaccgctccatcaacgccatcaaatcttcgacggaggaggagtctagatctctttgtccggcgtggaggagcagaacccactcgacgtccagctgcgagaaccacttgtggaggagagcttcgtcatggcggcggcggccgaacgcccggatgagtccttgcgtgtagttgtcgcggaccatctggtggagcccggatgacgccgccggagccggagaagctgaccagcggccgctgccgccgccccaaggggatgacatgcaagaagacgacaacgtcgagggcgccgggctagaagccgtggagctatcgctggaccagcctaattctccggcagcgctgctgatctgcgggaagaagaggccgccgcccctcctcatcgaccaccgatgctgatggggccgcccctccaaatccatgaacgacgccaaggcctccatgaacgcgtactgtatacaagaatgaaatctgtgatcgatcgccgcgagcacgtgcctccccgggccgatctcgtcagtactatatactatactactgaggattttcctcgacctcgcct

SEQ ID NO: 20467 - DNA, 1038 bp, Oryza sativa
  ref <308>: DATABASE ACCESSION NUMBER: AK070784
  ref <309>: DATABASE ENTRY DATE: 2001-12-06
ggtccaccccccgtaacattaactcctttgttcagcttgacactccattgcagagggagggtatagctggtgacagagagaaatgggcgaggaggccaaggccgccgccgcctgggctgagatcgccgtcaccgacgccgcggcggtgccaaagccgacgccgccgcctgcggccgtggccgtcgacccccggcttcagggcatctccgacgccatccgcgtcgtcccccactttcccaagcaaggcatcatgttcaacgacatcacgccgctgctgctgcgcccgggggtgttcaaggacgccgtcgacatcttcgtcgagcgctaccgcggcatggccatcgccgccgtcgccgggattgaggctagggggttcatatttggcccggcgatcgcgctggcaattggcgccaaattcataccgttgcgtaagcccaagaaactcccaggcgaggtgatttctgagacgtatgttctcgagtacgggaccgattgcttgcagatgcatgttggcgccattgaacctggtgagcgtgtgctgatcgttgatgatctggttgcaactggtgggacactttgtgctgctataaggcttcttgaacgcgctggagctgacgttgttgagtgcgcgtgtctcattgggctcccaaaatttaaggatttctacaagctcaatggcaaaccagtttatgtgctggtggagtcccgcgaatatgaaaaataaagagattgatgatcaggaatgcacatggcttcattccttacaaattgcaagtgagcgctggacggatatcgacaagtctgcggtacattattaaggctaagctagctgctaagtattagaggggaggtgagagagagcgagagagagagagattggtgagtggggagtagttcttgtaggctgagtagtactagttttttcaggggcactgaaaaaagagcttgtagtttctgtcgggaacaccgattactagctgaaacatcatcagttctgttcttcttccattgttgattaaaatttccgtggtttcgacc

SEQ ID NO: 20468 - DNA, 1739 bp, Oryza sativa
  ref <308>: DATABASE ACCESSION NUMBER: AK070785
  ref <309>: DATABASE ENTRY DATE: 2001-12-06
gtcttcatcattctccatttttgtttgctcctacaagaataatcagtagtgttgtgatcgcatcatcaattcattattcatcatacagcaatggcagctgcagaagtagaacacagcggcagctccctccccaagaagctcgtcacttttgctctctgcgccatcttcaccttgtccctcatctacttctcctcccctcctctcatcatctcctccaccaccaatcttctctcccaattccaaacacgcgcacgagctagaaccaccgatttttctactcatctcccaggggtagctgtttggaagcaatgcgactacagtgatgggaagtgggtgtgggacggcgaccatggcggcgccgccgccggcggcggctcgaggtacgacagcgagaactgcgacatgaagatgacgtacaagtgcgtcatcaacggcaagccggacggcggctaccttcactggcggtggcagccggcgtcgtgcaacctcccggcgctcgacccggcggcgttcttgcggctcctccggggcaagcggctggcgttcgtcggcgactcgacggcgcggaaccaggcggaggccctcgtgtgccacctcgccacggcggcgcggccggtgacagtgcggcgcgacgaggagcggctggggcgcaagtctggcggtgggcgttcccgtcgccgcacgacgtgaacgtgtccacgtactggtcgccgttcctggtgcggtcggaggggcactcggaggactacggcatggcgcacgaggtcgtcgtcctcgacgcgctcaccgagccgtgggcgtccgacctcgccgccatggacgtgatggtgatctccgcggggcactggttcccccacagcgccgtctactacgacgacggcgagatcgtcggcgtgcacggccggccggacatgaaccgcaccgagatgagcgccccgtccgtgtaccgcaaggtgttgcgccggacgctggagcacgtgatcaacgccaccatggcggacaagctcgagctcgtcgtggtggagacgatcgcgccggcgcacttcgacggcaggtacagctggaaccaccgcgacgcgtgctcgcgccagaggccgtacgacggcgacgtcgacggggaggcgaaggtgggggacaccgaggccgagctaaggaaggccgtgctggaggaggtggcggcggcggccacggcggcgaggcggcgctgccctgggctgcggttcgaggtgctcgacgtgacgaggctggccgccatgcggcccgacgcgcacccgggcgtgtacatctacaagaacgcctacggcggcggcccggtgccggagacggcggcgaacgactgcctgcactggtgcgcgccggggccggtcgacacgttcaacgacatcctgatgcagatgatcgccggcggctagctggccgccgccgcccgccgtcgtcgagctcgatccggcacgtgcggcgcggtgtgtcgccgcacgccgcgttgcatggtctctgcgtctgcgtggatggtggatcagatcacgagaatccgaagctgtcggttttgttctgactggttcttgaatcctgacaattgactttgatggagggaatgttcttctgccaatgggattcagaatcgcagtttgcagatgcaacgtgtgctgacttcaatctcgatgccattgattggcacagtgtacaatggtctatttcaccttgaatataagcatttttatattatttagcagttaagg

SEQ ID NO: 20469 - DNA, 1258 bp, Oryza sativa
  ref <308>: DATABASE ACCESSION NUMBER: AK070786
  ref <309>: DATABASE ENTRY DATE: 2001-12-06
gggcttctgagaggaggagaagtcagtgattgctcgctcgtttttccaagaaaccggccggactcgagcgctcgtcaagtccgtgttccagatcgagtttgtagagccatggcggcggcggcgcgcgcgatcatatgcgagatggcgccgcagaggggggtggcggcggcgccggcggcgccggcgcagcagaaggcgacgacgagacgggacggtgggaagatcatgctccagccacgcctctgcacgctccggtcgtacggcgccggcagcggcgtggtggcgcggaggcgggtggtggaggaggaggagagcggcggcggcggcgcggggtcctccccgttcttcgcgtcgctagccgactacatcgagagcacccgcaagagccaggacttcgagaccatctccggccgcctcgccatggtggcgttcgcgacggcggtggcggtggagttgacgacggggaactcgctgttcaagaagctggacatgcaggagatcgaggaggcggccggggtgtgcctcgccgtggtcgccggcgccgccgcgttcgcgtgggtgtccagcgcgcgcaccaggatcggccagatgttcacgctgggttgcagcgccttcgtcgactcgctcatcgacaacatcgtcgaggctctcttctccgagggcgagctgcaggactggtccgacgacgtatgaatcgacgtcatcagcaattcagtatagatcgaaatgatatacatgtatagatatgcgtatagttatatagatggtatactataacagcatgattagcagaggaaagtatagatcgatatgatatgatatgatagatcagctgcatgtgtgaagcaaacttttgcaagtttcatgatttcatcatcgtcgattcacagacgcatggcgcatgcagagatatgattcagatcatcagatgggatccggcccacaggataggatgcagatctagatggttcagacttagaatcatcgtacacagatcctgtagatggttttggaagggttcggcctatcattacaacttcgcaatctgcatgggagttcattagtctgaattctgagagcagatctaaggtttgttttttggtctagcaagggagtcctgaatatggctgtgaaatgtgtatgtctctcttcagtgtatatatatactgggggttgattgatcagcccctaaagttaactgtaactagaacatgtatcttctgaggaaataataaattctagagtcttgagactacgg

SEQ ID NO: 20470 - DNA, 1194 bp, Oryza sativa
  ref <308>: DATABASE ACCESSION NUMBER: AK070787
  ref <309>: DATABASE ENTRY DATE: 2001-12-06
gagaagcagagatggagaggaagcgtgtgctcgtcgtcgggggcagcggctacctgggccagcacctcctcgccgcgctcgctgccggcggcgaggtcgacgtcgccttcacccaccaccgcgacaccccgccgcagccgctcctgcacgcgctccccgggcttcgcgccttcagagtagacctccgctccggcgatggcctccgcgccgtctccgagtccttcggccagccgcatgtgattgtgaactgtgctgcaatctcggtacctcggcaatgcgaaacggatcctgctgctgctatggctactaatgtaccttcatcacttgtcacttggttgttaagctttgggaatgacaacactcttcttatccatctctcaacagatcaagtttacgagggagtaaaatccttctacaaagaggatgatgagaccttgccagtgaacatgtacggaaaatctaaagttgctgcagagaagtttattattgaacaatgctcaaactatgcaatcttgagaagcagtattatttatgggccacaaacaatttctcctgtggcaaaatctcttccaattcagtggatggatagtgttctttcacaaggccaacaagttcaattctttaatgatgagttccggtgtcctgtttatgtaaaagatatggtggatgtagtgttgtctttgacaaaatcatggttagcagatggtaaagctgttcaagtactcctgaatgtcggtggaccagatagagtctcaagactgcagatggctgaatctgttgctgatgttcgtggatatagtcattctataatcaaatctgtatctgcttcatcggttgaccggggtgtagcttctccaccagacatatccatggatatcaccaaactaacccaaatgcttggtatcaagccaatttcatttcaagatggagtcagagctacacttgctgcagaagctagtacatgacactttgtctgttcattttgccaagagagctgcttggatttgtctgtgaaagtatgtgagataaagagccactttcagtttgttgaacagtggcaaatctgtgttgagtatatgtgaaagatgtaacttttcgacggtgtgaaaaaggaaattttgcgttcacccgacatcaatatcatgtattactgtctggttttatacttccgaataaaatcatcattcattttgt

SEQ ID NO: 20471 - DNA, 2009 bp, Oryza sativa
  ref <308>: DATABASE ACCESSION NUMBER: AK070788
  ref <309>: DATABASE ENTRY DATE: 2001-12-06
ggtcactaccaccattctcttcttcgtctacttccagctagcctgagctctagcttagctctagcttagcctgaagaagctaagagaggaagcaacaatggagattgagagagagagcagtgagagagggagcatcagctggagagctagtgcggcacatgatcaagatgccaagaagctcgacgcagatgatcagctgctaatgaaggagcctgcatggaaaaggttccttgcccatgttggtcctggattcatggtgtctttagcctacttggatcctggcaatttggaaaccgatctgcaagccggagccaaccacagatatgagctgctctgggtgattctgattggactcatcttcgcacttatcatacagtcgctagcagctaatcttggagtggttacagggaggcatctggctgagatctgcaagagtgagtaccccaagttcgtcaagattttcctatggctgctggcagagttggccgtcatcgctgcagatatcccagaagttatagggacggcctttgctttcaacatattgttccatattccggtgtgggtcggcgtcctcatcaccggcaccagcactctactgcttcttggcctccaaaaatacggggtgaggaagctggagtttctgatatcgatgctggtgttcgtgatggcggcgtgcttcttcggggagctgagcatcgtgaagccgccggcgaaggaggtgatgaaggggctcttcatccccaggctcaacggcgacggcgccaccgccgacgccattgccctcctcggagctcttgtcatgccccacaatctgttcttgcattctgccttggtgctatcgaggaagacaccggcatcagtcagaggaatcaaggacgggtgcaggttcttcctgtacgagagcgggttcgcgctgttcgtggcgctgctgataaacatcgccgtcgtctccgtctccggcaccgcctgctcctccgccaacctctcccaagaggacgccgacaagtgcgccaacctcagcctcgacacctcctccttccttctcaagaacgtgctgggcaagtcgagtgcgatcgtgtacggcgtggcactgttggcatctgggcagagctccactattaccggcacatacgctggacagtacatcatgcagggtttcttggacatcaggatgaggaagtggcttcggaacctgatgacaagaaccatcgccatcgcgccgagcctcatcgtctccatcatcggcggctccaggggcgccggccgcctcatcatcatcgcttcgatgatactgtccttcgagctgccgtttgctctcatccctcttctcaagttcagcagcagtaagagcaagatggggccccacaagaactctatctatataatagtgttctcgtggttcctgggtctgctcatcatcggcatcaacatgtacttcctgagcacgagcttcgtcggctggctcatccacaacgacctccccaagtacgccaacgtgctcgtcggcgccgccgtcttcccgttcatgctcgtctacatcgtcgccgtcgtctacctcaccatcaggaaggactccgtcgtcaccttcgtcgccgactcctccctcgccgccgtcgtcgacgccgagaaggccgacgccggcgacctcgccgtcgacgacgacgagcccttgccgtaccgcgacgacctggccgacatcccgctcccaaggtagagaagaagaagatcgacatgcatacgtatggtatagcgtatgtatacgtacgtatatacgcgtacattgtgaatatacgtacttacgtacgtatatgtgcatcctctatggatgccacgtgcgtgcgtcggagccgttcgtttatatttgtgcggtccagatcgctcgcagatcgatcgatcgacaagggtgtgcaattaatatataagcatttgaggggaggtggctcatgtatccttgtaatttatatgtacgatatgatttatcataattcagggcagagccaacgtcctcc

SEQ ID NO: 20472 - DNA, 1675 bp, Oryza sativa
  ref <308>: DATABASE ACCESSION NUMBER: AK070789
  ref <309>: DATABASE ENTRY DATE: 2001-12-06
ggggtgtactttttccatcccctttcctccccctcttgccacgaacccttcgccgtcgccggcgatcccaccgactcccggccacctctgcttccccggcgatgtctctgctttgcgctccgccgtcaatgcgcgttgcccgggctatgcgtcgccttctccctgtgtccttgtgcgacccgagccgcaaatccaggccccagagccgcaggattgacagaactcagggagatctcctgatccggtggttgttcggttcgctgccccctccttgcattgataaaggattttgttgcaaaccactagttatggacccatgaaacggacgaggagggcatcttactgaaatagtgcaacgaggagtactctgcacacggtggttggatggagatatatcatagcaacaactgaacaagtatcatcataagacagttctgtgtcctctccttggcatcgatgaaggcttctattatgcgatcccacctggtattgatgcactgaatgaaatgcaaaggaattttcaaacgcattgtacagcctatgaggggtccagtgtttgaggctacataatatgaatgataaagataaatcaaggctatcacagaacacagaataaggatcactgagcaatacgtaggctatctttcaaacatgtgccaactgggggatggaagaagtatcctcttctgggaggattgctggatgcaggagggaggtatacgagccattgcgccttccatcttcgaacatgttcctgttcgaatccgcaaacgcaggacggtcgcggaagcactgctcaataaagcatggatcagagacatcagcgggtcacttggagttcaggcaatccgagaatacctcaagctctggtcacttctgcaaaatgctggttgcaatccctctgagcaagatgtgatctgttggaaatgggacagctcaggacaatactcctccaagtcggcatacagagcattatttctaggtcgtgttccatttcaatcagcaccgatatggaaatctctagcgccgcccagatgctgattctttctttggctggtcgtattggacagatgctggacagcggatcgactacgtcgtcgtggcctaccacatcctgacagatgcgtactttgtgatcaacacgacgagagtattgatcacattcttgttggcttgacagatgcgtactttgtgatcaacacgacgagagtattgatcacattcttgttggctgcccagaatccagacaactttggtggtgggtgttaagggcaattgggcaccctgagtgtctgccggtggatgaaccatcattctaccaatggctctgcagcagtcgaataagaatttgagagcatcttcggcggggctttgacacggtagtcacgctagtggcatggacaatttggaaagaaagaaacggccggatattcaatcagcaacaaaggacctgggtggacatcgtgaagggaatggcagcagaggccacgctatggcgtcaagcaaaccaagccatcccaatctttaggagggaatttggtagccaaaacagaccgcgagacgtacacctttgatttcctgcttgtatcctgtctcagtcccctgctgctttgtgtttgtctgtaaataacttttattcctcttaatacaaaaatgcgctcctcgcgtattccct

SEQ ID NO: 20473 - DNA, 2016 bp, Oryza sativa
  ref <308>: DATABASE ACCESSION NUMBER: AK070790
  ref <309>: DATABASE ENTRY DATE: 2001-12-06
gacagcaggcgccgcgcgcgctatcgatctccgccgcctgaccgccgtaccaccgtctcccggcagctagcgtcgaccggcgtcatgtcgtcacggcgaagcatgggagccctggccgctgtctgcgtctgcatgttcgtcttcgtctcctccgcacgggcagaagatccgtatagatttttcgattgggaggttactactgggaacatcaatcctctcggcgtccagcagcagggtattctgatcaatgggcaatttccggggccggagattgactgccagacgaatgataacttgatcgtcaacgtgcacaaccgtttgtcggagccgtttcttctgtcatggaacgggcttcagcacaggaagaactcgtggcaggacggcgtgtccggcacgaactgcccgatcccgccgggccagaacttcacctaccaaatgcaggccaaggaccagatcggcagcttcttctacttcccgtcgctcgccttccacaaggccgccggcggctttggcgccatccgcatccgcagccgcccgctgatccccgtccccttcgatccgccggccggcgagtacaccatgctgatcggcgactggtacaagaccagccacaaggctctgcaagccatgctggacagtggaaagcagctgccttcccctgatggcatcctgattaacggcaaaggtccaaatggcgcaagcttcaccgttgagcaagggaagacgtacagattgcgcgtctccaacgtcggcctgcagagcacgctcaatttgaggatccaagaccacaacatgacgctggtcgaggtggagggcacgcacacggtgcagaacacctacagctccctctacgtccacgccggccagtcgctgtccgtgctgttcacggccaaccgcccgcccggcgtctaccaaatcaccgtctccacccgcttcgccaagcgtgcactcaactcgtccgccgtcctgcgctacgccggctcgagcgccaccatctcctcaccgccgccaccggctggcctcgccgacgacatcgacttctcgctcgaccaggctcgctccatcaggacgaacctgacggcgagcgggccacggccgaacccgcagggctcgtaccactacggctcgatcaacgtgacacgcacaatccggctcgccaactcggcggggcgcgtcgccggcaagcagcggtacgccgtgaacggcgtgtcgttcgtggaggccgacacgccgctcaagctggccgactactacaggatcagcgacgtgttccggctcggcggcatcccggacgcgccgcccgcgggcgccgcggcggctccgcggagcgaggcggccgtgatggactccgactaccggtcattcctcgagatcgtgttcgagaacagcgaggacagcgtccagatctggcacctcgacggctacagcttgttcgtagttgggatggacaggggagtgtggagcgagcagagcaggaagagctacaacctcgtcgacgcagtctcccggtgcacggttcaggtgtacccgagggcgtggacggcggtgttggtggcgctggacaatgtggggatgtggaacctcaggtcggaggactgggcgcgcaggtatcagggccagcagttctacctccgcgtgtacacgccgtcgcactcgttccgcgacgagctccccatcccgagcaacgcgctccgctgcggccgcgccaccaacgcgagcggcagaagccgaaccctgtcgcggtactagttgacaaaccggctggtgcttgtcaacgaccctaacacaacaccaggagttactcggccatgacaagtttggccaggtatatataccgtatacgcaaatgcatcaaagttttactcggccatatcacaagtttggctggttgggtttatttagcgtgagttcagtttgtaaggcgtaaatgaactccatataaacaaggggtgggaccaaagtgtagcctatatgccttttcttactcgccaatgcacattgccaggtttaatttgc

SEQ ID NO: 20474 - DNA, 1997 bp, Oryza sativa
  ref <308>: DATABASE ACCESSION NUMBER: AK070791
  ref <309>: DATABASE ENTRY DATE: 2001-12-06
ggggctttgcccctgagcataactgaagcaaagacctcccccacgcgacgcgagacgcgacccatcattcggaggcccaccaattcatctggagaaagctgcgctcctccgcctcgccgccgccgccgccggggaggatggccgaacggcggtacaccgagcaggaggaggcgctcgagatcagctcactccgccgcatcatcgccgcctacgccaactaccacgatgctgcagaaagggatgtcaagagatatgagcgatcattcaaaaggcttcctcctgcccacaaggaacttctttttaaccttggtctgaagtaccaaaggctgagatggtgtatatccatgaatgcatcattcatcatggacatgcttgaggcatttgagcctcctttcgacatgagtcagcatgtagatatggatggtcatgattgcgcagagaacatgcatggacattgtcatgcagattgtgctcattctgtcgataggggtgattgctttagaagttctatctctgtaagcaattccgagttgcatgaaccagacggttgccccaggaaagacgacaagactcatgaactctcaagagaaactgacaacaaggacgaggtagttgacatggaaagttgctcccggccggttggtgacaaattgggggcatctcaggttgaagataaatcatgtaatggtgataaagccatggatgcagcagctaactgtcaagatacagattgtgttgcatgttctgctgatgagaatgtgataccgcagcaattcatggctccatccttgcagttgaatgttcctccaattgatgttgacaaggttagatgcatcataagaaatattgtcagggattgggctcaggagggtcaaaaggaacgtgatgagtgctataagcccatcctggaggagcttaatcgtctatttcctaaccgaagcaaggagaggcctccttcatgcttagttcctggtgctgggcttgggagattggctctggagatatccactctgggttttgtgagccagggaaacgagttctcgtattacatgatgatttgttcaagtttcattctaaaccacacgcaagaaaccaatgagtggactatatatccttggatacacagcaactgcaattctctttcagacaatgatcaacttcgccctgtttcatttcctgatattcacccctcaagctcagggatcacagaaggattttctatgtgtgctggtgattttgtagaggtctacaatgaagaaagccaagaatcttcatgggatgctgttgtaacatgcttcttcttggatacggcacacaatatcgttgaatatatagagatcatatcaaaagttctcaaggatggtggggtctggataaatttgggtccgcttctgtatcacttcgctgactcctatggaccagatgatgatatgtctattgaactgagtttggaagatgtgaaaagagttgcttaccattatggatttgtgatggaggtggagaaaatgatagataccacatacactgcaaatatgaaatcaatgatgcagaatcggtaccgcgcagcattttggacgatgaggaagaatgcatctcgatcaaaagctcaaaaacaccagtgaggtggagatactctgtttggaacggttggcacaggcttactggctatagatcaaatttcagtcattctatggtgatgcctatcagatttggagacggacaatacggatgatccaattcacgccaccatttttcaccatgatatgaaactatatggatagattgatagtgcatgcgttccattactgcgataaaaccaatctccgtctgccaaaacatttgaatggcacagggaaaaactgttccagttcgatgtatatcaattggccaatgggagcactaaggtatattaataagttcgatggtacgtgttcgaactgtacaatgacactgaattagtaaacggcaaatcaaagagctcaacttttttggactgc

SEQ ID NO: 20475 - DNA, 2626 bp, Oryza sativa
  ref <308>: DATABASE ACCESSION NUMBER: AK070792
  ref <309>: DATABASE ENTRY DATE: 2001-12-06
gaaggagaagaaaggggaagaaatgacgagaacaactccaatctcctgatcgcccaatccagatattgggaaagcatacactgaaactgccgaaggttaaaggaaatgccagtgttgaagaccgtaggccgattctttcggcgatatccttcgatcttcagttcacttgtgtttctagtcatattgtacaagttcttctttggttggttcaccttcctcctggagacatcacccatcttcctatttgctggtttttttcttggaatcatcctagcttatggtgagccaaacattccggaaaatgaccacgtctacaaaaagattgagaaagcttacaatcggaatgtccgggacaacagtaaatcaactgggggtgtaactcttccaagtattgcatctagtgaagagagattggccaaacacaacaacacggaaaaggtaaccaacggaagatctcatattggagctttttcttctgaatcaggatcaggtgaatcggatggatcagaaactgatacccatccaatgctccacacattccaccatcttaggtcagctacaagttcatcgcgatcctctcaagacggggactccaatgacagcagtattgaagatggaaatgaaagccaagagggcaaggatgacaatgaacatgaagagaaaaacggtaaagtcgtggcatggaccgccgatgatcaaaagaacatactaaatatagggtgtttggagattgagaggaaccagaggttagagaacttgattgctcgacgcagagcaaggaaatatattgataggaacctgattgactttggcagcagtgactccctcccaaaaattgaggagctctcaaagttcaatgttcaaattccagccatatttgctcctaggaaaaatccatttgatcttccctacaatgaagataacttcccggaatccgctccatctgcgccattgaatatgttaagtaagttcgatcttccatttgacgaagcaaatgagagtagctccactggtggagctaactcaaaccatgtggactctactactgttttttctcaatcacaaaaagatacaatgtttaggaggcacgaaagcttcacaccaggagcatcattccttagtgacttttggcaagatacgcagccttctcggttcagaccatactttgtgacagaaaaaatggctaatgagggaatctcagttcctaatcttgagggagaagcaagtgaaaagagttctgttgaagactcagatagcacttcttcagttactgatcaagaaaaccataaactagtattggaggatagcccaaaccaaaatctcggacctcagatgagtcaaatggatgaacaacctcatcgttcccaaaatgctagagaggttcctcttgcacttgacatcgagccgcctttactaataagtgattcctcagatgatgacatatcacttcctggtggaaatataaatgatcgtgaagaagcgcaagagaatggaaatttgaatttgtcacaaaatgcgtcattggaagaccctagtgttattgaataccctcatcaaatggagatgataagcaatgaatttcaccaattatccccacattcaaatgataatgactcactttcatcatcaacagaagcaactgaacctcctgaattgaatagcattgaactaccagctaacgaagtggagtttattaacgaaatcccgattgctgatcccatttatgatataagtccatcaagaagcgagaagcctgcatctattggttcaactattgatgcagttttgttgcaagaaggtaatactcatacttctgatgtcgaaatgagtatggatggagaggattcagtatcaagaattgaggcgagtgagatacccgcacctagtttggcttctgtgcaggaaagcaaacccagagaaaaagaaacctctgaagtaaaggagcaagataatagtggccatgatggaggcaatcaggattctgtcagtcatgctaactcaaaagtacctatgattagttctaagccgagcattagcggtttaagtaatccagttaagtctggcagtaaaatgatatcatcctcaaaaaaggcagtttttggactcttcaagaaatgacaggggaccctgattgtaagcttcttgactaagcccattggaggcaaagtgcaccctggccacaaattgttgagtaatgggaggcaaagagagttttcaatactcaagggaccagaaggattggattatctgtttgatctgtataatctgagtgtacagaaaaaaaactgcaaaattagcattgatgcttaactcatatgacaaatgggataatggaaagatacaagagttttggaggttccatatgtgtataccttcaaggccatcaaattttatctgaaattgtcaggcactttaggaacatgaacagaagtgaaaatgcccttctagctgagtgtttctagtttatgcagtgcctctattttaaaaagcttgcctgagtgtgccattgtcaagctattagtacttaatttattggtcagaaattggaatatatgtttttttgacagcttagtatgtaaactattttcagaattgtcaagtttctaagaaaggattgtgttacttc

SEQ ID NO: 20476 - DNA, 2868 bp, Oryza sativa
  ref <308>: DATABASE ACCESSION NUMBER: AK070793
  ref <309>: DATABASE ENTRY DATE: 2001-12-06
aagggaagctctccaagttcgccggccactccacctcctccatagaatcgctgatgaaaatgccggagccggtggttcttccccacttcaagcctgcggattatgtggacatattggcccagattcatgaggagctggagtcttgccctcctgatgagaagtcgtgcctgtacctgctccagttccaggttttccgcggcctcggcgaggtgaagctgtcgcggaggagcctccagtccgcgtgggagaaggcgagcacgatacacgagaagctgatattcggggcatggctcaagtatgagaagaaaggggaggagccgatatccgacctcctcagctcgtgtggcaagtgctctcaggagttcaagctgctggatttcgtgtcgcagatctccaccgggtcgcatgagataagctatgatgatgagtcggatgtgttttggggctctccggtggtacatttccggataagagatgatatgattgcatgcgatcggcgaaagcttgctgctttgtcgactccgctgtatgcaatgcttaacggtggctttcgggaatcacatcttgaggttattgatatgtctcggaatggcatctcctcgattggtatgcgagcaatcagtaaattcagcttgacaggaaggttaccgtatttatcagcagatgctattttggaaatgcttgattttgctaataagttttgctgcaatggcctcaaggatgcttgtgagcgaaagcttgcttctttcatttgctcgaggcaggatgctatagacttcatggagtgtgctcttgagctgggttgttccatccttgctgctgcatgcttgcaggtgctcctgaatgagcttccagagtgcttgaatgatgaacaagtggttaggatattctcctgtgcaagtaagcagcagcgatccacaatggctggaaatgcttctttctccctatattgccttcttagtgaagtctccatgagcatcaacgcgacatcggatgtcacggtgaccttcttggaaaaattggtggattcagcatcagattctagacagaagcagttggccttgcatcagctggcgtgcacaagacttctaaggaaagattatgctgaagccgagcgcctgttcaatgccgcctttaccgctggacatctctattcagtagtgggtttggctagactggcctctatgaggggtaataagcatttttctctcaagttgcttgattctgtcatgtcatctcgctggccacttggatggatgtaccaagagagagcactatatttggagggtgataacaagttggaaaatcttaacaaggccactgagttggatcctacccttacatacccctacatgtttcgagctgcatctttgatgaaaagacaaagcgttgaagctgcccttatggagattaaccggatcctgggatttaagcttgttctggaatgcttagagctaaggttctgttgctatcttgcacttgaggaccatagagctgctttatgtgatgtccaggcaatcctcactcttgctccagattatcgtatgattggtggtcgggtgtctgcaaagcagctgcgtatgcttgtgatggagaatgttgagcagtggacaactgctgactgttggatgcagctttatgatcgttggtcatctgtggatgatataggatccctctcggtcatatatcaaatgctggagtcagatgctgctaaaggagttctctactttaggcaatctttgcttcttctcagattaaattgtcctgaggctgcaatgcgcagtttgcagctagctcgtgaacatgctgcaagccaacatgaacagcttgtttatgagggatggatattgtatgataccggccactgtgaggagggactgcagaaagcagaagcatccatcgcaatacaaagatcatttgaagcattctttctgaaagcttatgctttggctgattcgagtcttgacccttcaacttcagcaacagttgtatcacttcttgaagatgcattacgctgcccctctgatagactacggaagggtcaggctctgaacaaccttgggagtgtttatgtggattgcgggaagcttgacctggcagctgaatgctacatcaatgccctaaagattggtcataccagagctcatcaaggccttgccagggtccatttcctcagaaacagcagaactggtgcatatgaggaaatgaccaagctaatagagaaggccaggagcaacgcatcagcttatgagaagaggtcggagtactgtgatcgtgagctaacaaaatcagacctgcagatggtgaccaaactagaccctctgcgtgtatacccctacagataccgtgctgctgtgctgatggacaaccacaaagagaaggaggccatcgcggagctgacaaaagcaatcgccttcaaggcggacctgaacctgctccacctgcgagccgccttccacgagcatgtcggcgacatctcgagtgcactccgggactgccgcgcagcgctctccgtggatcctaaccaccaggagatgctcgagcttcatcaccgggtgaacagccaagaacactgagccccccattgttgtacatacaggagctctacatagccaaccataccccaagtgtatgttttgtaccatacacagcagatcaatgtaaggatagtagccaatttaggccctccacccccaaaaccaacccaattccttgtgtccttaattagaatatgttgctcatcatagagtcctttttttagtaaattattatatttttgtgattaagcccccctcctaattgtaccctccatgtgccctcccccaaccccatgttcccaacaagttttgactatctcatgtgtaaatg

SEQ ID NO: 20477 - DNA, 1947 bp, Oryza sativa
  ref <308>: DATABASE ACCESSION NUMBER: AK070794
  ref <309>: DATABASE ENTRY DATE: 2001-12-06
ggaaatttttcattcgagtcctcgtgatccatcctccccgacagatcgatccaattcgcatcatcgcatcacacacctcctcctcctcctcctccccccgcgccgccgtcatccgcggccttaccggcgaccgacgcggccgccgcgtcgccctcccgccgccgccgccgccgcctccgacgacgggtttccaaacggatccggtggaattccatccctctcgagcttagcgaggggggagagagaagaggaagaaagtgaggggaaaaaagcttcacaagaatacgcgcaccacgcatggggatccgagtcgggaggtagacggaggggcgagatccggcgaggcggagagcgggaggggattgtcgcgtggtttttggttgctcccccctaccgccagctccggcgatcccgaccacccaccggcgacgatgagcggcggcggcggaggaggcggaggcggaggaggaggaagccccaacaacacggaatggcgcttcaaccagacgctccgcaacgtgcaaggaatgctcaaagggcggagctttcctgggaaggtcttgctgacccgaagatcagaacctctttcacctcctgaatactccccgcgctatgagaatgatcgtgatgaatacgaacagaatgaaggctcacaagaaggaaaagggcaagcatctggaaatacagctgatagtatgagtgcaaagaaatcaaatcctccatcaacaagtagcaccaattcattaccagatgcccaaggattagtttctggggctagagctacagattctgcacgaattgctaaattcacgaacgaactatctaggccagctgttatattagacaagttgcgggaactgtcttggagtggtgttccaccttatatgcgacctaatatatggagacttcttctgggatatgcaccacctaatgcagatagaagagaaggtgttctgacgaggaaaagacttgagtacgttgaatgtgtttctcaatactatgatattcctgatactgaacgctctgatgaagagattaatatgcttcgacagattgctgttgattgcccaagaactgtgccagatgttacctttttccagcaccctcaaattcagaaatctctggagcgcattttgtatacatgggccatccgtcatcagcaagtggttatgttcaaggaataaacgaccttcttacaccattcttggtcgtattcttatcagagcatctagagggcaacatggacacctggtccatggaaaagctttctccacaggatgtttctaatattgaagcggactgttattggtgtctttcaaagtttctcgatggtatgcaagaccattacacctttgctcaaccaggaattcagcgccttgttttcaggttgaaagaacttgttcatcgtatagatgaacctgtgtcaaagcacatggaggaacaaggattggactttcttcagtttgcgtttcgttggttcaattgtcttatgattcgtgagattccttttcatcttgtaacacgcttgtgggatacctaccttgctgaaggcgattatctaccggattttcttgtatatatatcagctagctttttgttaacgtggtcagacaagctgaagaaacttgattttcaagagatggtcatgttccttcagcaccttccgacgaggaactgggctcaccatgagcttgagatggtgctctccagggcttacatgtggcacacaatgttcaaaagctcgccaagtcacctcgccagctaggatacccgataatcatatctgtaatctatgacctgattttgatgtactctagacttgtcccctttggggaaggaaccatgaggagacttcttttgttttcagtgcatactatcaattgtaacactacccccaatctgtatattttacttacagattattatcaatgatgatgaatagatggc

SEQ ID NO: 20478 - DNA, 738 bp, Oryza sativa
  ref <308>: DATABASE ACCESSION NUMBER: AK070795
  ref <309>: DATABASE ENTRY DATE: 2001-12-06
gtgttccaccccgccattgattcctcctcctcctcgcttcgctgctcgagagctcaatgattcgattcagaggttgaccatggtgtccacgatgtacaaggaggcggccgccacttgcggcgacggggagcactactcgcggctcatccgggagctgtgcgcgctgctcgccgccatcatctccccctcctcctcctcctccaccgcggcggcggcgaggtctccggggatgtcgcccgcggcggcggcgacgatgctgctcggcgcgtcggtggcgctgatgctgtgcgggtcggtgacgttcgcgatcgggctcctcctcatgccgtgggtcgccggcgtcgcgctgctgttcggcctctccgccgccgtctccaccctctcctccggcgtcttcggcaaggccgccgccgccgcctcttctccggtgagccacgcttcttcggataataagcctgtattagtggtagcttaggagattgatcattagcctttaattggttggtgatccctttgtaaaaagaaaaacgcatcctctttttgttgttgttgtcctctgaattattgagatgctctgcttctttgttcgttgcatgatgcgtccaaaaggatgaaaaaaaaagagaattgttctttcatccggatagtttctcacaaacacgttcatgtattaatcacacaacgttttgcttcttgatccgcaaatcgtaaggaaaaaatgttcactttgttaacgtc

SEQ ID NO: 20479 - DNA, 2385 bp, Oryza sativa
  ref <308>: DATABASE ACCESSION NUMBER: AK070796
  ref <309>: DATABASE ENTRY DATE: 2001-12-06
tcaatatatgttgttttatcatccagatgttcccagcttcaaatactctcattgaggcgaactggcatggctcatgtatcactcaactgtccccagttggttgaattggattttcagtcctgccataaactttctgataatgccattcgccaagctgctacagcttgtccgctgttagcatcactagatatgtcatcttgctcatgtgttactgatgagacactgcgtgagatagctaattcatgtccgaatctctctgttcttgatgcatctaactgcccaaacatttcatttgagtcggtaaggcttcctatgttggtagacctgagactactaagttgtgaggggatcacgtctgcttccatggctgcaatagcttacagtcgtctgcttgaggcattacaacttgataactgcagtttgttgacatctgtgtctttggatctgccacatctcaagaacataagtcttgttcacctgcgcaagtttgctgagttgactttgcgaagtcctgttctttcttacattaaagtttccagatgctcagtacttcatcgtgttagcataacatcaaatgctcttcagaaattggtgttgcaaaagcaagagagcctatcaagtttgtcattgttatgcaacaacttgatcgatgtcgatcttagtgactgcgaatcattaacaaatgcagtttgcgaagttttcagtgatggaggtggttgcccattgctcagatcattgattcttgacaactgtgagagtctgagcactgttgaactgaatagtagttccatggtcaatctctctcttgctggttgccgctccatgacattactaaaactttcatgcccaaatctgcaaaatgtgaatcttgatggctgtgatcacctcgaaagggcgtcattttgtccagttggtcttgaatccctaaaccttggaatatgtccaaaattaagtgatcttcacattgaggccccaaagatgtctctattggagctgaagggttgtggtgttctttcccaggcatcaataaattgccctcgcttgacatccttagatgcctcattctgcaggaaactaatggatgattcactgtctcaaacagcagaggcgtgcccgctaattgaaaatcttatcctgtcatcatgtgtatcaattgacctcaatggattgtcctctttgcattgccttcataagctggccttgcttgacctgtcatacacatttttgaccaacttgaagcctgtttttgacagttgcccacagttaaagatcttaaaactttcggcttgcaagtatctcagtgattcatcattagatgccctatacagagagggtgctcttcctatgttggttgagctagatctgtcctactcatccattgggcagactgcaatcgaggagcttctttcatgttgtacaaatttggttaatgtgaatctgaatggatgcacaaacctgcatcagttggtgtgtgggtcagatgactgcagttctggtgacatgcctgttgatgtttgtccacctgattcagcaccagtgaggagtgaagagatcagtgaaaggtctgatcgtctgcttgaagttctgaattgtactggttgtccaaatattaagaaagtcatcatcccttcaatgacaacctatctacgcctgtctaaaatcaatcttaatctgtccacaaatttaaaggaagtggatttgacatgctccaatctttatactttgaacctgagcaattgtagctccctggaggttctgaagcttgattgcccaagactgacaaatctccaacttctggcatgcaccatgttgcgagatgaggaactagaatctgcaatatcgcgctgcagtgcattggagattctcaatgtgcactcttgtccaaagataaatgtgctggactttagcagactgcgtgtggtttgtccaagcctcaagcgcatccaaagcagccttatcacataatttgaggctgcgattatttcgaggagagttattgaggcaatagtttgcatccgtgcggccccttccatggacgcgggtgattctagcttagattcagaaacaacaacaaaaaagaagcccttcatggcactcttgtacatactagtggcggcagcatcaccattatatttaatggcaacgtatattaggagccagggggtgacgcgagccgcttctcagttgattctcgtgcggtaataagtagtaccatctagctgaatcctggtgggtgttcgaacttgtaattgtttctgtttccttttcttacctcctgtattccgctcctatggagcgatcagatctgtattccggtttacatatgcgttaataatcatcttggttggatctgaactaaaaaaatgcaatgcttgattaaatagt

SEQ ID NO: 20480 - DNA, 1965 bp, Oryza sativa
  ref <308>: DATABASE ACCESSION NUMBER: AK070797
  ref <309>: DATABASE ENTRY DATE: 2001-12-06
tagggagtgaagagcgaatcaaacaccaccaccatcgccagcgtcattcagatttcagagggagggagggagagagagagaaaggaaggggaagtgggggagaaggaggggagaggatggcgtgcctgcacgaccacagctgcgaggatcacaactgcgccgccgactggtcgctcttcaaccacatcgacgtccccaaggtggtggctctgaacgaatctgtggcggggagcgtcaagtcggtcttcaagccctgggagcagcgcctcgacacctctgggggttttctggagagtaatgagggtgaccctgagttacttgttttcatcccgtaagtatgccacttgctaattagatatatcatatatctgtgttttccccactgtttttcttactccaatcaattggtgctttgtgtacaagctcgaaaggaacacacaaccacatcctgaactattttcgtacaatcatcttctgaatgcaggactgcagtagtgtttagaccaaaactgtttgatgtttcattagtaagaacatgtagcatatggacttttagttttcatcctttgtttgtgttattgttctcagctctcactacaaggtatagcttgtgcatgttgaattgattgatatacccagcagccattaagttaaaaagatgtctgtgaaggaaatagacatccatcttgttggttagtgttattgtactcagctctcactccaggcctgttggttagtgttattgtactcagctctcactccaggctagatcttgtgcatgttgaattgatagatattcccagcagtcatttatcagtctgtttgcgcttcctttggattatttttgcacatccttctatcaattgtttgtgcgaaagcttcaatgctctttaaacatgcttgcgccaactgcaagccagcttttgcacaccatgaattgtatatatgctgtgaaagggtagtcctcaataggtaaactggatgctatagacccatccaaaacattttcccccttccattaggatattatcctggaaaaaacaagtagtgctcggtccgaattagaaaaagcagagataacgatcattcaatatgcttgtcagtgcttcttgtgctctacttttgcagaaagttcatgtccagatacatttagttttgttgatacatctatttttgctctccatagcttgctgtgtagacttgtgtatgaggtaagacttgggtttttacccccttctattctgtttataatgcctatccagaatttataaatctgtgtaatcctttgtaccctttggttgtaggtttacatcagacgtcaagatcaagagcatctctgttgttggtggtgcagatggaacaagcccttctagaatgagagcgtttatcaaccgagaaggcattgacttcaatgatgctcaaaatatgcaacctgtgcaggaatgggagctggcagagaatttgcagggagttcttgagtaccaaacaaggtattcaaggttccagggtgtggctaacctaactctacatttccctgagaactttggaggtgacacaactaagatatattacattgggttgcgtggtgaagctactcagaacaaaagggatgttgtggccacaattgtgtatgaaataatgcctaatccatctgatcacaaaactaagtctgagactggaggtggtttctcgcatgttgagtaggcatgtcagagcatggaaagcagatcggtgttggatgctgctatcagctgtgatgaccttcagctctactaataaaacaatccagctcttggagaccagtagtagcttgacttctgagtgcagaactcgtgtacctgtcgatactgactacatcgtcaaaagttgatggcttgtgcaattttaccgtagtcttaactgtctgtacttcatgtccatattgcgttcagttcaatggtaatgtgatacttgctaattttgttc

SEQ ID NO: 20481 - DNA, 1094 bp, Oryza sativa
  ref <308>: DATABASE ACCESSION NUMBER: AK070798
  ref <309>: DATABASE ENTRY DATE: 2001-12-06
ggagcagcggcaggtggtggtggtggtggtggtgttgttgctgctgctactactcttcttcccccttcctcgtgttcctcctcttcgcctcgtctctctgccctgcctcgtgcgcgtccagatccgggagggatgggggcgggggcgctgggggtggtggcgatggtggcggcggcggtggtggtggcgatggcgggggcgaactccgagggcgacgcgctgtcggcgctgcggcggagcctcagggaccccggcggggtgctgcagagctgggaccccacgctcgtcaacccctgcacctggttccacgtcacctgcgaccgcgacaaccgcgtcacgcgcctggatcttgggaatttgaacttatctggtcatctggtgcctgagcttggaaagttggatcatctgcaatatctggagctatacaagaataatattcaaggaacgatcccatcggaacttggtaatttgaagaatcttataagcttggacctgtacaagaacaacatttctgggactatacctccaacacttgggaaattaacgtcccttgtattcttgcggctcaatggcaatcgcttgactgggccaatcccaagggaactggccggaatatctagtcttaaagttgttgatgtttcaagcaatgatctgtgtggaacaattcctacatcaggaccatttgagcacattcccctaagcaactttgagaagaacccacgcttggaaggtccagaactacaaggcctggctgtatatgacaccaactgctagatggaaacacgaagaaaagaatgggtagaaagtaatgggcgtaaaatgttaccgaaaaccgggtgatatagattatgttaggtttggacctaccactctgtaatcctccatgcatagctcttgtttgtgctgtttgtcggcaatgaagttgtatgttgtagcagaatactttctttctgtgaaagtaaacatggaactgcttatgtcatgagtcaaatgttattgttatcacgcttccctgtgttatattgaccaaactaaagatgaaagttcttgtctgctgattatatcctttgctaatgatggcacatttatgcagc

SEQ ID NO: 20482 - DNA, 2379 bp, Oryza sativa
  ref <308>: DATABASE ACCESSION NUMBER: AK070799
  ref <309>: DATABASE ENTRY DATE: 2001-12-06
gaatcgacggaacgagccataccacacgcgcggccgcgccagttcaagggaaacatgcgcaggcctagccggctcccagttgtctatccatcttcctctcctagtaaatgtcacctgcgttatttggttgttgtctcgcctccctcttgctgtcttctttgtatatattacacacattatgttgtttgttgtattgctgcaccatccgatcacacaggttcatggatccatcttataggcgatgagattaattgttccccttcatgctgatccctattgttcccggttcatccctaatccagcattcctggtaaatatctctttctaatcgatattgattgatgcagattgtttctcggcaattcagctattagttcatgacatatattagtatcccaacctgacctcttttcttccgtacaacagtatttgtggttgcatattactcactccctgcttcactttcttctcaaatttgactgtaggtttatttctggattcaagtacactacaacgttgaataataagtatattggcacaatttttttttgggtacatactactagatttgattccaaaatatacattttctgctatgctcaatttttcaatcatttaagttaccttgcaactgtccatgaattttatattttatactggttatagtattatgtacaaaacactgagtagtaaaccgagctgaccaggtcagtgaagcaactacagtatttgatatgcaagttatgcaactatagataattctttgaggtgacaaattatataaaaaaatgtcatcctccaggcagacggtgattttgcacatgatgtgattggagataattccatcatatgcagcacggtgatcaatgatgtaagtgaaaggtatagtctctgcaggtccctccctcctgggattttcttttcaaatgttaattgatttcataatttaaattatagtattattatctcaaaatttttcttgattttccttatctttccttcttatgtatttgaggaggcaagaaccagtaacctttttttacagagcgattagtcaattgctaacgtcagttcagtcgatcaatctgcagaacttccccccgaatttgtatgtatattaggttactcatctataaaacagggattggtgactgggcaataagcttcatatcatcgatattaactgtatcaggtatttttcagctttgctcttctcatttggaaacaagcttttggtctatataaactgtgttcagttagacaatagatagcctacagtagctccagccaaagtatgtatatgtgaccattcaattgttgtcgctacatgagaaagacttctctttatctcatttctttaaccttattggttcatcatccttaataagctcctattgtacgaggaccctaactcatttctttgaaaatggtgtacatctgtgcagcttttatgttaaatccttccatatagaatccgtgcacggaccctttaaacctatgtcaatacttagtatcctgcagcagcacgcagggtatcatctagttgctaagaaatcacaagcgtacatccctaacaagagcattttaaatatctgatgtgttgtactgttgtgccttatggttaatggaaggtccgaatcggtgctagggaggacaaggaaagaatgtgggtgggaagcgaatagtcagtccattatagcattactcatatgctccgatgacacgagtattccaacaacatcctccaaaacatcatgtatttattcaatcttgtcacaaaaaaaaaaagccgcacagcattacataggtgtatccccgttatctccaaagatgaagatctctctcatcctcatccgatcgagagcagataactaactaattaagcgttggccggaggaaccgggcagttgctattacactcgtcgatggttcggaagggcgagttgtcgtcgggcttcacgatgcacctgtagcaggagctccacgcctccgggatgcagaagttggacgggctgcagatggtgatcgggtccatctccggctgcacgacgccgccaccagcagctgatttcttcgccggctcgacgacgacgacggcgtgtgtgcggccacctggggttaattatttattccaaagaaatttacagagattaattattcggtgtgtgatgaacatatatatggatcggtagaaagatgagaaagaaatggtgaggttattgccctctgaccacacttaattaattaccatgtaccacgatggcaaggcttccgagggcgaggaagagcatgaaaatggcgctgcacttcatgttgtgtggtttgcgaagtttgtggtatgtaactatgtactattgtatttgtgtgtgatgattgctg

SEQ ID NO: 20483 - DNA, 1315 bp, Oryza sativa
  ref <308>: DATABASE ACCESSION NUMBER: AK070800
  ref <309>: DATABASE ENTRY DATE: 2001-12-06
gagttcggcgtcactgacaggtggccccatccttactgtctcctcctcgatccctccggcgacaacggcggcggtgacgacggcgacccgccagttcgccggatgaagaagaccaccaccccatcggcgtctccgatcgaacccttcgagttcgaggaaaccttcgtttcttcgtcctcccccggatctctgatttccgctgcacgcgcgcgcgcgcgcttccctcccgctcgcggcatccgacgaagcctgacggccggcagacgccagcgacggcgacggggcacctaaccggggcaaccggccatgaatgcggcagcggcagggtcgttctgtccgatccacccgtcgtcggatccagccgcgtgccatctcttggatcaacgatagcaacgagcgtgcacaactgtatgtattgtcttgttcagtctttggttctatttcgattcagagactcgtttgcttgttatgtcaaagatcagaacaaggcaaaccggatgatgtggattggatgaatcatgaatggtagttcagagtttcagatatgtctgtatacacatacaaagaaaaaatgttcaggttgatattgcgttcagtccgaggagatctcacatgccattttaagccatgtcctaatggatcaaaatgcttaacatgggagaagaaaaatcttggcattgttggaagaactgatgagctgaaaagtgaaaaccattgataataaacaagttcaggtcacgcaagtacatctgcatatgagcatatcagcaaagaaatccccaacctctccttttctttctgcttggaaccatgcaaggctccaacagcaagcttctgatgcatgacagcatgagtgttttcctaccttgaaggccaaggccggtggttcatgcttcacacttgctaccagattagctttggctaaccttgattttaacatcttactgggagatgagataaagctggatgatccggatggtcctgaccctgacagaaccgctgggacagtgtctctgcatcctactccagtcctcctccagactccagagtaaggtggttacgctgcgatgaaatgtacatccatcgaccgtggctttgtgtacgaggtgttgcttgcaatcggacgtgtatgcgtttgataagttcttctgcatagtaattaatttgatatttgttacatcatcatttactgattagtttatcttgatcgtccttttttttccattcattgaagatggatgaaattttttcgaggaagatacatataaattaattaagtatcacaaagttgaaaatatattttaaatgattattt

SEQ ID NO: 20484 - DNA, 2597 bp, Oryza sativa
  ref <308>: DATABASE ACCESSION NUMBER: AK070801
  ref <309>: DATABASE ENTRY DATE: 2001-12-06
ccatgccagcaattccgtcactttgacagattattctgaagcgcgaggttttgcaggcgcctcctcgcgcggggtagcaatggagattgagcatctcggcgcccgcgcggccgccgccgccggcgaggatgaccagtcgccggtggagcaggtccggctgaccgtgccgacgaccgacgacccgtctctgccggtatggacgttccggatgtggaccatcgggctcctctcctgcgccatgctctcctacatcaaccagttcttctcctaccgctctgagcccatcgtcatcacccagatcactgtccaggtggcggcgctgccaatagggcacttcttggcacgcgtgctgccgaagaggaagttcacggtgttcgggcgggagtgctcgctgaaccctgggccattcaacgtgaaggagcacgtcctgatatccatcttcgccaacgccggcgccgcgttcggcaacggcggcgcctacgccatcgacatcatcaacatcatcaaggcgttctaccaccgcagcatctcctttcccaccagcctcctcctcgtcatcaccacccaggtgttgggctacggatgggcagggctgatgaggaagtacgtggtggagccggcgcacatgtggtggccgcagagtctcgtgcaggtttccctcctgagggcgttgcacgagaaggagaacctgcggatgacgcgggccaagttcttcctgatcgcgctgatctgcagcgcggcgtggtacgtggtgccgggctacctgttcccgaccgtgggcgcggtgtcgtggctgtgctgggcgttcccgaggtcggtgacgatgcagcagatcgggtccggcatgagcggcctcggcgtcggcgccttcacgctcgactgggccaccgtcgtctccttcctgggcagcccgctcgtgtacccgttcttcgccatcgtcaacgtctgggtcggcttcgtgctcctcgtctacgtcatgctgcccatcgcctactgggtgctcaacctgtaccaggccagcacgttcccctttttctccgcgagcctgttcgaccacaccggcgaggagtacaggatctcggagatcgtcaacgacaggttcgagctcgacacggacgcctacgcgcggcaggggaagatccacctcagcctcttcttcgccacctcctacggcctcggcttcgccaccatcgccgccaccctgtcccacgtcacgctcttctatggaacggagatgtatcgcaggttccggcaggcggccagggagaacccggacgtgcacacgaggctgatgaggaggtacgatgacatccccaactggtggttctacggcatgctcgcgttggccatggtggcggcgctgttgctctgcaccgtgttcaaggacgaggtgcagctgccgtggtgggcgctactctgcgccgtggccgtggccgccttcttcacgctccccatcagtgttatcaccgccaccacaaacacgaccccagggttgaacatcatcacggagtatgtgatggggctgatcatgccggggaagccgatagccaacgtgtgcttcaaggtgtatggttacatcagcatgaaccaggccgtctccttcctcactgacttcaaactcggccactacatgaagattcctccaagatccatgtttctagtccagttcatcgggacgatcgtggcggggacggtgaacatgtcggtggcgtggtggctgctgtcgacggtgccgcacatctgcgacaagaagcacctcccggaggggagcccgtggacgtgcccgggctcccgcgtgttcttcgacgcgtcggtgatctggggactggtcgggcctcgccggatcttcggcccgctcggctactacggcgcgctcaactggttcttcctcggcgggctggcagggccggcggtggtgtggctgctggcgagggcgctgccgcggcacgccggctggatcaggctcatccacctccccgtgctcctcggcgccaccgccaacatgccgccggcgtcgacgctcaactacacggcgtggtgctccgtcggcgccgtgttcaactacctggtgttccgccgccgcaaggcgtggtggcagcggtacaactacgtgctgtcggcggcgatggacgccggcgtggccatcatgggcgtgctcatctacttctgcctgtccagccgcggcatcaccccagactggtggggcaacagcgacatcaacatcgaccactgcgacctctccacctgccccaccgccaagggcgtcattgtggagggatgtcccgtcttctgatcgatcatccatccaatatacatatttcccccgtagatgtgttcttcgtgcgaaactagatcagtaaaatcaatcagaatctgaatctctactcgtttaatatggcaggactgatgctgttcttatttaaagttgtatatatcatttgggtttttaggtttccaaatgctcttctttttcgtgttttaaccaagttcagtgagctcagttacccagttagtatattatagaattggtttcgctccaatggagttttattgctgtgttttaattgagttcaatgagatatatattggttaagtcc

SEQ ID NO: 20485 - DNA, 891 bp, Oryza sativa
  ref <308>: DATABASE ACCESSION NUMBER: AK070802
  ref <309>: DATABASE ENTRY DATE: 2001-12-06
gcttcatgtcgccggcacatatccaccaccggctccaaccctccccaaccgtggcggagccccctccctctaccccggcgcccgtccctccgggctccggcatcctcctgcctatgccgctcggcccgtgcttcgtcgcaccgctgccagggctctcctcctcctgctcagaggcagttcggtgacgagcgggttggagcagcctcgcccctcctcgtctggatccagccgcaggcatggccacatcgccggctcctctactgctcctctcctccatctccctgcgctcaccgttcctgatgagggcacggcgactcgaggcgacggctgcggcgactcggtcttccagactcgtcccgccaccggctacggcctcaacgggcgatgacgggcgacctagccgacggatccatcggcgtggaggtctggggccgtcagatttagccgcatccgacctccatggtgacgggctgacggcgacagcgggttgcaggtgcgacaaatgcccctcctctcctctactttccctcggtggcttggccggtggatccatcggtgtggaggtcggagacaggcggatctgggagatgcgatggtgacgccaccccgtcccgttcttcctcccacaccagaagaaggagcagtgatgataatgaattactcttgtgctttgttgatgtttattcatgcttttttttctaatcttgaggatctgggttgttcatatgttaaaataaggatatggggattattgtttgttgttaatattttcaccttcaatttgaggatctggggcattgtattgggggattggggcattgaggagtcaatgaagagaatcgggctcaataaaatggctcaattcgagccagtcaaggttttttctgtgtg

SEQ ID NO: 20486 - DNA, 1744 bp, Oryza sativa
  ref <308>: DATABASE ACCESSION NUMBER: AK070803
  ref <309>: DATABASE ENTRY DATE: 2001-12-06
gattctgaattctcccatgccttctcctggtaaagaataatcccaccacctccctcctctactacctctccctccccccaaactcgagcctccatctccctccccgatccagacaccgatcgaggcgttgacgacgacgtctagctcatggggacgaggaggaggagtgcgcgagcgcgagcgcggccgccgctggccatgccgctcgccgtgcttcttctcttcgcctgttcttccggcgtcgcagccgcggccgctcagggcatcgagcggatcaaagacgatcctgttggaaagctgaaggtgtatgtctacgagctgccccccaagtacaacaagaacattgtggcgaaagattccagatgcctcagccacatgtttgccacagagatcttcatgcatcgcttcctgctgtcgagtgcgatccggacttcgaatccggacgaagccgattggttctacactccagtgtacaccacatgcgacctcacgccatggggccatcccctgaccaccaagtctccacgcatgatgagaagtgcgatcaagttcatctccaagtactggccctactggaacagaacggagggtgcggatcatttcttcgttgtgccacatgactttgcagcgtgcttctacttccaggaggcgaaggctattgagcgaggcatccttccggtgctgcgccgtgctacgctggtgcagacgtttgggcagaagaaccatgcgtgtctcaaggatggctccatcacagtcccgccgtatactcctgctcacaagatcagagctcatcttgttccaccagagactcctcggtcaatctttgtctacttccgtggtttgttctatgatacttcgaatgatcctgagggtggttactatgcaaggggcgcccgtgcatcggtgtgggagaacttcaagaacaacccgatgttcgacatctctacggaccacccccaaacctactacgaggacatgcagcgtgcagtcttctgcctgtgcccgctgggctgggcgccatggagccctcgtctggtggaggccgtggtgttcggctgcatcccggtgatcatcgcagacgacatcgtcctccccttctccgacgcgatcccgtgggaggagatcgccgtgttcgtggccgaggacgatgtcccgcagctggacaccatcctgacctccataccaacggaggtgatcctccggaagcaggcgattctcgcggagccgtcgatgaagcagaccatgctgttcccgcagcctgcggagcccggggatggcttccaccaggtgatgaacgcgctggcgaggaagctgccccatggcagggatgtgttcctcaagcccgggcagaaggtgctcaactggaccgaggggacccgggaagacctgaagccgtggtagatagatatatacagtatatgatagtgttatggcaccattgccattcaccatggctggtgttcttgtgtaaatgacaccaccggatgagaagctgatcaatgaggatatattgatgatgatgagcgaaccacaccattgaatgtaaagctccctttccttgcttctttttaaggccatgtgcctgtatggcaatgtctgttttgaccattgttgtagtgttagcgtattacaggtcatggattatgtaatactagtcaataacccatacgttacaccgtgcaacttgcacaggctatttgttcatatatatataaaacataaatagtaaaattttgtcataggc

SEQ ID NO: 20487 - DNA, 2228 bp, Oryza sativa
  ref <308>: DATABASE ACCESSION NUMBER: AK070804
  ref <309>: DATABASE ENTRY DATE: 2001-12-06
gtgtgggtgttcttgtcgtgcgcttcaccgtttgtcttgttggacccggagaccccacatatccagatctgcaagcttcctcctcctccttcctcctgatcctttagcttcctatatacgattccaccatcgaaggccagggcccagacttgcttgccgcaggttactgatccaccgaaggagggaggcgcccgcccgccgccatggccgaggtgacggtggtccgtgcggagcgcgaggaggagtccaccctggagcagggtctcctcgccatcccggaggaatccaaccaacttacatacactggagatggatctgtcgacttttctgggaatcctgttgtgaaggagagaactggtagatggagggcatgcccatttatcttaggtaatgagtgctgtgagcggttggcctattatggaatctccacaaaccttgttacatacttgacaaagaaactgcatgatggtaatgcttctgctgctagcaatgtgactgcatggcagggaacttgctacttaactccccttattggagctatactggctgatgcatactggggaaggtattggactattgcaacattctccacgatatacttcattgggatggctgtactgactctttcagcatcagttcctacattcatgcctccaccttgcgaagggtccttttgcccaccagcaaatccattgcagtatactgtcttttttcttggactttacctaattgctcttggtactggtggtattaagccctgtgtctcatcctttggagcagatcaatttgatgatacagacccagttgagcgaatccagaagggatctttctttaactggttctatttctcaataaacattggtgctctcatatcaagcagttttctggtttgggtgcaagacaatataggatggggaataggctttggcattccaacaattttcatggggctggccatcataagtttcttctctggaacatcactttatagattccaaaagccaggcggcagtcctattacacgagtatgccaggtggttgttgccccctttcgcaagtggaacgtacatgttccagaggatagctctcgcttgtatgagttgcctgatggggcttcagcaattgaagggagtcggcaattggagcacaccgatgaactcagatgtctggacaaagctgctacaattactgatcttgatgtgaaagcagatagctttacaaacccatggcgaatatgcactgtgactcaggtggaagaactgaagatattggtaaggatgttccctgtctgggcaacgactattgtgttttctgctgtctatgctcagatgtccaccatgtttgttgagcaagggatgatgcttgatacatcagtaggtccattcaagattcctccagcatctctatctacctttgatgtggtaagtgtcattatatgggtccccctctatgatagtatcttggttccaatagctaggaggttcactggcaacccgaggggctttacagagttacagaggatggggattggtttggtaatctcaatcttttcgatggcggcagctgcagttcttgagattaaaaggttggacattgcaagggctgaacatttggtggatcaaaatgttccagtaccactgaacatctgctggcaaattcctcaatatttcttggttggtgcctcagaggtcttcacatttgtcgggtcacttgagttcttctatgatcaatcaccggatgccatgaggagcctctgcagcgcactgcagcttgtcacaacagctcttgggaattatctcagtgcattcattttgacattggttgcgtacttcacaacaagaggaggaaatcctggatggattcctgataacttgaatcaaggtcacctagattatttcttctggcttcttgctgggctcagttttctgaactttgtgatatatgtcatctgcgcaaacaaatacaaaagcaagaaagcagcttgagctaatcaggagttaaaagactgtcgtcatgggaatttcacttcaaaattctgtatatatgtgcacaaagtacatgttgaagcagcgaccgtaacaagagaactttaaccatcctgtactctgtatttgatgctactatacattttatactttttgttctgtagatattaatttattgaagctacttgtggaatgtagctttgcttccaatgcgtctacttaatctggtatatctgattaacc

SEQ ID NO: 20488 - DNA, 2534 bp, Oryza sativa
  ref <308>: DATABASE ACCESSION NUMBER: AK070805
  ref <309>: DATABASE ENTRY DATE: 2001-12-06
ggttcattcgcactcttgtcatcgaaatatcaagagccggacgaacatgcaggaactggagtactggacgcaccatcacccctcgaagcaatccaacatggcgcctccgctcgcacgtctcccgcccggagacctgccgtgcgatcccgattcctccaaaatccctcctccggagccaatgccatgagccaaacacaacaacacccgggcctgcgacgcatccgatccgatcgaaatggatgcggccgaaaaaacccaaaagcagtagcagccgcagcagcagataatcaaagctgatcgagctatgaatcatcgtcgtcgtcatcagcatcagcatcagcaggccagcagcagccgtagcaaatgtgaggaattggggaaaatcacgtttccgtgcatcgttcgatctccagtgcctcgagcggttttcaaccatgcctcatttccctagcggctcaagggtgaagtgcacggtgcttgcagtgctgtgtgggaaggtaggcaagcagcgggcgccaccttgtccggtgcctgggtcccagcagcagcggccatcgtacccattcccggagttgatctcgtccgggaggttggaggtgcacacgctgattaaccctacagttgatgaatttctggaggcacaacgtgctttgcaaccccgcttcatgtacctccggggtcagcagcttgacaacgaagaagaaattggtacacttgtctggcgcgatgctgatgtatctgatccacagatacttagttcactcattcgtccgccttttcctaccattgtttatttggaagttccaagtggagaaaagattgctcaatctcttcaatcgaaggtagtctgttttatgatattttcaattagctgtttcttatttacgtttgagcttgtagattgcttattgctgcaaatctccttttgccacaggtgggtatctgcttgttgcgatgcgatatccaaatgtccctatttattggttaaaaaatcattttcttgtggagtattatagagattagtttccataaaacaattactactaaactgcatgtgttataacttgttttgattggcatagtgtggttctattgatggaaattttatataattacatgcttttaatgtctgcaatcactgtccatttttccacattctgattactaatttacattttttttgggtagttttactaagctttccccccccccacccaaaatacaattcctaatgtgctattatacttcggaatcttatttctaatttcagatttgcaattttcacactctttcattgctagggtatttcatatataatgtattggagatattcattatcatcgtatgcagcatctcattttcgccattccttgatgtcagttgttcagagctcctgtagccatgcatgggatgcatttcaggttgcatatgctacttttcaactgtattgtgtaagaaataatgaggtgcaacgtcttatgcttgggcctcatctacttggggatgctccaaggatatatatcacccctcctggaaacgaaatagccgaggaagaagatacctcggaatattttccagacataaagatatatgatgaagatgtgaacttgaagcttcttatttgtgaagcacattgcacccttgattcatctctattgaactcactagaggatggtttgaatgctcttctcaatattgaatttcgatggtgcaaactccaggatagagtcagcgctgctcctcctcttcatgttgattcaactctgttggacgggatggttacaatatgttgtgatatcacaacatctagttcttcccatgtgtcactgcttctttctggcagtccacagacctgttttgatgataagcttttggagaagcatattaaaaaaagaacttattgagagccgccagttagttcgtgttgtctcggttagcgaggatgggccatcttcagctgagccgttgacttcaatgtccgtggcttctggagcttccacttttgaagtcttgatgaccttacctaagtgggcagcacaggttttgaaatatcttgctcaagaaacatcttacaaaagcctggttccacttggaattgcttctgtaaatggtactccagtttgttcgttcgatagtcaagatgtggattggcttcttttctttcgcacaatccaagatgaagctattggaactagtctatatccccatccgccaagatggtctgcatcccttgcgaagaacagagttaagggaagtatggtgtcaaaaccagctaggtgaaggatacaaaggcagtggcaatttgtagttgcgcaaaggtggtttctatgccagatgttgagagaatgtgcagctcacttgcacatcaacaatataccatagcaagggcaaggctctatgttgagtgaatccaaacttatactcctttgacgaacttgtcttggttttgctgtggatctcattatctggttgttggtttattaaccgcgaccaaatttgaatcttgaaagttgaatttagagatgttttttttt

SEQ ID NO: 20489 - DNA, 1730 bp, Oryza sativa
  ref <308>: DATABASE ACCESSION NUMBER: AK070806
  ref <309>: DATABASE ENTRY DATE: 2001-12-06
ggtcttctctcctctcaaaaagaaaaaaagcaccccgcgcgctcgagtctacgctcccatcgccctccgcctcgcctcgccgcaaatctcaccactcgccaccgcctccctccccctgcctcagcgcggctccacgctcccttccactttcgccgccggcgcgcggacggacgggcagcagatagccatggctgcctccgagcagcgcgtcgtcgccgtcatcatggtcggcgggccgaccaaagggacgaggttccggccgctgtcgctgaacgtgccgaagccgctgttcccgctcgccggccagcccatggtgcaccacccaatctccgcctgccgccgcatccccaacctggcgcagatatacctcgtcgggttctacgaggagcgggagttcgcgctctacgtctcctcgatctccaacgagctcagggtccccgtcaggtacctgagggaggataagccccatggatcagctggagggctctacagcttcagggattacatcatggaggacagtccgtcgcacattgttttgttgaactgtgatgtatgctcgagcttccccctgccagacatgctcgaggcccacaaaaagtatggtggaatgggtactttattagtcaataaggtctccgcagagtctgcaaaccaatttggtgagctcgtagctgaccctgaaacaaatgaactgttacactacacagaaaagccagagacttttgtgagtgatctcataaattgtggggtctatatatttacacccaatatctttaatgccatcgaggatgtcttaaaacagaagaaagacagagctaacctgcgccgtgtctctagttttgaagctcttcactcggcaacaaaagcacttccagcagactatgttaggttagatcaagatattttatcccctctagcaggaaagaaggaactttacacataccagactctcgacttttgggaacagatcaagaccccagggatgtctttgagatgctctggcctatatctttctcagttccgccatacctctcctcatcttttagcctcaggagatggcaaaaggagtgccactattataggtgatgtgtacattcatccgtctgcaaaggttcatccaacagcaaagatcggtcctaatgtctcgatatcagcaaatgcacgtattggagctggagccaggcttattcattgcattattctggatgatgttgaaattatggagaatgcagttgttatacactcaattgtggggtggaagtcaaccgtaggaaaatggtcacgtgtacagggtgaaggtgaccataacgccaaactcggtatcacaattcttggtgaagccgttgatgttgaagatgaagtggttgtagttaacagcattgtgctccccaataaaactctcaatgtcagtgtgcaagaggagatcatattatgatagtcctttcataattcatatttttattcaattccaaataaggtctgcggaccaatatgtagttcctctcttttattacctccttgtaagcttccccccagattgatatcattagtctatgttatagcaagcttgagatatggacagtgtaattttttagcgtaaaatttactgatgtaaaaatgtacaaacatatgacaatttttttttattgaactaacgattttcatcaagcatcaacagtgcgatggtgtatctggggttgtgttttggattatagatcatattgaatgcc

SEQ ID NO: 20490 - DNA, 1312 bp, Oryza sativa
  ref <308>: DATABASE ACCESSION NUMBER: AK070807
  ref <309>: DATABASE ENTRY DATE: 2001-12-06
ggccccgaaatccccaaatcccccaccccacccctcctcttcgcctcgccgccgccgccgccgccgctcctccccctccatcccacggccagatccgccccctccggcgagctccacggcccccgtctgccgccgccgccgccgtcgcgcccccacccctcacgtgcacagcagttaactagttcgtgggattggaggatttcagatgtcgcaatccaaggaagtgaggtacactgcacgttctattacgcctcctgcagatagaaatggcacttcaaagtcaaagtcacccactccagtgagacgcagtacctctaggtcacctcctccaaagaagagtgattcaaggtctccacctccaaggaggcgcagtacttcaagatctcctcgccctagaagacatggcagatcaaggtcaaggtcaagggataggagtcgctccaggagccgagacgatgatttaagaaacccagggaataacctttatgtgactggattatccactcgcgtaactgaagaagaccttgagaagttctttagtaaggagggaaaggttcaaagctgtcatgttgttcttgatcctcgtacgaaagaatctcgtgggtttgcctttgtaactatggattccgttgatgatgcaagacgttgcataaagtacctgcatcgcactgtacttgaaggtcgcctggtcactgtagaaaaagctaaaagaactcgggagagaactcctacacctggaaaatattgtggccgcagaggctctcaaagaagttccaggagcccatcaccttaccggtctcgcagaagggagcgatctcgctcaagagatcgtcagagggaccgctcacgctccagggatcgccgcagggaccgctctcgctcgagggatcgccgcagggaccgctctcgctcgagggatcgccgcagggaccgctcgcgctcaagggatcgtcggggcagctctccacatgacagagattctcacaggaggcgtggagacaggtccaggtcaccggctaccaacgggaaccacaaaaaggactagcaagttttcccttcgggtgtttgtaggactggatttctgtttccgggatattattgagtaccggtgtgaacttaatggttcagtatcagacagcgtggtatggagtctcctagcagcttggctgaaatttggttaagcgcgttatccgcttactttctgatgagaagatattatatattgttataacttatatgatatttcagtgtgttctgggacaaaccgcgaacgattgaactttgtggaattcatatgattggttgcttatcc

SEQ ID NO: 20491 - DNA, 1918 bp, Oryza sativa
  ref <308>: DATABASE ACCESSION NUMBER: AK070808
  ref <309>: DATABASE ENTRY DATE: 2001-12-06
gtttcttctcctctctcctctcactgacccgccccgcctccttctctcgccgcgctctcgttaagtttctctccggagtctcgaactctcaaccacttccctcctcgtcgtcgtcctcctcctcccactcccctgtccgcgtctcggctgactcggcgactgaccgcgcgccaccgccgctgacggctgagcacgccgcgcgccggcctaaccctggtcaagtggcgacgccgcgagcgacgggttcgtcgtggggtgtcgcacgtggcctcaccctccccggtcccttgaatcctctgcctccgcctccgccaccgcacctaccaacccacctaccgccaaatcgcgcgctgcgactgcgagcgatcgaggcggcctagcctgcggggggctgcctgggcgacgtgaccggcccgcgctcctctccgaatccgaagccgcagcgcagagcgcacgcctcctccccgccggaagcggagcaggacgcctcggaatcttcgccagcccgtgctccggtcggtcatcccatctgctggattgtcgtggagcggagcgtgagtggagtggagatccgtcccgaccgctcttccgtgtcgatacagactagtttgatcagtggtggtgttaaatacgaagtttttatcatataacatttggaaacatgcataaggggactctcacgtcttggaaatgagtaattccattatctgaaaaatggacgatacaccaactagttaggggaaatccgaagtgaattcatgtgaaccgagttggtggccaccagactttttggcaaagatagaatctgtttccttatctagaaaacaaagtgtattttctgataaagaacctcgaagcaatttgcgatcctcatcatggaaggcttctcaattactgtggtcaacagggacttattcagggttcatccctaatggtttctactcaataattccggataaaaagctgaaggaaaatttcccaacaataccatcattggatgaccttcaaactcttgaagcagatggacttaaggctgacataattattgtggacgttgagagagataagaagcttttcatgttgaaacagcttagtggcgcacttgtgaaaggattaaactctagtccagctttggtgataaagaaaatagctggcttggtttttgactgcttcaagagcctagatcctgatgtaagtcctgcaagatctccaactgaagataatcatttctttggaaacaaagggtcacaacttctagggcagataaagcatggatcatgccgaccccgagctatcctgtttaaggttcttgcagatgctgttggtcttgagagtaaacttgtagtgggtctacctgatgatggtggagttggatttgtggattcctacaaacacatgtccgtggttgtttcactgaactctatggaactgctagttgatcttatgcgatttccagggcaattaatcccgttctcagccaaggctatctttatatcgcatatctctgctgctggcgagagtgattcagccgaaaatgactcatgtgattcccctcttgagcccaacagtcctctgtatggattatcagataaagttgaagctgaaggaattgaagcttcatcaaatctatctgggcgttcattgcgcaatgttatgttgaggtcaagaacattttccgaggggaaattgagcacatcatgcagcgagccaaatattgcaaatgccttttggaggcgaagccagagaagaggagttgctgaagaacctcgcggtgctagttcaagccctgagcatccattaatgaagacaagggcaagatctatactaggtggcgagcaacattcatttcaggaatatgcagaaagtggagttacatcaagatcagatggtctaggtggtgcatcaacatctaaaactc

SEQ ID NO: 20492 - DNA, 2364 bp, Oryza sativa
  ref <308>: DATABASE ACCESSION NUMBER: AK070809
  ref <309>: DATABASE ENTRY DATE: 2001-12-06
gagccactcgccactgcaaagcgctctctctctctctctctctctcgcatcgcgcgcagccttcctcatccccgtcctgatccactccacctccctaatccacagcgcgcgccagaggaaatccggcgccggtcgaggcggccgcgccgcgccgccgtcacgcccagcccactcgattcggtcgcgtgtgcgctaggaagttcgtcatacgcctcgcggttttcacttcgtgtgtttttcttttaaatttttacctgtgcttcgtttaaagcctctcttgatcttaggtatagctttgctcgatctgattataggtatgttgtatgtttctggtctcccgtgattgcgcgtggattgtgattatgactaatttgcttgatctgaatatctgattgtggtggtggtgtgtgtgtgtgtgtgtctgatttgtctgatctgttgtggattattattgtatgatttaccgtggttttatgttgtttatatataagcgtttgccatgagtctgattaattgtattgttgcggtttttcctaggtgtcatactgtcatgctcgatttttacaaggtttagtgcaaactgatagatgatgtccatccccaaaactccgtctaccagtattggttcatgtgcgagcacacgggatagttcgagttcctgtttgatattgattcgctggcgctggttgtttggttggtttattagctagagttgtttgtgtgcaaaggtgggatcatggttgcaaaggcatattgatgaatgacgattcataagcgtggaaagcaatctctgtgcaaggggttattaggattctttgtgcgtattcactctaaaccgatagtcttgtattgctatcagcaccacgttatctatttcctaaccaatgttttctgcatatggactctgcattttgcttcctctccttgtaccacacccagtaccctatgtttgtgcctctcccatggtccatctctcctgttaaaaaaataaaaataaaaataatagaatagaaaaattctagaccaaatacagggaagaaaataaattttgtcaggcaagagagcgacgaggcgatggggaacttattacttttctggacaaatccttcaatttgcctcatctatatcaatggaattgggaaagcagtggactacttaccatgtattggctactaatttccaccactccttgccagagaattgggaaagtgaattctcttatgcaggttctgtcagagtattgtaccagtcattgagatgactgtattcagtagagaagttttgtagataggttaaatttcaggtacaaaccaatgaagtaaaaaagtcttagtatgatggatgtgagaggctcaagaagttccctgattggagaagcaaaggaataagttttttatatggatgtgctatggattttaattaaaagaatggagaagtttcttttgttgaagatgaagctgttggcagctggagagaatgggggtggacaccacagtaagtttgatgcagatggacactgttcgaattgcttgggaactcttccatggaatctggatggataccttattgggtagtaaatttcttaatacagctcgctatccagatagcgctagctgtgattgtttggtgatcaatctattgggattgtgccgactggagctgttcgacattgctttggtcttttgttgatttgcctggagttcggcagtatacagcaaccctggagtgcatgcagtggtttcctcattttttaggacctgactgcattctgtagtgagaactatcctgctaaatgcataatacttgcaggtgttttctgttgtattggcaacgtgatagtttttgtggtgcaaaacattcaagatgggcgccatggacgtacaacttgagtctactgctgttcaacatggacaagctaagataaatgtggaggaacatgctctagtttctctgttgtctgatgagaagtacgcaactgaaaagaccgaagatgtggaccctgatgattatgagaaacttgaggaagggataatgcagtatgggtgtgcacattatcgaagaaggtgccgcattcgagctccatgttgcaacgagatttttgattgtcggcattgccacaatgaaacaaagaattcaattaaaattgatgctgtgaagaggcatgaactcccacgccatgaagtgcagcaggttatatgctcgttgtgtggcacggaacaagaggtacggcaagtatgtatcagttgtggtgtatgcatggggaagtacttctgtgaagtgtgcaagctctttgatgatgatgtttcaaaacagcaatatcattgcaatggttgtggaatatgcagaattggtggctggagaaag

SEQ ID NO: 20493 - DNA, 1542 bp, Oryza sativa
  ref <308>: DATABASE ACCESSION NUMBER: AK099154
  ref <309>: DATABASE ENTRY DATE: 2002-08-28
gaattggaacagttcattctccaatttctccaaattgtaacatggtatcagacccttgttccaaaaaccctagccaccaaatccgatcatcaccggcgcaccggcggcggtgagccgccggcgagccatcatcatcgtcctccttcatccctcaacgtttttgtctccaagcagcaagcctgcagttcgtcgtcgtcaccgtgttcctgttcgccggtcgcagccgccgccagttgcggcgccgcgcccgttcccacttctccacccacgcagccacgccgtcgtggtgttcatccacgctgctcgtcgcggggctcgttcttgccgccgttcgagagccgccgctgtggcctcgtcaatctacatcaaggcatcaagcaacatcagtttttggcccatttcttgtcagttagcatcagcaaaccatcgtcctctctgatctgcagcagcaacaacaacaactcccgttcacctcctagtagatgcagcagctagcccattgttgtctcctaatttcagcagtagaatttccatgttccattgtttgtgttgcaacatgcattctgcagattgtcatcaagcttgtattccaccacatgtgttagtcagtttttgcgcttgctaatcgctgccatccactactcactcatcaatcatcaccatgctttgttattgttagctacttattataatccaattttacttctccaaattatcatgatggcttgtagtagtcactggttaggtcattagctgcttgcttgctactgtcaacatgttcactagcatcctttgtgtcttttgctagtaatgtgcatctctgcttgcagtccatctatcaatattgcctttttgctatatccatcaatccgtgttctttactaatcaaattcctgtgtttcctaccgagtccagcaaaatccattgcatatccttcattttgtcgaagctgtgccagtccatctcttcatggtcatttcatcatcaccagctccccgtcggagctggccttcattgtcacttcatatcttcatcatctccatgtcggagcttgtcatcatcatcatcaatcagtgaaggtccgaagaacagtttgtgaagggccttcatcaatatcaatgtctcatcatcaatcaaaggaccgaagaacagcttgtgaaggtccattgtcatcatcatcaacatctccgaatcaatgaagagccgaagaacgattcgtgaaggcttcaaggtaccgagggccgaagaacagtttgtgaaggctccgaggtccatttcattgaggagggggtcttttcttcttcatcatccaagaattgacacacttcgacgacatcatcaagactttggagataggctaatatttagattgtgttctcatgtttagtttacctttcaaatgcaatgttattacatacacattgcatttgagtgggggtgttaagggtagtatgtctaggggtattttagatatttcccatctctctcttgtacaaatatattttgccctttgggcctaatctaattggaacagttcattcc

SEQ ID NO: 20494 - DNA, 659 bp, Oryza sativa
  ref <308>: DATABASE ACCESSION NUMBER: AK070810
  ref <309>: DATABASE ENTRY DATE: 2001-12-06
gctgcttaattaatttgtcctcactgaatttgattcttttcatcatttcatcctcctcctcctcctcctcgtcgttgtcctcagccattgccgccgccgccgccgccgtcgtcgggcggcggtggatggtggtgcggcggcacgccggcggtggcgcagggggggaggcggaggatacccgctgaaacgagactcatggccaccaccaccaccaccaccgatcgatcgagacgtcgtcgacgacggacagatcgacagacagaaggaggcaaggtgatcgccgcggcggtgtatatagccaccacggcgaggggaggaggaagacgacggcgacgcgtggagagggggagacgtgtcgggggcagcgagggcgacgggggcaccagagacacacaggcgagctgcatgcacggcaacacgtacgtttcagctaaccttagctattactattagctttaagcttagcttagctttatctcatctttttgtcatgctatgcttgctagctgcatgcattattggcttattgcccatactctctcaccttacagtactaccttaggttagctgtagcggctgagtgaacagcacgctatagctcacgggctatcttttcgcttgtatttatgcttatagtaaaaattaaaattttcaacttc

SEQ ID NO: 20495 - DNA, 3437 bp, Oryza sativa
  ref <308>: DATABASE ACCESSION NUMBER: AK070811
  ref <309>: DATABASE ENTRY DATE: 2001-12-06
ggctgtctctctccgttaattaataaatttcccccctcctcttccttccttcctccaccggctacgcgctccgtctctctctctctctctccgtttgcttcgaccaagctagggtttcgccgccgaatcgagctcggtggcgcggggattttgcggtggggcggagcgcccgcggcggtggggaggcttcgggtggcctcggcctccgtccggctcgatccgatcggcacacagccataagttggtgttccatgagcttataagagtgatgccattattggcatgtttctatagcatctagcatctcccaatgttatgcatgtactgggctcccttaaaagatggaaattcagaagtctgatcatcatgagcagaatcttacttcaccaagagggctaatccataaagtgctgcgtcgcacaagtagcaggcgttctccaactgcagcagaccataacccttctcctgtattcctggagacaagcaattcaaaattcttaaagcaaaaggatattgatgatgccatcaaggatccagagaaggcaggcacacacgacaacagaattgaagatgagaagtctgatttgttagggtatgaaatttgttctgggaagcttacattggataacaaagccaaaagtgcatcaggtgaacagtctggatcagggtccagtagcaattgctttgatgctagactcactactgaagccttggtatggggttctaatatccttaagctcgaggacattgtatctgtatcatatcattccgggctccgtcacttcactgtgcatgcatgccctcttgaaaaaagatccagtggactttcctgctttatgaagcctagaaaaattcaaaaggacttacgtttcctatccacttctccacacgaggcttttcggtgggttaatggttttgcagatcaacaatgctatgtaaatctattacctcaccccatggcatctagcaagaagcattcatctgaactcattccatttgataatatgtttgatccatgtgttaaatgccggtctcccccaaagatacttgtcatcttgaatcctcgatctggacatggtagatctagcaaagttttccacggaaaagtggaacctatattcaagcttgcaggtttcaagatggaagtggtcaaaactacacatgctggtcatgcaaaatctcttgtatcaacaatagatttcagtacctgtccagatggaattgtatgtgtgggtggcgatgggattgttaatgaggttctcaatggtctcctttgtagagatgatcaaaatgtggctgtatctgttccaattggtataataccagcagggtccgataactcacttgtttggacagtattgggtgttaaagatccgatttctgcagcatgtcaattgtcaggggaggttttacacccattgatgtttttgccgttgaatggattcaaagtgggactatccattttggcacaacagtctcatattttggttttgttagtgatgttcttgaactctcagagagataccagaagcgttttggtcctctccgttactttgtagccggttttctgaaattcttgtgcttgccaaagtataactttgaattggagtatcttccaatatcagatggtggtggtggtgagcataaaattgtggaagggcaagataaagttgatgcatcagacctctatgatgatgtagttcggaggtcgcgagtagaatgtctacctcgtgcctcaagtttatctagcattgattcaatcatgtctacaggaataatgtcaggtggagatctagaggtttcgagtccacatgctaataatgaaccctctgaacttgttcgtgcacttgacccaaaatcaaagcgcctatcattagggagaacaagtactttcaaagaaccagaagaagtgatccatcctcaggctcatgtttcatcgactcccaactggcgtagatccaaatcgaaatcaaggacagaaaaggcatggccaggctcgggtgctacaaatgatgcaaattcctctcgtggtaccacaacacatgacaaagaagacgcctcctccacaatttcagatcctgggcctgtgtgggattcaggacccaagtgggatgatgagcctaaatgggataatcaacctaactgggaaccagagactcccattgacttacctggtccattggatgatattgaacttggtctgactaaggaactagtcccaagcttagatgaaagatggacagttaggaaggggcggtatcttggtgtactggtatgcaaccattcatgcaagactgtgcagagtttaagctctcaggttattgctcctaaggctgaatacgatgacaattgcctggacctactgttggttggtggaagtgggaggctgaggttactgaaatttttggtgcttttgcagtttggaaagcatatttctcttcccaatgtggaatatctgaaggttaagtctgtgaggctcaaggctgggcccaacacacatgatggatgtggtattgatggtgaactattgcatgtcaaggggcaagttcgatgcagtttgctgcctcagcaatgtcgattaatcggcaggccagccaaaaatcctgtacagtagctgtaaatacatgactccaaagtctgcacagttctcaagtttgcccgatatcctgttcatgtacaatcggcaaaggtgtggattatttttgtccacgcccacagattcatagctacagtcaagaggtcagaacagctttgctggcaccttgcttcagaggtgtacatcgtgtgcttgatcatagctaaagtcagaagtcagaacagccttgctgacacccaacttcagaggtgtgcatcgtgtgcttgacgagcaaaagtgcctggtgaggtgatgtctatccaaatgtaaaagcctatccggagtctggactgcagcttgttgtgtagtacatctcgtggtttctcctttttaccttgctgatatctaatacaactactatagagtaatctcgaatcggtgtacttgcattcgaaacaacacagtggctgccacccccagtgtgcgcggttgtttggaggtccctgtttgtgtggttgttttgaggtccctgatgccggccacttgatgttcatcgcccccattaaagggacagcaccccgaatgtgatgtccttgatcagcttgagccttgtagtgtttacaaagtgtgaataagacttgtgtcctgcggtgtttgtgttctcagtacagtataggatttttcaacaggaaaaaaaagatggacaatctgtagtgcagaactgctcatgtacctttctatcccctcccttgtaacttgttcttcgtgaattgtggtgatgtatgagttgtatttgtacgtgttgtctgccacatgagctagatgatgatgatcatcttgtgaagatagagttactgatgtg

SEQ ID NO: 20496 - DNA, 1759 bp, Oryza sativa
  ref <308>: DATABASE ACCESSION NUMBER: AK070812
  ref <309>: DATABASE ENTRY DATE: 2001-12-06
gtttgcgtgagcccttccccttccgcctccgcgacctcgtcgcggcggggtcagatcatcgccccggactcgccgccctccctgcgatcgtactccgacgactcgccgccgtcgacgcgggccccggccgtccaccctgaggtggaattcgaagccaagccggccaaacgcgctcgcgtggttcccggtggcggcggcggcggtggcggcgccgatgcggcggccggagacggcagggaccgcatcagcgaccttcccgacgccgtccttctgtcgatcctctctttcctccccttccgggacgccggtcgcacggcggtgctctccaggcggtggcggaaactgttcgacgaatccctgctggacttcaacgcgtgccagccgttcccgccggaggaaggccgcggctgcgagtgggtcatccgctccatcaccgacatcctagcagcccgcccggacgtccgcatccgcagcttccgcttcgtcatgtatgggcaggggttcgcggaccacctcgccgacgtcgatcgctggttccgcaccctagcgcaccgcggcgtccggcagctcgacgtcgacatgctgtacacggtcccggcaccgctcctcccgggttccattctcgagttctcctccctggaaatcctcagggtgttcaactgcaacttcctcgatctttccctgccggtgcttcggctccccgtcctcaggacgctcgacctgtccaacgtctccatgtcccagggcttcctgcaggctatgatgtccaactgcccatcgctagagtgcacaaagctgaagaacatcaccggactagacaagatatgcgtccgatcgaggaacctggtgcgcctgttcggtgatttcagttacctgaaggagctcgtcgtcgaggacgcccccaacctcgaagaattggtggggatcggcctcccgctcgctgcagcgaaggtcaagatcgtcttcgcgccgaagctgcgggtgctgggttacttggggaagagcgtccgcccgctcgtgatatatgacaccgtgtttgatggaggcatcgtgcaatttaggaccctgatgcgcagcgtataaactttggctattcaggtgcccttctcagagaaggggcacaccatcttcgttgcccaattgctgaaatgcttcccatgccttgaggcccttcatatcgagccagacagccggtcaatttgccggccggtcgatgttgaagagtgggacacaataacatctgtccagtgcattgaacattccatgaacaaattggtcttcgaggattttggaggggaagactgccaatggaggtttctgacgtttctgcttgggatggctaaagctctcaaggatattgacttccactgttcagaaagcaaagattgggcaagtaaccagatagagctactagcctatacaaacagagcctcagccgatgtcaggttccatttttacagattcagtagttggccggtcagtagcctatacctgtgccattgctgcccccagcgatgccaaaaggaagagagaattgctctcatataatttgtatatataagctattgacgttttataggtctgaaactgtgtgagactgagagtagttcaattgttcaaagcagcacaaagaacaagtggcgatgttcctttgtcgattgtgggttaatccgtagtgttgtctgaaagtttctgacgccattcagtggctgcataagttatgtgattcttgtgtctgaatctgaggaacagtttgatt

SEQ ID NO: 20497 - DNA, 1487 bp, Oryza sativa
  ref <308>: DATABASE ACCESSION NUMBER: AK070813
  ref <309>: DATABASE ENTRY DATE: 2001-12-06
tactccctccctatcatccacgactccctcactcctcaacgccatatccaaatctcccgcgaatccctccaaaacccaaccatacattgcacgcgctcgcgccacgcgagagccgagaggtttgcgcccttgcagttgcggggtgggaggggagaatggcgccgccgctgctgccggcggctgaggaagacggtggttgcgtggcgaggtggatgcggagggatgtgctgctggggctggcgctggggcagttcgtgtcgctgctcatcacctccaccggcttctcctcctccgagctcgcccgccgaggtatcaatgcaccgacatctcagtctctgttgaactacatccttctctcccttatctatggaggtatactcatctaccggagacagcccctcacgataaaatggtactactatttgatccttgggattattgacgtggaagcgaattatatagttgtgaagtcttatcagtacacatctttgacaagcgtgatgctcttggattgctggtcaattccttgtgtgattattcttacatggatatttttgaagaccaagtatgggctcaggaagttcatcggtgttggagtttgcgtggctggacttatattagtagtattttcagatgtccatgcctctgatcgagctaaaggacccaaccctttgaagggagatttgctcgtaatctttggttccatgctttatgcttgcagcaatgttacagaggagtacctggtcaagaaaagcaacagaattgagttggtggcaatgttgggactttttggagctattatcagtggaatacaaataagtatacttgagcgaaaagaacttcattcaatcaaatggaatgctggcgcagtgcttccttttcttggattcgcattagcgatgttcctgttctactcaactgtacctacagtactgaagatatgtggggcaacgatgctgaacctctcactgctgacttcagatatgtgggctgttctgatccgcatctttgcttaccatgagaaggttgactggatctacttcgttgccttcgccggcacagcggctggcctcctcatctactcatacaagagctccaaggaggcagaggagacggcgcaggtcgccggagctagtgacaagcagggcaaagcgggcgatgaagaggccggaatgcagaactcctcgtgaattgaagctccggtgcctgcatctgcatcggcatcggcacgatctctctctaacaagggatcatcgttaactgcgtgcgagtacacgtacttacagggaaatatgttagttgttgatgaattaacatcaggtttagtgcgggtggagtgagggaggacaggcagtaattgattgagcagatgggtagaagagatcaaacgatggactgaaggagccgaactgaggaccagaaaaactgggcaggaagctttcctcaccttttattattttataaaatatatacatcaataattttac

SEQ ID NO: 20498 - DNA, 1035 bp, Oryza sativa
  ref <308>: DATABASE ACCESSION NUMBER: AK070814
  ref <309>: DATABASE ENTRY DATE: 2001-12-06
ttgaccccgaatccaatataaatcgcagcgttccccgtccctctctctcctttcctcctccctccgccgccgccgccgccgccgccgccgcctccgcctcctctttgtttctcctcttaggggctagggcttggctttcgagaggcagcaccgccgccggggcaatcgagcaggcggaggggaggagctaatcaaatcaagtcaaatcgaatcaaatcaaattcaaattcaaattcgactagggcagcaggaggaggatggtttccctgtcgacgtggtttcgctacgccgcgcacaagttcgagtactccatctccctctcatggaagaagtataacgttggccagatcaacagcacccagttaaccgatgccgtctggaagaacttcttccaaggcaagctcacctacatgcattggaacaaggggggagaagccatggcccccatcgaatctactacgggaggaaccctccttgttagaaagctcgtcaatttgtctccaacacaagtctttgttggtgatgttgtcttactaaaagacccagagaaatctgatgatttaatcgttcgacgattggctgccctagaaggttatgagatggtctctaatgatgagaaggatgagccgtttgtacttgacaaggatcaatgctgggttctggcagacaaccaatcactaaagccaaaggaagctagggatagccgcttgtttggaccagtccctatgactgatatccttggcagagtgatatactctttaagaacggctgtcgaccatggcccagtggagaacagccgaatggccatgaaccaggattcaccagttctggcagtagagcttgatgtggaagagatggcgaagaataataaagtgtagataattagtgcttttgacgtgctgtggtgtaacttttcccttcgatggattttgttattcgagagattagttgcttcaagtagaacattattctgaacttgttcactatttactcgtggagaagtcaataatcataagaataaccatacgggttgct

SEQ ID NO: 20499 - DNA, 1022 bp, Oryza sativa
  ref <308>: DATABASE ACCESSION NUMBER: AK070815
  ref <309>: DATABASE ENTRY DATE: 2001-12-06
gatagatgcactaatccatcctgtagcttctaatcaaactgagagggagagagatcagagagagcgcatataaatacaatgagcaggtcgagcatggccgctgtcttcctggtggtgttgatagccatcaacgtcgtctgcttatccccacaaggtgcaactgcagcgccagagggggaacttcataaactcaaccttgagctgccaccgccgttgccgcctgggaaggaaccctcaacggaggcgtaccggttcacccaacaagtctgcggttttggaactagcaccttcacggaacagatgatcggtgcccgctgctacgatgtactcatcccgtatggcgagtcattcaagggcaaccaagtgaaggccactcaggtggccaccatcatcttagtcaccaagatccaagccctcactagtgaggcgtacgcgataagagacatgggcatcagggacgaaaacatcaataactgcgggtctttctttgccattggcgaaaccttttcggacaccaccaactcgacgctatacgcgctcgagcgcctcactgccgccggagaaggtaaacgcagtaaggaggacctggaaactgtgcacaagtggaccaagaatttggagacccaatacgatgagaccgcgagcaagtgcaagttaggtgatctgttcaagtacggtgacaagaaggttcccaccgtttgggtcatagacctgctcacgaccacagccatccgcctcctcaatgccataaagccatgattgatcgatcgatcatcccttcaatcttagctatatataccttccactaaattttttttatttatattttggataattcccatgatatatatgtaataagtgcgtgatgcgcatggatatcgcatgcatgctgcatttgtaacattgttatcaatatttgaaaatatttttttcaatattgtaattactagcaaagtgtgtcgatgtgttgtaacggaccgaaaaaccaaaatgcaataatggttaagctgacaaacaatact

SEQ ID NO: 20500 - DNA, 3643 bp, Oryza sativa
  ref <308>: DATABASE ACCESSION NUMBER: AK070816
  ref <309>: DATABASE ENTRY DATE: 2001-12-06
tgttggatactgtgcagaatatggtcagaggttacttgtttataatcatttcagtagaaaaacactgcatgatgtactacatgaaggggaggaattggatggtgcactatcatggaatgctcgcctccaagttgctcttggtgcagcaaaggccttagactatctacatgagagctgtgaacctccagtagtgcaccagaattttgagccagccaatgtgctccttggtaatggattctcagtacgtgtcgctgaatgtggactggcagaattgacgctgtcaggttctgttacacagttgtcaggtcgcatgagggcactgctgaattatgaagctcctgaaatccatgaagctgggacttttacctaccgaagtgatgtttacagttttggcgtggtaatgctagaacttctcactggccgtaaaccatatgacagttctcgtcctcgtgctgaacaacatcttgttagatgggctgattctcaatttcatgacattgagtccatatcaaagatggttgatccttctattcaaggagagtgttctgagaaagtactgtcacgttttgcagacatcatcagccgttgtattcggccggaaccagaattcagaccatcaatgtcagagattgtccaagacctagctaggattataagtgttaccagtgaggaatcagagtaacgaagagatcaaggtggggccgtacatctaggaagccagctctcgcagctatcaaaaatattcagaggaaacacaatcatttctgtggagcatcctttcagtatttataatggacagcattgtcctttagtgtacatgttgattctggagccgcatttacctgttgaaaggtggtagtggtacagccaggggaacatgggccttctcattatgggccaagtagattcctgtacttcctagacattatcaaattgcatgtatatcttataatccattctaattttgagtattttattacattaaaattggcgatgttcatatggtgttagcatatctgattgctgtatctctctcaaagctcgttcagaaatcgtttattttgtttgattaactccatgtggtttttgtgattttagaaagtatactggtgtagaggtgttgttcagaggcggatgaaccctctcgacattcatatgctttcttctgtgaaactggacatgcacattctcctcctgcagggaaaaggatctcatttaggtatgtctcatgtgttcgatttactcatattttctattgtctttcctttataatactttctatcattgcccacattcatatatatgttaataaatctatatgtatgtgtgtgtctagattcattagcatctatatgaatgtaagtaatgctagaaagtcttataagctgaaacggaggtagtattaccatatagtatttgaatggattatgggtttatggttttggttacccttaagtggtgagtgctagtaatagagacaaacgggtggaaatatattgcttaaaagatactccctccgtcccattttaagtgtagccatgattttccgtgcccaactttaatcgtccgtcttatttgattttttttttgaaaaatttaaaagcataagttacgcataaagtactattcatgttttatcatctcataacaagaaaaatactaattataaaaaaagttcaaataagacggatgatcaaagttgggcacgaaaacttatagttgcacttaaaatgggatggagggagtagatggtaaacagcagctgattactaccttgtctgttctgtgactggcagtctgtagtaacattaaatttgcttttgtagtgttagattagcactctatgcggaataatttggttatacaagagaaacagtactgtaggatgttttgcatgctgaaatttgctcttctttcaaagctagtactgatagctccaaccatctactatttcacttgcttccgtatgtgcttgagttagaaacgttttgtatcctttttcaccttttggaacagagaaaactttactgtgtcaacactggaagcatagatcccacctatgcttttggataacttcttgccgactaaaaaaaaaatatttgccttttttttctagagtataacatgatcatctgctttgattggagtaatgcgctcctatactttgttgctttcacctacttttctgggatgcctactgttttgaaggggaaaaaaatctagataagtagatgcactcatcaaatcattaaaacctctacttatttagaaccataggaattgcaatttgcagaactccccatttaggacagtgacacgtacacaggtgcccggccacaagaaggttagttgccttgcacaggcacattgagctagggaacctgcacctggtttcaggaagcagttttgccgtgccatattgccatgtgggtggtgccaagttgcacagtaccgatattatgaggctggcaagagttgccgtagcagggggctctctcctctgccaagtgccttagcccctctcgctttctcccccacaaatgtcactcggataaacgagtgtctattaccattgccaaggcctcaatcttgtagtggtccatctgtgtaaggatggttatataggttagctggtccacatcaatggatcaaccgcactgtcctgtggttgccgttgatatgatgatccatggtacattgaacttttatttcatcgatgattttttattttctttcagctgtgaagactccatagtttatatagttattaccaaatatcagtgagatcaactgcattcctgaccgatgaaatgcagatcagatgtgcaggtttcatgaatggttttgggtctccccggttttcttttcttaacctgaacagaattagaattgtagtggttcatattagctctcatctcactgtcacactcatgcatatctttgccttgccaattgcagttggttgctgaatagtgggatctttactgatcctgcagaatcatggcgggcagatcatgcgtgacatcgcaggaagcaactcccaagttataacgggttgaatttgaaccaaacgtgtactctctttggcctgaaagcaacatggaagtaaccgaatgtactatgcgagtgagcttcaagtcgcagcggcacaagtggcgcatccctggttttgccatgctacagacacgcgtgcggttttctcatcgcacgcgtgacttcatcgtgcatgaatctcgtcgagacttgtcgttgttggcttgttgctggaggaaggtgacccgatgcatcgaaccggaaggacggatggatggcatctcccgtttttgtggctggtctcggttttccgggtcgtgtgggcccgtcctatcagaacagccgggtttggcattttgcagagcttctcttgctacctccgtcctaaaataagcgcaactatgagtttttgcgtccaactttaatcgaccgttttatttgaaattttttttataattagcatttttgttgctgagataataaaacataaaaattactttactcttgacttatgtttttaatttttttttaaaaaaaattcaaacaagacgaacggttaaagttgggtgcggaaaatcggttaaagttgggtgcggaaaatcatgtatgc

SEQ ID NO: 20501 - DNA, 1485 bp, Oryza sativa
  ref <308>: DATABASE ACCESSION NUMBER: AK070817
  ref <309>: DATABASE ENTRY DATE: 2001-12-06
aacaggcagcagcgtctgaactgaaaaagaaaagagaagaagaagaaactgaagagaggaatccgggcgatgggtgcggtgtccatgtcgacaacgacacgcctccccctcgtcgccgccctcctctccgccgctgcttgcgtcgcagcagcgcagccggccaccgccgaggccgccccggagacgcccggcgtaggcatcaaggtgtcgttccgccccagcgtagccatcgtcgttggcatcttcaccatgatcttctcgctcaccttccttctcctcatgtacgccaaattctgccatccatcctcccccgtcgccgcccccgcccccacggtcgtcccggcggcggcggcggacgacggcgtcgccaagccggtgatcgagtctctgcctttcttccgattcgcggctctccgcggggccaggcaggggctggagtgcgcggtgtgcctggcgcgcttcgacgacgcggacctgctccgcctcctcccgcgctgccgccacgccttccacctcgactgcgtcgaccgctggctcgagtccaaggccagctgccctctctgccgcgcgcgcgtcgacgccgaagatgccgcgctcggcctcaagtacgcctccagcgcacgcttcgtcccggccgggggggcgtccgagtccgagcgctttgacggcgaccaagacctcctgggcatcttcgtcgagcgcgttccgtcgtcgcggatggagccagcggcagcggcacactgccctgatctggaccgctacaagcaccgcatcgtggtgtcggacgcggtgttcaagagccgatggagcgagatcaactcctccgacctcatcgcgctcgacacggagctgcttcggtccatggagacgatggaggtggagatggagatggagctgtacaaggagacggaggaggaggagacagatcatgatcatcagcggaagacactgctggcggcaagcggcggcaggtcatcagtcgacgcggcggcgagggcgaggatgatatcatcgtcgtcgtcgtcgggatcagtgcggtccatgtcggagatggtgagcctgccgaggctgcgggcggcgatgagggagcgcctggcgcacgaggaccgctgggtccccatcgctcgtcgtacagcgcgctggttcgccggccgcgagagccgccacgacgaggctgccccggtggttgactcgccgccggcgtcccattccaattcccttgtctagtcgtctatctcatctattctaacttcaaatcaaacaaagagtcaaaacccgcgctgtgggtcccattggtcagtgtctttgttttgttttgttttgttttgttgtaccattattccctgtctgtccaatactattatcatgctggcctggtggggtggagtcaggtaccgtagtacatagcatagcttaggagaggtactgaccaaacctgctactccttttgtccattaattatttgctaccgagattatttttaag

SEQ ID NO: 20502 - DNA, 1721 bp, Oryza sativa
  ref <308>: DATABASE ACCESSION NUMBER: AK070818
  ref <309>: DATABASE ENTRY DATE: 2001-12-06
ggcgcctcgcgacttggcccgccgccgatctccatcccgcggccagatcagggagcgccgccgtcccgctgctcccatccgatctccatcccatcccatcccgatcgttgatttcaggtgggaatgacggagcaggagcaccgtgcgtatgcacgcgtcgggctcctcggcaatccgagcgacatgtatggcggcaagacgctctccttcaccatttccaacttctgggccactgtccatctagctccatccgacgatggtggcccccttgtgatccggccgcacccacgacacgatctcgtcgattttgcgtccctcccacaacttgtgactcgcttgcaaaatgaaggatataatgggggtgttcggctgctcatggccatctgtaaagttttctatagccactgtatccaacatggtatcgcactaaaggagcaaaatttcaccttatcatatgatactaatattcctcggcaggctgggctttctggttcaagcgctattatttgtgccgctctaagctgccttcttgatttttacaacgtcagacatttaataaaagtcgaaatcagacctaatattattcttgatgccgagaaagagcttggaattgttgctggtcttcaggatcgggtggcacaggtttatggtgggctagtctatatggatcttggcaaggagcatatggacacattgggtcatggcgtgtacacacctttggatatcaatcttctccctcctctacatctgatctatgcagataatccgagtgattctggcaaggtccacagcaccgttagacaaagatggcttgatggaggggagtttataatatcatctatggaagaagtagcgcggctggcccttgatggccgcaaggctctgttggacaagaattatagggagctcgcgaggcttatgaacaggaacttcgacctgcggaggcaaatgtttggagacgatgtgattggtacggtgaacataaagatggtggaggctgcaaggagcgtgggagcggccgccaagttcaccggcagcgggggcacggtggtggccctgtgcccggacggcgaagcgcaggtgctgctcctggagaaggcgtgccgggatgctggctttcttgtgcagcgaatccaagtcgcgccatcaccgctaccgctcacggagggtaatcctcctttctaatctgttctcgacttcttgtttactccctccttccctaaatgtttgacgctgttgactttttaaacatttttgaccattcgtcttattcaaaattttttataaaatgtgtaaaactatatgtatatataaaagtatatttaacaataaatcaaatgatagaaaaagaattaataattacttaaatttttcaaataagacgaacggtcaaacattttaaaaaaggtcaacggtgtcaaacattttgggatggagggagtatttctcagctcttttgttatcattcatacattatacatactctcttgctttgaatcctccatgaaggcacagaacttaatatcctcttgtcgagcctcttttttctccccaaatcctgatgacaataagtcatcatcttgctttcaattaagtgactgagtttgttttatttacgactcctgaaggagataagagcacactagttcagtttcatacacgagaatgtaatattactactgttcaccatcgattaattttggaaagccaattcaaattcg

SEQ ID NO: 20503 - DNA, 1552 bp, Oryza sativa
  ref <308>: DATABASE ACCESSION NUMBER: AK070819
  ref <309>: DATABASE ENTRY DATE: 2001-12-06
tggggcccacgcgcctcgacgcattcactccgcctccgcctccgcctccgcctccgccatcgatcgcctcctctcctctcccctcgccgcgccgcgaaatccgattcgcctgctaggctaggctaggctagggcatggcggacgcggcgtcgtcttcggcgtcggcgtcggcggcggtggcggggacgctgccggtggcggcggcggcgacggggaaggacaaggaggaccggcgccgattggtggggaggtgcggcttcgcggtcgtcggcatcatgagcaccctcctcatctacggccttctccaggaaaaaatcatgagagttccatatggagcagaaaaggagttcttcagatactcgctttttcttgttttctgtaaccgtatcaccacgtctacggtgtctgcgctggtgctaacggcaagtaagaaatccctggaccctgtggctccacttcagaagtactgtgtggtctctgtatcaaacatactgactacaacttgccaatatgaggcactcaagtatgtgagcttccctgtccaaacacttgccaaatgtgcaaagatgatacctgtgatgatttggggcacaattataatgaggaagaagtacggtggaaaagattacttctttgcagttgtcgtgactgttggttgctcgttgttcattctatacccagcatcaatggatgccagtccattcaacagaggcagagaaaacactatttggggcgtttcactcatgcttggttatcttggatttgatggtttcacaagcaccttccaagataaactctttaaagggtatgacatggaaatacacaatcaaatattctacacgacaatgtgctcctgtgttcttagtttgagcggacttattctccagaatcagatgattccagctgtggactttatgtttcgtcatccagattgcttctacgacgtcataatcctatccagtgttgcaacagctagtcagttcttcatatcgtacaccatacgaacatttggggctctcacatttgctacgataatgacgactagacagctggtgagtatattattgtcctgtgtgtggtttgtacatcctcttagctggatgcagtgggttggcgccgccattgtattcggagccctgtacacaaaaagcttcttgagaagtaaaccgcagaagccagccgctgcaaacccgtcgaattctgctaacaacagctgaccaaacgacataagaagagatccaccccatttgttgccttgctgcaccggaccaaacaccaaagtcttggtgtgagatatgaatgaagacatcctgatgagttaactggacgacaggttgtagggttgtgttaacatggagctcagaaggctcaagggttattaggctattagcttaggaggatccagtggcaaatagttgaggaagcccagcctgctggtagtgaaatgacttggctgccgtttttgaggctttatccaggccgttctctgcactgcaggtgcttgatatataaaatgtaaaattatctttgcagtcattagattacaagtact

SEQ ID NO: 20504 - DNA, 1571 bp, Oryza sativa
  ref <308>: DATABASE ACCESSION NUMBER: AK070820
  ref <309>: DATABASE ENTRY DATE: 2001-12-06
gctcttcctccgtccactccggggcgccattgcctagaattgatcaattgatactgcaatcaaggaagaacaccatagctgcagaggtacttatgtaggttgctgttcaggaggaggaggaggaggaggcgatctctgtacattttgaaggatttttgaagttcagtcttcagactaaaagagacacaggtggccaagatgactgctggtttccagcttggtgtgatcggatcactgacgctctcagtggcatcatcggtttccattgtcatctgcaacaaagctctcatcagcactctcggatttccatttgctactacattaacaagctggcatctcatggtgaccttctgcacccttcatgtcgcacaacgtatgcgcttttttgaaccgaaagcgatcgatgggcaaactgtaatcctatttgggttgctgaatgggacatcaataggccttctcaacctcagtttaggattcaattccattggattctaccagatgacaaagttggccatcatacccttcacagtaatgttggagaccatcttcttaaagaaaagattcagtgagagtatcaagttttctctgctgatcctgctacttggagttggcattgcttctgtcactgacctcaagttaaatcttcttgggtctgtcctttctggcctcgccatcgccacaacttgtgttggccaaattctcaccaacacaatacagaagaggttaaaggtctcttcgacgcagcttctgtatcaatccgcgccttaccaagcggcgatcctgttcgcaaccggccccttcgtggatcagctcctcaccagccgcagtgtcttcgcccacaaatacacggctccagtcgtgggtttcatcgttctgtcctgcctgatcgcggtgtccgtgaacttcagcacgttccttgtgatcgggacgacgtcgccggtgacgtaccaggtgctgggccacctcaagacgtgcctggtcctgtcgttcgggtacacgctgctgcatgaccccttcaccatgaggaacattctgggcatcctcgtcgccatattcgggatggcgctctactcctacttctcggtccgggagagcaagaagaagtcggcaggcgacccacttcccgtgtcgcagatgccggagaaggaggtggagccgctcctggcgaccaaagacgtcaacggtgacaccaagaaggcgaacggcgtgacccacgactgttgaatatatgtgtctcatttgttttagcatttagcccagcatttagctgtgtagcaccggcacacgtaagcctacccgttgtatctgaaattctgaatggccggggaacccgttcctttccatttgtcgatttcttgcgctttgtaagaagcggagtacctgtcgtcggagccggtacaggcagcagcccaaaaaactcgaggcccccggcaccacgagacgtacgagactgctccggcccctgcttctggatggatgatacgcaaagccccgtgtaagaaaaagtccatttggagtccctcatattggccgaatttctattaaaaaattcattggccgaacttaatttg

SEQ ID NO: 20505 - DNA, 2005 bp, Oryza sativa
  ref <308>: DATABASE ACCESSION NUMBER: AK070821
  ref <309>: DATABASE ENTRY DATE: 2001-12-06
gatcctctccttgtcgattccaaatccccttcttcgattgcagtgttgcgcctcgcgaattccaaccccgatcgctcgcacggccggccgccatggagagccccacgtcgccggcgtcgcggctggacttctacgacttcatcggccgcatgcgccgccccgccgccgccgacctcttccactccatcaggagcttcctcgcgtccctctcccagggcggcgagcccaacgccgaggtcgacggcggcagggtccagaccttcttcgcggagatggagaccgccatcagggaccacccgctttgggccaatgccaccaatcaggaaatcgacaacgcgctcgaggtgaccccgccctaacccttgcgcttgatttgctttctgattcaattgaacatcttgcgtctctcttgttatgcgcgattaggggcttgagaagtatatcatgaccaaattgttcgatcgagccttcgcttcatccgcggaggatgtgaaatccgacatggagatttcggagaagattggtctcttgcagcactttgtcaggcctcatcacttggacatacccaagcttctgcacaatgaggcagcgtggctgcttgcagttaaagagttgcaaaagattaattccttcaaatcaccacgagaaaagcttagttgcatcatgagctgttgccaagtcatcaataacttgctgctaaatgtgtcaatgtcaaatgatcgaacactatcaggggctgatgattttcttcctattcttatttacattacaatcaaggccaatcctcctcagttgcactcaaatctaaagtttattcagctcttcagaagagaaacaaggcttatctctgaagtcgaatactatctcacgaacctcatttcagcaaagatgtttataatgaatgttaatggacactcactgtccatggaggaaagtgtgttccagacacatatggagtctgcaagacttggtaaccacatatctgttgctagcactaatagttcacaaggattgggtacatccacaccaggacagaacgaggaatctggtgatacagaaggtctgtttttaacattagtggatcagtttgtttcagaataaagtttcacctcaattaaagtattagtcttttttgcacgttcatggtaagtttccttctggacttcttgtctcgtctaagaatcagtttagttagcagctatacaagagcattctgtcaaagtatttgaggtgtctaccgtacctatgatgttcctcaatccatctaaggttgggtttagatttagttttcctggcttcagctgcataatcacgatgcttagttcatatttaacaggattgaaattcccattcatggactctgaaactgaaagcttgactccagcggaagtcaagcaattgcacgagctctacaggcaagtagtcaccagatatacgctgctgtctaaagctttaagaaagttatcggtagatgaggatcagctccttaattcagtagatgattgatgaagccatgtaaaaatgctgaccagagatgacatgtcctattaaccacataattgatcgagattgtacacgcacgcaaagttttccattgactgtaggaaagcaaacgagttccaggcatctgcaacatggttccagggattccaggatacactacaggtatggccaaatgatcatcagagttgagaatggattcttgtgcctttgcattgcaacttgcaagccctctgtaatagcgtccacttctgtaatttttagttcctgtctgccccactccttggagctagcgtagtctctaggtgtgcgtgaggaactgcatatggcacatgttgctgttgctgatcatgttcaaccgttctacctcgtacttcgtatgttatacagcaaatcttctgtgctgaaaggtatctgtttgccttggtgcaatggtgggtgaacgtggtgacattgtgagacatatgcatgatttgctcatgaagtcattatggctgtgttttgc

SEQ ID NO: 20506 - DNA, 1368 bp, Oryza sativa
  ref <308>: DATABASE ACCESSION NUMBER: AK070822
  ref <309>: DATABASE ENTRY DATE: 2001-12-06
gacacactccaccttttgggattctcagaggaagcgacgggtgatggcttcaagctggcggcgacatctcatcctgtaccctagatccacacgagaggatggactggcctctcggcggctcgatctgcggggctcccatggcgatagagggcctctgggcctgcatccgccgctgcttttctaccattggttgctgtccatgctagagcagcaagatgggatggatctgatggggaggaatgagtttgtttctttcgatctgtgtgtgttcttcacggatggattattccattcgttcgcttccaatttgttatttctactcactaggggaaaaacaggtttgcatcttcttacattttgttggttgctcttgttgtagattgcgggcatccaaagtcagccatgtggagagcatcgtcggcgaccatgatgtgaggaggcagcaagggtaccggttttaggtgcccgtagtggataccgtcaccccgcatctggtggaggaggcggctggaggcaggatccggtttctggcaacttgatctagttttgtggtcatgtcgttgtgttgagggcggcagctcgatctgccctccggagcgaggacggcgttgctgcgcaaaggtgacgtcctgttcccggtgccggtggcagtgagttagggagggcaggatgatgaggccacgaggcgaaggtgcagcaaatggagggcgtatctaggttctggtccgcaaggtcagttcacagtatcaccgggcggcgttggtctctgggtaggcgagtgacgagctgctctggaattcctagcgagaggggatggtgctcctctccgccatcagtgtggatctcacatcgtcaacgagcatgtcgtcatcaccccaacatgaccacctcctccaagagtctaccatggctgcacgcaaggaggccgcccacggcttcaccgccgctgccgcctggccggatgccagaatcggcgggcgtcactatcgaaggcaggcttcaactcccccggcgaggcttctccatcgttgtgtgattgtcggccttgctctcctatgttcatgctttttgcttgtcgggttttaagcacttcttttttgtgctcaccctttcaacaccatgtcaagaccagcggcgacctcgccgagagagcagcgggccgccgttcctcctatgtccaaagaacgttttcctgtatatatatttttttgggttcatttgatgcgtaaattttatatccgtagagcgattccattatcctctctcccagtatgtatttcctgtctactttcttgcgttcgtttgatgtgtacaatacgattgatttgcatgattaaataaacttgattgtctgtgatgtatgcaccg

SEQ ID NO: 20507 - DNA, 1044 bp, Oryza sativa
  ref <308>: DATABASE ACCESSION NUMBER: AK070823
  ref <309>: DATABASE ENTRY DATE: 2001-12-06
ctaaagatcggtcttcagctgaagaagctttggctgatccgtacttcgcaagtcttgctaatgtggaacgtgagccctcaagacatccaatctcaaaacttgagtttgaattcgagagacggaagctgacaaaagatgatgttagagaattaatttatcgagagattttggagtatcacccacagatgctgcaagagtatatgaaaggtggagagcagattagcttcctctatccaagtggggttgatcgcttcaaacgacagtttgcacaccttgaggagaactacagcaaaggagaaagaggttctccactgcagaggaagcatgcttctttaccgagggagagagtaggtgtatcaaaggatggttataaccaacaaaacaccaatgaccaagagaggagtgcagattccgttgcccgcactacagtaagccctccaatgtcacaagatgcacaacaacatggatctgctggccaaaatgggtgacatccacagacttgagttcgaggagctatctgaagagtgcaagcattagtgcttccaagtgtgtcgctgtcaaggacaataaagaaccagaggatgattacatctctgaagaaatggaagggtcggtcgatggattgtctgaacaagtctccaggatgcactcctagtgcacaacgatgacgatgatcagtgcaagattctgtgaggcgcaccagatgctgataatttccaagcagaatgctgcactgcaagtttggactttggacaatgcaagtatgcaacagccagcccgagatgattggcatcttcttatgctcatccatgttcacatattcttcttgccattgtgctgtctgtcactacaggacccctgcatggattaatgtattatccctctgatgtaacactagattagtccatctgtccatggaggaatgaatagcaagcagccagcttgtgcatcatgtgggcatgttcattttccagtgagatctagtcatatccatgctttttttgtaatggtatatgaaacagtttatcagtgagactctggtcc

SEQ ID NO: 20508 - DNA, 1326 bp, Oryza sativa
  ref <308>: DATABASE ACCESSION NUMBER: AK070824
  ref <309>: DATABASE ENTRY DATE: 2001-12-06
gacctcgctcacctcactgccctcgctttcgtcccccgcatccgcacctcgtccttcgccaattcgccatgccgtcgctcgccacggccgcggccgcgggagcgggagcgcctctccgccgcggcccgtgcgcaccacgccgccaatccgcgcacgcctcctcctcctcctcctcctccctcccctcccccgcgctcgccacgtccacgcgcttcgccgccaccgcccccatcctgcggctcgtccaacgaaggccaagagcgcctctgacggcggcaagagcggcgagccccgacgccgccacgggggcgcgatcgccctcctccggcggccagatgctggtgttcgtgccgccgcacccgctgataaagcactgggtctccgtcctgcgcaacgagcagacgccctgcgccatcttcaagagtgccatggcggagcttggtcggttgcttatatatgaagcttccagagattggctgccaacaatcacaggagagatccaaacacctgtagctgtttcaagtgttgaatttattgacccaagagagcctgtcatggttgttccgatactaagagctggtcttgctatggctgaaaatgcttcatcagttctaccagccaccaagacttatcaccttggcctgcgtagggatgaagaaacacttcaaccttcgatatatctgaacaacttgccagacaagattccagaggggactcgtgtgctagttgttgatccaatgctggccactggtgggacaattgttgctgctattgacttgttggttgaacgtggagttacaagcaagcagattaaagtcgtttctgctgttgcagcgcctcctgcgcttcaaaagctcagcaacaaattccctgggcttcatgtgtacacgggaacaattgattctgaagttgatgagagagggttcatagttccggggttgggagatgccggcgatagaagcttcgcgacttaactatgctaattatcgcagctgctgttctacctccacgagagggattggcgtaagctgaaatttccgaggattcgagcgcttttgacttgggagtcaggaacggtcgagttcacgttcacctgtagattgcctcgttcgagattctcccttcggaacttatcgttttgtaattatccattttgtgttgtcatgttgaatataggattagttcacgtccatccacgtttacaatttgttgggaatatgcatgtttaatgttttcaattatatcttacagatttcttgatactccatgggaaaaaatgttgacgatgccttttccaatcagagtaataaagcaatgtgcaaggct

SEQ ID NO: 20509 - DNA, 1575 bp, Oryza sativa
  ref <308>: DATABASE ACCESSION NUMBER: AK070825
  ref <309>: DATABASE ENTRY DATE: 2001-12-06
gaagcacaccggctcgatcagctgtcaacactaatcgaaacctccttgcaaaattgcaaatttgcaatacatcactcagccgataagccacgttgagcccgcgacagccgacgcgggcgcgccatggcagtggcacctccttcgccgctgtccctcgtcttcgtcgtcctcgcggccgtctcgctctcggcctcggcggccgccgcaccggcgtcggtattgcccagaggagccatcccgaccaagtcgggctacctccccatcccgccggcaaacgcttcgctctacttcgccttctacgaggccaccgagccggtgacaccgcccgccaccacgccgcttctcgtctggctggagggcggccccggctgctccggcttcctcagcaacttcctccagatcggcccttaccttctcgccggcggctcactgtctcccaaccccttcgcgtggaaccgccgctttggtctcctcttcatcgacagcccgctcggcaccggcttcagcgtcgcgccttcccccgccgccatccccaccaaccagtccgtcgtcgccgaccacgtcctcgccgcgctccagtccttgtactccctcgagccgagcttccgtgcccgccctctgtacctcaccggcgagagctacgccggcaagaccatccccgcggccggcgcgctcatagtagcaacaaacccgacgttgccggagaagaagaggattaacctgcgcggcgtggccatcggcaacgggatgacgcacccggtcacgcaggtgaccacgcacgcggacatcgcctacttcatgggcctgatcaacgggaagcagaagcgggaggtggaggcgatgcaggcgagggcggtggagctgatcaaggcggagaggtggagcgaggcgtacgtcgcgcgggagggccttctgaagtggatggagaacgcctccggtgtgccgtcgctgttcgacgtggaggtgacgacgtcgctggaggcggaggccgcggcgctcgcgccgctgctgaacggcgccgaagcgaaggcggcgctgggcgcgcggggcgacgcggagtggaagatgtgcagcgcggcggtgggcgcggcgcagcacaaggacgtgatgaagagcgtgaagccggaggtggaggcgctgctgcggcgtgggacgacgccgacgcgcgtgctgctgtacggcgggatccgcgacgtgaaggacgggccggtgtccacggaggcgtgggttcgggagctggagtgggacggcctcgccgcgttccaggacgccgaccgcgccgtgtggcgacaccgaggcggcgagctcgccgggagcgtgcagcgccacggcgcgctcgtgaacgttgcggtgtatggcgcggggcacttcgtgccgttttctcaagggcgcgcggcgcaggagatgatcgaggattgggtgttcggcaagggattgttcggcgccagcggcgggaaggcgtaaggcaaaatgtttcttcatttatagtagggagtattttctccgtttcataatgtaagactttctagcattgctaatatctatatagatattaatgaatctagatacatatat

SEQ ID NO: 20510 - DNA, 1734 bp, Oryza sativa
  ref <308>: DATABASE ACCESSION NUMBER: AK070826
  ref <309>: DATABASE ENTRY DATE: 2001-12-06
gttctctcccctcccccctcctcctctttctctctcctccccttctcctctctctctccttccgctgattccgtcaccgcctctctcccgccgcccacgcggccaccggaacccgccgccggggacggcgaatccggggcggccccgccccgaatcggcgccgcccgctcccagatctcccaccccttccccgggggcgcctccgcatgtcatgagccgcccccatttgcccaaagacgaccacgcctgcgccaatgggttcttgttcgacggcgtggcccgccgccccggcgagatcgaggaggcggccgccttcgccgccgccgccgacgtggccatcaccatagccgccgagcagtccgggtccccctcgtcgtccacggcgccgccgatgtcgtcgtgcgggcagtacatgctccaccgggtgggcaagctcgacaccctcgccgggatcgctatcaagtacggcgtcgaggtagcggacatcaagaggctgaatggcctatcaactgacctccagatgtttgcgcacaagacgctgcggattccgctccccgggaggcatcctccgtcgacttaccagcagaacggttcatatgagggtgatgacagggaatgtactcctccacgtcgccttcatgatgatatattggattcagttttgagaacaccaaagcacaaggcttcaccagccatgagccttctgcaggggtactatggtctcacaccacctccaaagaaggatacgacacatgaaggcacagaaatggcagtatatagaaaaggaaaatctgttttcttggatgatgacccatggtttggagagccgccagattccgacccattcccttttcaacataggaaaactagaagtcttgcaataggttcttctcttctgaatggcgagactgaggagaatggcgacagcgaaaagttgataaggcgacgccagaaagctgatggtgagttgttacctagggaagaaaatggtagtagtgctgtcctagcaagggctgggaaaggcctggcgttgaggcctaagtcgggcagtcgacaagatttgaacaagagccagcagaatctcattgcattggcggagccttctttcggtgatgggttgcatgctgtaaggaaatcgtcgagcactccggagttccaagagccagagagcaacagcagcagcaccagttcctccatatggtcgacaagcaagtggaccttaaaaccagacgctttcactctccctcttcccctccctctttttgacaacattccaaagccaatcgctgcttggagaaacaaggcggctcgagattagtagcttatagtctcttggttttgcacaactcctgttctaaagcaaggccctgtaagcaccccccggaggagcttcggttgacaacagctcttctgagagttggaagcagagcagaggaccttgtggaccttggttacttcttcctgggtggctggagcacaactcaggaagatcaaacacagagatggttcagagattagcttctgttttatggttcccttgttatattggagatgttgcaacgagtagcagcatcagtttcttcagttaagttatagatgacacagagccttggatactgagggtattcttttgtacacaaatgcagataaatgtagggatcgaaaggcggctatatatgttgtatgtgtgagaacttcgctgatatagaaaagtatcgtcattatttaccttcc

SEQ ID NO: 20511 - DNA, 1487 bp, Oryza sativa
  ref <308>: DATABASE ACCESSION NUMBER: AK070827
  ref <309>: DATABASE ENTRY DATE: 2001-12-06
gacaaaaatcccaatctaccaccgcacccaacgaagcttaagacagtggaataaagcagagagagaaatcaaagcaagaaagagagagaagaagcgaggcaagagtcaagaccatctcccatggccagtggtgatagtagtagtagtagtagtatataaaaggggagcgcgccacggcttgccaatccgccgcgctggtgtgatgctgcgatcgacgcatccgccgcccagtagcccgagcagcagcagcagcggcggcggcgggggcggggggtcgtcggcgtcgtcgagctcggagaagacgatggtgggcggcgggggaggagggggaggagggagcgggtcggcggcgccgagcggggcgaagctgctgcagatcctgaacgtgcgggtggtggggagcggcgagcgggtggtggtgctgtcgcatggcttcgggacggaccagtcggcgtggagccgcgtgctgccgtacctcacccgcgaccaccgcgtcgtgctctacgacctcgtctgcgccggcagcgtcaacccggaccacttcgacttccgccgctacgacaacctcgacgcctacgtcgacgacctgctcgccatcctcgacgcgctccgcatcccgcgctgcgccttcgtcggccactccgtctccgccatgatcggcatcctcgcctccatccgacgacctgacctcttcgccaagcttgtcctcatcggcgcctctccccggttcttgaacgacagcgactaccacggcgggttcgagctggaggagatacagcaggtgttcgacgcgatgggggcgaactactcggcgtgggcgacggggtacgcgcctctggcggtgggcgccgacgtgccggcggcggtgcaggagttcagccgcaccctcttcaacatgcgcccggacatctccctccacgtctgccagaccgtcttcaagaccgacctccgcggcgtgctcggcatggtccgcgccccctgcgtcgtcgtccagaccacccgcgacgtctccgtcccggcctccgtcgccgcctacctcaaggcccacctcggcggccgcaccaccgtcgagttcctccagaccgagggtcacctcccccacctcagcgcccccagcctcctcgcccaggtgctccgccgcgctctcgcccggtactaatccaacgccccccgcacgccaccgcggcgcgccgcgcgtgcgcgtagccgcagcgacgagtcaaaacgaaggagaaaaaaaaaaaccaccgcagctgcggctacggtacgtgtggcccagtagggggacacgcatccctctactgttttttttttttttaccgcgtcggattttactgcatttttaccctcctcttctcaggcctagaaaatatttcggcgcgacctgccaagaccgagagtgtactgtagcattagtgctcgatttttacctaccttactctattggaaaaaaaattacattactggagtgcttcgtgcatacaatt

SEQ ID NO: 20512 - DNA, 2357 bp, Oryza sativa
  ref <308>: DATABASE ACCESSION NUMBER: AK070828
  ref <309>: DATABASE ENTRY DATE: 2001-12-06
ggctcgccgccgcgcggcaggggagggggggagggtatcctcaccgccggtgccctcaccgcggcgacccttcaaaatcccccaggacgccgggaggggatcggctccgactccgtccgagcacgcgccaccgccaccgccaccgccattgtgggccctcgatcccggggcggcgcgcgatgtggcgtcacgcggcgcggcggtcgtcggcgcagatccggcggagcggggtcatgtcgtcgtcgtcgtcgccggcggcccccgctgccgcggccggcgccgcggtgcccggcccctgcatcgtccacaagcgcggcaccgacatcctccacgacccatggttcaacaaggacacggcgttccccatgacggagcgggatcgccttggcctccgcggcctcctcccgccgcgggtcatgtcgttcgagcagcagtacgaccgcttcataaactcgttcaggtcgctggagcacaacacccggggagagcccgacaccatcgtcgcgctggccaagtggaggatcctcaacaggctgcacgaccggaacgagacgctgtactacagagttctaattgacaatatcaaggatttcgcgccgataatatacactccgactgttgggttggtctgcgagaattacagtggcttgttcaggcgcccccgtgggatgtatttcagcgccaaggataagggggagatgatgtcgatgatttacaactggccagccgagaaggttgacatgatagttgtgactgatgggagccgtattctaggtctaggtgatcttggagttcagggcataggtatacctatcggtaaacttgatgtttatgttgccgctgctggtatcaatccacaaaaggttcttccaattatgcttgacgttggaacaaataacacaaagcttctagaagacaagctatatttaggactgaggcaacctaggctggaaggagaagaatacttgtctgttgtagatgaattcatggaagctgttcatgcacgttggccgaaagcagttgtgcagtttgaagacttccaaatgaaatgggcctttgaaactcttcagaggtatcggaaccgattttgtatgttcaatgatgacgtgcaggggacagcaggagttgctctagctggcctacttggagctgtgagagcacaaggtcgacccctctctgattttactaagcagaagatagttgtggtgggagctggaagaatccagtgctgggataggtgtgcttaatatggctaaacaggcgatgctaaggatgccagggataaacaggagcggggaagggcataatcaattctgggttctggacaaagatggacttattaccaaatccagaaagggcctggatcctgcagttgctcgctatgccagaggttttggtcctgaagaggtgcaagatctccatgagggggctagtcttgttgaagtggtcaggaaagtgaagcctcatgtgcttttaggactttctggagttgggggcatatttaatgaggaggttctcaaggctatgaaagaatccgattcccctcgtcctgcaatttttgcaatgtccaacccaactactaaagccgaatgtactcctgaagatgtattcaaatatgttggagacaatgcagtatttgccagtggaagccctttcagtaatgtcactttaggcaatggtagacaagggtacgctaatcaagcaaacaatatgtatctgtttcctggtatcggtttaggagcccttctttcaggtgctcggcatattacagatggcatgctccaatcagcagctgagtgccttgcgtcatacatcacagacgatgaaattcgaaaaggcatcctctttccatcaatctcaagtatcgggcacatcaccgcacgtgtcggcgccgcagtcgtccgtgccgctgttgatgaagatctggccgaggggcgttgtgatgtagacgctagggacctcaagagcatgactgaggcggacacagtcgactttgtggctcggaagatgtggtaccctatttacagccccctcgtgaacgataagtgaagctcgatgaagtgaaaaatctgacgttgcatgaaccagatgtagcacctgaacaactatcagtcacatatttgttcagacttattttttttgttgctattttcatttagctgcgctactggagggtaattcagcagataccgatgcccacgtctatggctatgttatcacgccacgccatttttttgttctgttttgacagcttccgtcatcaaacgttgctcaatttcaagattagttgagctacataaatttacatctcgtgctttactacattctactaatatattttttttggatattgatct

SEQ ID NO: 20513 - DNA, 1397 bp, Oryza sativa
  ref <308>: DATABASE ACCESSION NUMBER: AK070829
  ref <309>: DATABASE ENTRY DATE: 2001-12-06
gttgtatatctcgaaaccgcaccagccgcccattgggttctgcaaagcggataggctctgcatcaatggatgatattaaatcaatcaataattgtgaagggtttggtcacagtggaaaagcaaatggtcggttgcagacacacgacccaagttcagtggtatgtttccatccatccaagttttccaagatagaagatgatgtacagaaaacatcatcacagaataaacatgcaaaaaagatggtgctagacaaaggagcacaggatgtcatggtgtctgattctacagcatcagattacgacagcatggatgcaggaagttcttggagtttatcagatggagatgatgttgaatccttttcggacgctgagattttcagatattgtttagatggtacacatgagcggtcaaagtttctcagagctgcagctccttctgttaacgaagatgacttgataaaacttgcaaatcaggtctctttgtatagtggatgcacccatcacagaaaccaaatattaatatcaaagcaactgctccaagagggtgctgacatttggagtataatctcaaagaacaatgaacgtgctctttggtcatctgcagttcctgaaatgaaagcaaaatttttggaaatagtccatccttccaacaggggtttgtcggagcaggattttgaggttttaagaggaattgctggttgtggtgatgacattggaagagacgagtttgataagctatggtcctggttatacccagttgccattgctttgtcaaaagacaaaataaacaggctatgggatttcacagcacatagatggatagagggattgattacattacaggaaactgagaatgcgctaagaagttccagggaccggcttatgaagccaggaacatttgtccttagatttcctactacccgaagctggccacatccagatgccggtagcctggttgttacctatgttggctccgataactcaattcatcatagacttttgcctcttgatgtcagtgatgctaagtctggcaacctagaagatttgttgctgaaggagcctgaattgtcccagctaggaagggttgatcgcctgccatcctctatgcagagctaagaaaagaaatggattgtggtctcatatatgagagccaacaccagcaactcgaaggtcactactaaccagaactctgaatacaacaaccagttgcatgttggtgaacctttttaggctgtagccatgtacagtttgtatgtaaatctagcgctttaggggaatagatgatagataatataggctagcagtgaacatgtagccatgtacattatagttgtattgggtctggtgcctttgctggggttttgcctctctcaccagtctcatccgaaattttagttc

SEQ ID NO: 20514 - DNA, 1394 bp, Oryza sativa
  ref <308>: DATABASE ACCESSION NUMBER: AK070830
  ref <309>: DATABASE ENTRY DATE: 2001-12-06
ggcaatgatggcactgacggagcggcagccgcagtcggagaagaaggcggcgagggcgaggccgatgtcggcgaaggccgtcgtcgtgctctgcgccacgagcttcttcgtcggcctgctgctcagcggccggatgacgcttctgatgccaccgccgtcgggcagcgtcggcgcggcctcctccggccatggctccaggctctccctcttctccgacgactgcgagcaccggcataaactggacgagggcaacccgaacgacatcatgaacgaggtgtcaagaactcaccaagcaatccagtcgttggacaagtcggtgtcgtcgctggagatggagctggcggtggagcgcgcgaagcagaacggcgggctgggcgcggcggtgccgtcgaagcgggggcggcggccgcccagggcgttcgtggtgatcggcatcaacacggcgttcagcagcaagaagcggcgcgactcgctccgggacacgtgggtgccgaggggcgagaggctgcggcggctggaggagaagggggtggtggtgcggttcgtgatcgggcacagcgccaccccgggcggcgccctagaccgcgccatcgacgtggaggacgccgagacgcgggacttcatgcggctcgaccacgtcgagggctaccacgagctctcctccaagacccgcacctacttcaccgccgccgtcgccacctgggacgccgacttctacgtcaaggtcgacgacgacgtccacgtcaacctagggatgctgacgagcaggctggcgaggtacaggacgaggccgagggtgtacgtgggctgcatgaagtccggcccggttctgtcacagaagggcgtgaagtaccacgagccggagtactggaagttcggggacgaggggaaccggtacttccggcatgccaccggccagatctacgccatctccaaggacctcgcctcctacatctccatcaaccagccgatactgcaccggttcgcgaacgaggacgtgtcgctgggggcgtggctgatagggctggaggtggagcacgtggacgaccggagcctgtgctgcgcgacgccgccggactgcgagtggaagaagcaggcggggaacgtgtgcgcggcgtccttcgactggtcctgcagcggcatctgcaagtccgtcgacaggatgagggccatccacagcgcctgcggcgagggcgacggcgccgtctcgaacaacttcgccgccgccgccgccgcatgatcgatcgatgtgtactgcaatacgtacgtacacacacgctagcagctagccacaaggaagagcagctatcttacggggttccccccctaatttatccttgttttgttttgtgggtctcataattagaaatggactaattattcacttggtttat

SEQ ID NO: 20515 - DNA, 3081 bp, Oryza sativa
  ref <308>: DATABASE ACCESSION NUMBER: AK070831
  ref <309>: DATABASE ENTRY DATE: 2001-12-06
acacacacacacaaacaaacacggagacgcgacgcgacgcgacgcctcgctctcttcctcctcctcttgtctgatccgacgccgtcgccggagcagctgcgggagggatggacgacgacgacagcgggatccaggaggagcctgcaccgcccccgccacccccgcctcccccgccgccgccgccgctgcggaggctcctgacggcgacgcggtcgggtggctcgaggtgggtggacggcagcgaggtcggctcgtccgagtccgcgccgtggtcgctcgacggtgaccgctccctccgcctctccgtcgactccgccgcctccgccggtggcgccagcggaggcggaggcggaggcgggccgctctcgcgtgcgtcctccggcgcgttccggcggcgcttcgggaagcagccgaggcgggtcgactccctcgacgtcgaggccatgtccgtccgcggcgcgcacggccacagcagcaaggagatatcaatgctgagcaccgtggcgatggcgttccagaccctcggagtcgtctacggcgacatgggcacgagccctctctatgtcttcagcgatgtgttcagcaaggtgcccataaagtccgaggtcgagattcttggagcgctttctctggtcatgtacaccatcgcgttgatccctttcgcaaagtatgtctttatagttctgaaagctaatgacaacggagaaggaggcactttcgcgctgtactcactgatctgcaggtatgcaaaagttagtctgcttccgaatcagcaacgtgtggatgaggatatttctagctttaggcttaagttgcctacccctgagcttgagcgagctctatctgtcaaagaatcccttgaaaagaatccagtcttcaaaaacattcttttgttcttggttctgatgggaacttctatggtaatcggggatggcattctcactccatcgatgtcagttatgtctgctgtcagtggtctgcaaggtcgagttcctggatttgggacagatgctgttgtaatcgtttcgatcctgtttcttgtactattgttcagcgtacagaggtttggaactgggaaagttggtttcatgtttgctcctattttggcactgtggtttattaatttgggaaccattggaatttacaacttggctaaatatgatatatctgttgtgagagcattcaatccagtgtatatctatttatttttccagacgaatggtataaaggcatggtcagctcttggtggttgtgtcttgtgcatcacaggagctgaagcaatgtttgcagatctggggcatttctctgtgaaatcaatacaggtagcattcacagctgtggtattcccttgttcgcttatcgcttacatgggccaagctgcatatttgatgaaatatccatttgctgtagaaagaatattttatgattctgtaccagaaattcttttctggccagtatttgtgattgctacacttgctgctatgattgccagccaagctatgatatcagcaactttctcttgcataaagcaggccatggctcttggttgctttcctagaattaaaataattcatacatccaagaaagtcatgggccagatttacattcctgttatgaattggtttctcatggtcatgtgcatcatcattgttgccactttcaggagtaccaacgacattgccaatgcttatggtattgctgaagttggagttatgatggttagcactgcactggttacgttggtgatgcttcttatatggcaaaccaatttgttcctcgttatgtgcttccctgttatttttggttctgtggagtttgtttacttaacagccgttctgtcaaagatacaagaaggaggatggttacctctggctttctcatcattgttcctctgcataatgtacacatggaactacggaagtgtgttgaagtaccagagcgagatgcgtgggaagatttccctggactttatccttgacctgggatccacgcttggcacagtaagagttccagggattggtcttgtgtacaatgagctggtccagggaattccgtcgatctttggccatcttttggtcacactcccagcaatgcactctacgattgtcttcgtttgcataaagtatgttcctgtcccatatgtcccatttgaagaaggttcttgttccgaaggattggccaaaaggactaccatatgttccgttgtgttgcacggtatggttacaaggatgtcaggaaagaggaacatggcttctttgagcagcttttggttgaaaccctggagaaatttttgaggaaggaatcccaggaaatggcacttgaagcaagcgcaatggcagtagagcgtgacgatgtttctgttgtatctgatatcccttcatctcctgttgaggctggggatctacatgttccactgctttctgatcagaggctgggtgatggcacccaaacattcatcaccgaaggcaatacacctgtgcttcccacgagttccatctcagaagaagaccccagcttggagtatgagctggagtcactgagagaagccatagcttctggattcacatacctcttggcacacggtgacgtgagggcgaggaaggaatcgttcttcacgaagaagttcatcatcaattacttctacgcgttcctcaggaggaattgcagggctggaaccgcaaccttgaaggtccctcactcgaacattatgcgtgtcgggatgacatacatggtgtgattggggctttgcaagattatgtgttagtgctgcaagattgttcctttttttttctttctttcttttttaccatgtattggatggaatcgtacaccagctgctagttttaggggctgtactgcagtgatgagcaaaatcactactgctgctggccaactgctcagcattttagtccgcagaattggccttatatgtgctcacttttcagtgaatttgtgccaagttgtttatgtggtattcatggagattgtatttgtagcaagagcaatgcaatctgagttgatctctgccaccctgataagttttataacttcagttctgaatataaattagtgatctttact

SEQ ID NO: 20516 - DNA, 1104 bp, Oryza sativa
  ref <308>: DATABASE ACCESSION NUMBER: AK070832
  ref <309>: DATABASE ENTRY DATE: 2001-12-06
gataggcaaaggccaaggcaaacgcaacgcctcctcctctgcttcttcctctgctgctactgctagtgctaatcccttcctagttcctgctgctcgtgctcaagctcaagctccggtctccaacctcgaggtcaatcgcagcaggagaggagaaaaggatggaggtggagatgatggaggacgacgtgttcttcgccgagctcagcaagcggatatcgctcctcatcacggacgacgacgaggcggccgacttcggcgccgcacgcttccccgcctccgccgccgcgcccatcccgggattctcgctcgcccatgtgccgatgggcgcgtcgatggtggcgccaccggcctacacgttgtaccaccacgccgccagctataacaacggcggcggcatgatcggcgccggcgacaacgccgccgtcagggcgtggcagcagcagcagcagcagctgtgcggcagcaagggcaccggcgtgttcatcccccggtcgtcgccgggatccgttcaccccaagaaaaagggcaagagcaagggcaacgtgcacaaggcggtacggggccaagcggcgccggcgaagaaacaatcctctcaaaaatgaagaaaaaaaagaaagagaaaaaaaacaggcacaactaactccaattgcagtgctgaattgtcagtggaattaattaaattaattatgtactatacataaatatgtatatatatatatacatatatatatatatatatacatatatatatacatatatatacatatatatatatacatatatatacatatatatatatatatatatatatatgcgctaaataaccagttgctcccacggccaacgtgtgatgggagcaacgggggcaccaccacgccaccagcaagttactgctagggttgctgtatgtgtataatatagtaagctggtgtccgtaaagtggtgccatggttttctttttctttctctctctccttggcttttaataattcaattaattatttattattttttgtatttcttttctttctatctcaacacttttgtaagatggaatatatagattggtgtagtagtactactgtactagtactaattataagc

SEQ ID NO: 20517 - DNA, 1200 bp, Oryza sativa
  ref <308>: DATABASE ACCESSION NUMBER: AK070833
  ref <309>: DATABASE ENTRY DATE: 2001-12-06
ggagccgaaaatcacgcctctcacatcgctcctctccccacgccgccacgcgctctccttcccgcaaaccgcggttcccagatcgctccgcttcccctcgcccaaccggcggcagtctggatgagctcctcgccgtgctcgactcgccgtcgctcgacgacctcgcggtgtacgcgtccaacatggcgaccaccgcgctagctgacaggtcggcatcgggtggaccgcgcgtcgcgttcacgtccggcgtgtggtgcgacgccgcgctcccgctgatcaagcacgcctaccgcgacgccgtcctcggcaggtacaaccgtacaatgccgaggccatcaccgtcgacttcgagaacaaggccgggaaagcaagaaagcagatcaacgagtggacgcggcaggtgacgaggggcctcatcaactctgtcctgccgccgggatccatcggcctgacgacggccatcgtgctcggcaacgccatctaccaagaagaagccgttctaccgcctcgacgtcgtccacgacgtgccgtacatgttgtcgagcaactccaaacagtacgtcgccgtgcaagacgggttcaaggtgctcaagctccactacagcgcgccgaatctccataacaagcccacgcaagcgcggccgcggtggcagcaacgacgacgacctcacgaagtacgccatggtcatcttcctccccgacgtgcgcgacgggctgcgtggcctcgtggagaagatggcgtcgcgtccgaatcggtgtgggtcggcgagttcatggtgcccaagttcaaggtgtccttcgccgacagcgtcgtcggaatccttgggcagctggggctccggctgccgttctcaccttagctcgccgacctgctcgtcatggtggaggacgacggctctggcttgccgttgtttgtgagccaaagtcatccacaaggcggtgatcgaggtgaatgcggaaggaagtaaagctgctgccgttaccatgacgatggggagaattgggtgttcagggatgaagcggccgctgcctccgccgctggtggacttcgtcgccgaccatccgtacttgatggtatcaagtgaagtctcaaatgattaatacatgattatgctttgaagggctttgggcttaagcaaaacatgttggatcactaattgtcactcttctcaaattgatcaaatagtactgcccatctcg

SEQ ID NO: 20518 - DNA, 3533 bp, Oryza sativa
  ref <308>: DATABASE ACCESSION NUMBER: AK070834
  ref <309>: DATABASE ENTRY DATE: 2001-12-06
gtcttcctcttcgtcttcctgccgccgccgaggagccgagcaaaatccaataatccatcatcggagacgagcaggagcacgcgcatcaatcatcgtagagtgactcatcggaggaggcgtgaattccacctatccttttcttttccccccttgtattctcttattattgaaatcccaaccccataatccgaccgtacccacccgccccccatcgccggcggcgcccagatcgccaccgatcgcctccaccaggggcgcggcgcctcttccgccctctctcagcggcggttgctccacgtctccggattccggaagaggagggagggagggagggagggagggagggaggaggcaactcggggcgttggaccgggctcccacggcgacgcccatggtcgacaaccagggctgctcgccggcgctcgagcccgtgcccacgccgcccaaccccgacccctcatccatctcgccggaggcctgggatcccctcgaggccgccgccggagccgtcgtcgcccggatccagcccaacccgccctccgaggaccgccgcgccgccgtcatagcctacgtccagcacctcctcaggtgcaccgttggctgccaggtctttccatttggatctgttccgttgaaaacttatcttcctgatggagatattgatttgactgcctttggccattcaagtgatgaaattttagcaaaacaagtacaggctgttttagaatcagaagaggcaaggaaagacgctgaatttgaagtcaaggatgtccaatatattcatgcagaggtcaagttggtgaaatgcattgttcaaaacatcattgtagacatctcattcaatcagtttggtggactgtgtaccctttgttttctcgagaagattgatcaaaaatttgaaaaataccaccttttcaagagaagtataatgctgataaaagcttggtgttattatgaaagccgcattcttggtgctcaccatggattaatttctacctatgcattggagatattggtgttatatattttccatctcttccatggaacattggatggtccactagctgttctctataggtttctggactactatagcaaatttgactgggacaataagggtataagcttgtatggccctatttccttgtcttccctgcctgagctagttactgactctccagacactgttaatgatgattttactatgcgagaggactttctcaaggaatgtgcgcagtggtttactgtacttcctagaaactctgagaaaaatactcaggtctttccccgaaaatttttcaacatagtggatccattgaagcagagtaacaatctagggcgcagtgtcagcaaaggtaacttcctccggatacgcagtgcatttgattttggtgcccggaagcttgggaagattattcaagtgcctgacaattttactatggatgaagtgaatcaattcttcaggaacacattgaagagacactgcagtagggtaaggccagatgtgcaagaaatagctctggacttcaatggtgaaagagccgacaacgatagttcgcctttatacagtaataattcctttggtgatctatctgatgagttcaataacatcagcatttcagattccagcaaccatgggtcactaaggcaaaatggatggaattatgtggctgagaacaaggaaaggaagtctgtttctggtggcttgctggcaagcaaagcaacaaatcctgcagctactaattcaactggtatgacgaatggcagtgactcttgtgagcccgcatcaccatcaattaccggagcacatagcttgccatctgaggaaggtcatgacgcactggatctctttaatgagtcagaaagtggtacgaaagctggcataaagtatggcacaaacccatcacaccatggaatgtcaacagtgagttatgcaggcagatcccaccagtcctttgaagaggtggataatgatgatagaggtaccatcgatagcaattggtcagatctcactggagactacacaacaaattttaataatcttctctatgctcaagggttccaccaagattatccaatgaaccaatattatccatttggtccagtgtactatccaataccctcccctccacctgcacgatatcagaataggcgatcatcaaatggtcatagcagaaataatgtgtatggatatgctggtacaaatggaataggccctgctccttgtccaccaggttatttaattatgaggccatatagtcaaattgatgattcaaatcgagctcgtggaactggcacatacttccctaacccaaacttgtccaaagacagatcaccttctggacgaggcggaaggggaaaaactcatttcctgccacataaccatcaaagaccacaccactacggtagagctgatatgtcagcagatttgactccttcggaggaattgagacatatttatgatcctgatgcaaatgacttgggaatcccctcttcactgcgcatatcaataccttctccatcttcggaagctccaagggaaattgtgcatggcaatggttttattcagcctccagctaagaaacttgagtttgggaccttgggagcattgcctttggaagttacatcccaagagcttggtattaacagattgaatactgcttccgacagccaaccttcagcgtctgcaagccctatgtctctggcaaataatcctggaattagttctaatcaaatgaggaatgctcagccatatcatctcaaggacaacggtgatttcccaccgctatctagttgatgccatatagttcattgcatatcagagacaacttggtccaagaaagatactgataaatggtgcgagcgcttggtgcaacaatagcaggggttgttccgcaagacaaacatcatccatcatgtacatcctatcattaacttcacattctcctatcttcaattcacccttgctgttgctttccaaaaaagaaaaaaaaaaagcccagaaggctgatgcatcgcagcttgctctgccataacattccctgcaaaggaaatatggaggaaagatagaagcacaatgtagctacttatgttatcttcacctttgcccccttgaagagggaacaagtgtggtgaagtcaagaaatgctagaaagaggtgagctgtgtcttgctctgttgttttgacctcatgagcattccagttactggagggctcattgagtgtgctctgttttggtttggagaggccttctgttgaaaggccccactgtttgaagtaacatttgctgcctcaagcaatgggtagttataggggatagatatgtacgaaactttcactagatttactgtcttcatagaagcagtttagttagtctatactagctcagagtaaaaatgatccttttactttgcctgttgtgcttcacatgtctttttttttttgtaactaatttgacttgtaacatagttttgctctgctgttgttagctcggctccaggttaagagaaaggggtatgattttgagtaacgc

SEQ ID NO: 20519 - DNA, 2391 bp, Oryza sativa
  ref <308>: DATABASE ACCESSION NUMBER: AK070835
  ref <309>: DATABASE ENTRY DATE: 2001-12-06
tcaggaaaactaaataaaaaaacaacagaaaaaaaagaaaacgacggcgtcttcactcctctccagtctgcgccaccacgtccgcgtccatccgccactgccgcacctccatccgcgcgccgcccctcctccctcccgggacggcctctaccctcgccgccgccgccgccccctccccaccccaccccggccgcccgggaggagccacctcccacccgtgacgagacggcttcaacccctcgcccgccgcttcttcccccgggaagggcggtgcccgcgtcgccggcggcgagcttctccgactccggcgactgattcgtcagaacgttccggttcctgattgattgattgattgatggattgattggccgggatatgctgataccattgagaggaattgttgactgattgattcctacctggtgatggcttccaaggctgttcctgatgtagtcaccgacaagaaatgcgataaaaccatggcggcatcctctgaaatgtcgcaatcccaagaagttatttcgagagggggtaaacttgggactgcttcatccagagagactctgctgggggatgtagccacgtccagtggggtgaaagaacaagataaggatagctgttctgttgatgaatctgtgaagctggatggcaatgaagatgctgagaaaagctcgttgcgcggcagcgttaaggatagctcggcttctgccaaaggcagcgacagggcaagcagcctgacaaaggtgagtggcagcacgaaggtgagcgaccatgctgctgacattgttgggagcagcaagagcagtgtttatcgagccagtgctggcagtgatgtgagtgatgagagcacctgcagcagtatatgcagcagcgcgagcaaacctcacaagtcgaatgattcaaggtgggaagcgatacagatggtccgaaccaaagaaggttcgctggggttaggccatttcaggctacttaagaggcttggttgtggtgacattggcagtgtttatttgtcggagcttagtggaacaaagtgctacttcgctatgaagattatggacaaggcgtctctagcgagccgcaaaaagctactgagagcccagactgaaagggagatattgcagtgcctggaccatccttttttgccaacattgtacactcattttgagactgataagttctcatgcctagtaatggagttttgccctggaggagacctgcacaccctaaggcaaaagcaaccggggaagttttttccggaacaagctgccaagttttatgtggctgaggtgcttcttgctctagaatacctgcatatgcttggcatcatatatcgggaccttaagccagaaaatgttcttgtgagagaagatggccacatcatgctgtctgattttgatttgtccctaagatgtgctgtgagccctacccttctgaaatcctcaaaccctggggtagatccaaaccaaaagggtaatccatcttattgtgtacagccagtgtgcatcgagccagcttgtatccaaccctcttgtgttacaacgaccacatgcttcgctccacgctttttctcctccaaatccaaaaaggagaagaaggcaaaaacagacattgcaagtcaggtcagaccacttcctgagcttgttgcagaacctacagatgcaagatcgatgtcatttgttggcacccatgagtacttggcacctgagactataaagggtgaggggcatggaagtgctgtcgactggtggacttttggcatattcttgtatgaacttctttttggcaagacacctttcaaaggttcagggaatagagcaacattgttcaatgttgtcggacagtccctaaggttcccagaatcacctgttgtgagttttgctgcaaaggaccttattcggggtttgcttattaaggaaccacaacatcgtttggcttataagcgtggagcgacagaaataaagcaacatcccttttttgaaggtgttaactgggccttgataaggtgtgcaactcctccagatattcccaagccagttgagatccctaggtcagtagcctcaaccagtcaaaaggctacaacaactgctgagaaaggttcagacaattatcttgaattcgatttcttttagtggagtcttataaaatcatttatgtgcaagttgtaaagttcttttctttttcctagaccttttctggattcttataacttgatattcagttggcctatgctcccatttctgttcttaagttccttttgcatttcgtggacctccatcaatcgcattagattagatgggagacctttctgtttagaacctgtaatcctcctttttttttttcactgagcattaggtttccttgaacaacaaataaataatttcttttcaatct

SEQ ID NO: 20520 - DNA, 1835 bp, Oryza sativa
  ref <308>: DATABASE ACCESSION NUMBER: AK070836
  ref <309>: DATABASE ENTRY DATE: 2001-12-06
gatagtattcgacgaatccccagcgacatgagcaaccattgcgtcggcggcggcgccgccggagtcgatgacttgacggacgacctcatcgccgagatcctcctccgcctccggccgtccgagccggcgtgcctcgtccgcgcctcggccgtctgcaagccctggcgccgtctcctcaccgaccaggccttcctccgccgctaccgcgatttccacggcgcgcctcccctgctggggttcctccacaacgtcgccggcggcggcgaagaccggtacgtccccttcaccgcctccccggtctccccgccggacatcgcgtgcccttgctgggtcgccctcgactgccgccacggccgcgccctcctcgacgagttccccttcagcgccgacttcaccgtgtggcaccccatggcgggacgacggcgccggctcccccggccggacctcccctacttcatgtcctacgccgccgcggtgctctgctccgccgtcggatgtaaccacctcgactgccgcggcggcggccccttcctcgtcgtcgtcgtgggcatcgacgagccggagcagcagaactcgcggccgtgggcgaccgtctactcgtcggattccgattcgtggagcccaacgacctccgattacctcaacctaaccctaacccccaattgcgacgtcgacaggaagcccgccgccctcgtcggagatgcgctccacttcgcccttgcggaaggttctggaatcatcaagtacaacatgggagagtgctcgctttctcggatccatccacctgttgtgtacaagggaggcattgtggtgatggcaatggggggcaatctgctcgggctcggcggcatcgagggttccatcctctcaatgtggtctagtgatgtgagcctggatggtggtgtcagatgggagaagaacagggttatcaagttagagagcttgctaccaagtatcgattgcgtagaggcagtagcatgtgagcttgcacaaccagcaccgattggctttgtggatggtgctgatatcgttttcgttagaacagatgctggcatcttcatgattgagctcaaatcaatgtgtgttaggaaggtttgcgagagaggatacttcaaagccgtcttcccctatacgagcttctgcactccaggcgtccatctccagcaaaacagagttcagttcagtaggaagcggttgctggaactaagagaaggcgatgtggcaacaggtatgcaatccaacggcaagagtcacaaggggcgacagccgtgacggccaaagaccacctacaaggatggtgctggcaatgggcagcgagctctgcagcattttgttgtctgcgtcagagtaaaaatggcagggaaatgtttggacatgggagagagccgattgcttcttcccatgtgagtgaaaaatttcatttcaaatatgcacggtttgcttgcatttcaactaaaatgtgaggtacttcctccgtttcacaatgtaagactttctagcattactcacattcatttagatgttaatgaatttagatgttaacaattagcccaaaagcctggtacaaggattgaaagctgaaactgaaaggtgtgtaactgtgtaacgataagcctagaagtaaacatgaaccatagctctgaaagtcatggcttggcacaaatggatggagggaagaaacacggttggtaaggctaaataactgcttccttagaataactgttggtaaggccaaccgtaaacaaaatactattgttttttttcctctctgtatctgagagaacttagaattctacatttgtagtatcataaaccatcttttcaatttttattcg

SEQ ID NO: 20521 - DNA, 3136 bp, Oryza sativa
  ref <308>: DATABASE ACCESSION NUMBER: AK070837
  ref <309>: DATABASE ENTRY DATE: 2001-12-06
ggtctccgatccgccgcgccggcaaatcccccacaagcccaactcacgccgatccacctccgatggcctccgccccgccggcggcgccgggccggcgccatcgctggtagacacgctattccagcgctccctcgacgacctcgtcaagtccctccgcgccgacccgtcggccgccggcgagtccgccgccgtcgcgcgcgcgctctccgagatccaccgggagatccgcgcccccgacaccgccaccaaggccgtggcgctccagaagctgacctacctctcgtcgctccacttcgcccccgtcgcctcccacccgctcgccttcccggccatcgagctcatcgcctcgccgcagctaccccacaggcgcctcgcctaccttgccgcctcgctctccctccacccggcctcgctctccctcctcccgctcgccacccatcagctccacaaggacctctccccctccacctccagcgccgccaaccaccacgtcacggccctcgcgctccagctgctcgcctcccccgccgccgccgccgcgcccgacctccccgtccacctcgcgcacgacctcgtgccccacctctcccgcgggagcccccgggcgatcgcggccgccgcgcgtgtcatagccgcctcgccgtccgcggccgtgccggtccttttcaagccactggccgcgtgcctcgcgtcgcctgacccgcgggcgtcggctgctgccgcagctgcattctgtgagctgtcggcgccgccagccgatgctgctcctttcctgccgctggcgcccgacctctacaatctgctcaccacgtcccgctccaactgggcgctcatcaaggtgctcaaggtgtttgcacggctggctcctctggaatcacgcctcgccgcacggattgtcgacccggtgtgccagcttctcgcgcgttctgctgctatgtccctgacgtttgagtgcatccggactgttctaactgccctgccggcacatgatgctgccgtgcgccttgccattgggaaggccaaggagttccttgctgctgaggatgatcccaacctgcggtaccttggcctccttgcgcttggtatgcttggaccggcatatgcatcgacgttgcatgaatgccgtggtgtgattgcccaatcactgggtgatgctgactcaaacatctgccgggaggcgttgcacctcatgatggggttgatcgatgacagcaatgtcacggacattgctggcatgctggtcagtcatgcttcgaagtcagacccagagtttgcaaatgacattcttggcgctgttctttcagcatgtgggcgcaatgtgtatgagctggtatcggactttgattggtatgtctcactcctcacagatatgggtaggaaccttcattgtgcacagggggatgagattggtcggcagcttgttgatgtgggactgagggtgcaggatgcacggccagagcttgttcattcatctcgaactcttctcattgatcctgctttgcttgggaaccacctcctttgtcctgttctttctgctgctgcatgagtctcaggtgagtatgtgaacttcacgaaggatcctgttgagcttgttgaggcacttctgcagccaaggatcagcctcctgccgatgtccgtgagagctgtctacatccaggcagtacttaaagtgatcactttctgttgcaatttgtatgttgagaggttgagtgattcaagcaaggaagtgtctgtagcattgaatgggttatctatggatcaaactgttagtgggggaagtgacgctccaattgggtctagcaatggacaaattacagtccctaggatgatggaaaaggaccctttttcacttaaatcggttgttcacatgattaacttgattgaaacaacagttggcccacttgttgagtgcaatgaggttgaggtcctggaaagggcaagaaacttgattggttttgtttattcgctaagagagattcaagaattgaaggaaagcaagtttgatgatgataagcatagcagggtgaaggagcttgttaagaatatgcaaacagtattatctcacgaaatagggcctgtttctttaaatgcacaagagaaagtatcccttccagatgatcttgtcctgaatgaaaatcttgccgagcttgttgacatcatcagtgaagatgacactactctgtcatcttcaattgttttctaccctcgtagctgtggttcagtcgaaaccagagatgaacctgcattatcacttggttcatcttctcttctttctgagcaccgtaaaaggcacggactgtactatcttccaacaggaaaagcggaggatgggccagttgattatcctcatgccaatgatcctctgctgcctgctagcagcgaaagtgctctggatgataaattgaagactatccagcctgttaccggtgggaaaaaaccgaaggccgtcaagtccagaccaaaagtagtgaagttggatggtgaggatttcctaagttctatggtggctagtgcaagtgttccaaaagaagattctttatctggtgctgtacgtggtgtactgttgggtagagatctcaagccatcatcttcacaaaaggcttcagataaggcttacgaaggaattataaacaaaatggactctggtgaatctagttctcagtggaaaaataatgtagatgctgatttcgtaggccatcccacttcaagttctagaccaagtattcaacagagccatgataaagagagtacaaaccctcttgaaagtgatgggaaggaagcgagaaaacacagaagatctaggagtgggcatcgtcaaggaaaacataagcatagagaaaggcattgcactcaacctgatgtacctcaagctcctataatccaggattttcttctatagttgctgaggactcccttgtttttgatacatttctattgccaagtacatgttaccttttgttcattcacattcagcggtttttagttttcactttcatttcatggaagttatttagttggtttatctgtggcagctggtctaactgccactgttgtatcctgtatatctttcttgagcatagcacttgatgttcttcatagctccatggcaatatatttgttcatagtgtacaaaacc

SEQ ID NO: 20522 - DNA, 1877 bp, Oryza sativa
  ref <308>: DATABASE ACCESSION NUMBER: AK070838
  ref <309>: DATABASE ENTRY DATE: 2001-12-06
gacgcgccgccggaagcgcgaaaccctagcaatggcggcggcggcggcggagggtggcggcggcggaggtggggcggtgtacgaccggagctacgtgccggactcggtgaagacgttcgtggcgcacatgtacaggcacgtcagggacaagaacgtgtacgagatccaccagatgtacgagggcgggttccagcggctctccgaccgcctcttccgcgacgcgccgtggccggcggcggaggccgtctcgccctactgcgacggcgaccacgtcttcctcctcctctaccgggagctctggtaccgccacgcctacgcgcgggcctcctcgtcgtcgtcgtcgtccgcgccgctcaccgccggccagcgcgccgagtcgtgggcgaactactgcgacctcttcagcgtcgtcctgcacggcgtcgtcaacatgcagctccccaaccagtggctctgggacatggtcgacgagttcgtctaccagttccagagcttctgccagtaccgcgccaagctcaagaacaagtccgacgacgagctccaccagctcaagcagttcgacaaggcgtggaatgtgtacggggttctcaattacctgcaagcgctggtggagaagtccatgatcgcgcagattctggagagggagaaggaagggctcgagcagttcactgccaccgacggctacgactaccagggtggcagcaatgtgctcaagatgctcggttattacagcatgattgggctgctcaggatacactgcctccttggggattaccgcactggcctcaagtgcttggcaccaatcgaccttaaccagcagggggtctacaccattgtgattgggagtcacatctctgctatctaccactatggctttgcaaatcttatgatgcgcagatatgctgaagccatacgtgaattcaacaaaatcttgctgtacattctgaaatataagcagtaccatcagaagtccccgcagtatgaccagatcttgaagaaaaatgaacagatgtatgccttcttggcagtttgcctttccttatgcccgcagcacaacctcattgatgagaatgttagcacccagctgaaagaaaagtataatgacaaaatgacaaagatgcagaggtttgatgaggaaacctatgctgcgtatgatgaactgttttcatacgcatgccccaagtttattactccatcacctccagccctggatcagccacttacaaattataaccaggatgcataccgccttcaattgaagttgttcctttatgaagtgaagcaacaacagttgctttcagggatcagaagctatctaaaattgtattcaacaataactattgccaaacttgcgcaatatatggaagtggatgaggcaacgcttaggtctatcctgatgacgtacaagcacaaaatgcatgcagttgacaataatggaaagattgtttccagcgcagactttgatttctacattaaggaggatgttattcatgtcatggagtccaaaccaatcaagcgccatggtgattactttttgagacagattttaaagtttgaggaaatgattggtgaactggagaaagtacagtttgactgagcctggtaggaatcatggaggagcggggtacatccccacttagtttagctgttgcaagaggcactcatgatagttattgtgtacttattaatatatgtgccttttgtactcctttttgacttcagagatgaaccggtaaattctttttgaaaattgtaggaacttcagagtctgaagtttgaattctcactactgtgccatcatggcgttttctgtgatgattctatacagtagttgagctattatctcttctagctgttcgatatagtccttgtgatcc

SEQ ID NO: 20523 - DNA, 1936 bp, Oryza sativa
  ref <308>: DATABASE ACCESSION NUMBER: AK070839
  ref <309>: DATABASE ENTRY DATE: 2001-12-06
gagccgccggcggactcagccgataaactgtgtgtgcctcgaatttaacgacgacggcgagcggcgagatggcggcggcggcggcgggaggcggcgacgggagatggtgcgtggtgacgggcggccgcggcttcgcggcgaggcacctggtggcgatgctgctacgctccggcgagtggctggtgcgcgtggccgacctgccccccgccatcgcgctcgaccgcgacgaggaggaggggatcctaggcgccgccctgcgggagggccgggctgcctacgcctccgcggacctccgcaacaaggcccaggtggccgcagcttttgagggggctgatgttgttttccacatggctgcaccagattcgtctatcaacaactttcaccttcattattcagttaatgttgagggaacaaagaatgtcattgacgcttgcatccgttgcaaggtgaagagacttatctacaccagttcaccaagtgtagttttcgatggaattcatggaatctttgatgcagatgaatcaatgccttacccagacaagtttaatgattcatattcagaaacaaaggcagatgcagaaaagttggtcatgaaggctaatggtagggatgggcttcttacttgttgtatacgcccaagtagcatttttggccctggtgataagctactggttccttctctggttactgctgcaagggcaggaaagtctaagtacattattggtgatgggagcaactactatgatttcacctatgtggagaatgtggcatatggccatgtttgtgcagagaaaactctatcatctgaagatggtgcaaagagagctgctggaaaaacctatttcataacaaatatggaggctataaaattctgggagttcatgtcgttgattttggaaggactcggatatgaaaggccttcaataaaaataccagtttctgttatgatgccagtggctcatatggtagaatggacttataagacgttcgctcgctatggaatgaaaattcctcagcttactccttcaaggatccggctcctgtcttgcaatagaacattcagctgctcaagagcaaaagatcagcttggttatgaacccattgtgtcactcaaggatggacttaagagaacaatagagtcatatccccatctgcaagcacaaaatcaaaggagcatatcaaaagcctcaattttccttggcaatggaaatcttgcgaagacagttctctgggaagacatgaagcaaacaatgactgtactactgctactggctgttatctactatcatttatttacatgtggttacaccttcattacagcaatggcaaagcttttctcactaaccgcactgtttttattcattcatgggattctgcctgcaaatgtgtttggacacaaggttgagaagctcgagccttcaaattttcacatcacacaggtggaggcgcatcatattgctcattcagtcagctcaacatggaactctttagttggtgtgctaaaatctttatgcagaggaaatgattggccactatttttcaaggtggtattctccctattggttgtgagcatccttagttccatgtcttcgcaatctgcatttaaaataggtatttctatggctttcctaggcttcaaagcctatgagaaatgggaggacaccatcgatgatttggtgggtaatgcatgctcggttgttacgcactttgttcagggccagaaatcctcaaggcagaagcatgcagataattgaatggcatcatttagtgaggttaacttcaatttcagccattgctagtttttcttccgagaacttcagccaatgttcctataatgttgtaaattagtttagaggttcagatttggacatttccttacagtggttgatgcgcttgtagggaattgaactattttttcaaagagatatttttgccc

SEQ ID NO: 20524 - DNA, 3088 bp, Oryza sativa
  ref <308>: DATABASE ACCESSION NUMBER: AK070840
  ref <309>: DATABASE ENTRY DATE: 2001-12-06
gaccgtccgatccgaataagccctaaggctagtaggcgagcggaagcggcgtccgccttcaatgctccttcgtatcgccagcacaaaacacgccccgcttcgccgcgcccaaaatcccaccgccgccgcctcctcacccgctgcgcgctcgccgccgtggccgccgcctccgtctccgcctcgcctccgatccctcccgggggtgaagagaaggagatggcggatgaaacacttgatttgaatgagccgccacatgaaaatcaaggtggtggcttgaactatgtattattacaaaaagattctaagaacatatgccgcaccaaagtctgtgatattccagttaaagtgccctcggtttggtcaattgttaggtttgtgccaactaaggtgtaccagcagtgtgatttcctgaaattttcactgcttcctgaacctgaagatgatcgtcagaatattgaatggggaaagttcatgcgtttcctctgggacaatcagagggttgctgtagttagattcagctcctttgccttacatattttccctcctcaatctcatgaatctcatgaacgccctaacttctcacatgcggtggtcatgtatgagcaaaaagatcctggagactgcaaaccgatggctggagtatctgatgctttaaaaaggtcatacagaagtgatttccaatctggctcgatgaatccaaagtcatatttgagagaggagatttgtgatagtggcccaaatcctaaggagatgaatgcctcgcgtgtcacagagctgcacaaatcagttccagaatcatcaccatgtgagtctgttgaagatggccctagaattttagatccaatagtgaaaaagagaaccaccactcttgcaaaaaattttgtcagcacggatcctagttatctgcgaacactcagtcagacacatgctggctgggtctttggagcaatagcagagctcattgacaactctagagatgcagatgcatcaaggttgaatatttcagtcaaatcattgttttcgaagaaagcagacaaaaaatccctgtcttgtctgtaattgatgatgggcatggaatgacttgtgctgaaatgatgagaatgatctcattcggtcacaaaagaccggataagcaacgccaggatcaaattgggaggtttggaattggatttaagactggtgctatgaaacttggcagagatgcaattgtgctaacccaaacttcatcttccagatcagtggccttcctatctcagtcttttaatgaaaataaagataatcttgagatacctgtggtgacatatcgtaaagaagggcaatacatggaagttgattcaagtgtccaatctgaagctactgctgaatataacctgaatgctattaaggaattttctcccttcaatgagtatttcattggagaaaagctagggatatttggtgaagacggtactggaacacagatttatatatggaatttagatagatggggtgcagattacaccttggactggagttcagggaagccatctgaagatcctgtccaccatggtcgtggagacatactaatccgttcaagaagagtcagattgcgcccaggacaaacaagtaacaatgtaccattggactattctcttcagtcctatttggaagttatgttcctgaatcctcggatgaagatctctgtccaagggtcttcggtcaaaactcgccctttagcaaagacccttaacaagacatctgttatatctggtgaaataatgggtaggactattcaattgacccttggaaggagcaatgtagaatgggacagaatgaactgtggaattttcttgtattggcatggccgtctaatagagtcttacaaacgagttggaggtcaaaagcataatgctgacatgggacgtggagtaattggagttgcagatatcacagaccttattgatgatgaagatggtaattcatgggttcttaacagtaaacaagggttccaagattgtgaaatgtatgctaaactggaggagtggcttggtaggaaagcggatgaatactgggatacaaattttgacactctcgaattgagaaaagggagtgagcgctataaggctgatcatgagtgggttcagtgctacagctgtcgtaaatggagaatattgaatgcaggcttcgatacaaagtctctgccagatgaatggttttgctacatgccaccattcaatgggaaatgtgaggttgcagagcaacaaatggcacgtggtgtcattgtgataggtgagaaacgatctgaacatgataagcgtgataggattacccagcaggaagaggtggctaaggtaaatgcaagagaaactaggtccgatgacagccagtctcaaaaatttactcaagatgaagatgtgaaggacgtcaaactaatctcaacggttgtcaacaagaaaaggaaatcatccaatgggacccggtcgatggacaaaaacaacagcgaagataagcatgatgatgctgaaggcgactcctcacaaactcagcctggtacccctcgccctgttttgaagaggatacgtaggggccctgctagaagttgtaagcagtcatgaagaacgaaaattgccagctagcaatagattcctttgtttagatgccgatgcgtgatgcttctcttgccaaagcagctcttcccgtggtgtagttggttcccgatttgtctctgcttgcttaagcaaaactcaactcatcaatcgtagcggcttgtttatatatgaaaaaaaaactgcgacctcgtctgtaagtagtgtgcatcctcgctcatggaagttctatatataggctttagcttttaggtgctgaaatgtgtacagtagcctgtcagcaagctaggcgcgacagtttcgatagcatgattgttgtgtgatgatcatcaccagtatgactagaaaacttcttcactgcactagcgtgtgctttactgctactctcttcgtagtttttcgtcactgtgcctgtggtgagtgtgaaacccagtgccatttgcatgttcacccaatgattcattcactccaggcctcgcgaattgattcaagaatactatgcc

SEQ ID NO: 20525 - DNA, 611 bp, Oryza sativa
  ref <308>: DATABASE ACCESSION NUMBER: AK070841
  ref <309>: DATABASE ENTRY DATE: 2001-12-06
caagatcgtgcgcctgctccgcgacgccggcgcgcgcgaggtgcacatgcggatcgccagcccgccggtcatcggctcctgcctctacggcatcgacacgcccagcgagggcgagctgatatcaaacaggatggacctcgagggagtccgcagggcgatcggctgcgactccctcgcgttcctctcgctcgacaagctccacaccatctatggcgacgaggcgcatgagctctgcgacgcctgcttctcgcggaattacccggtgctccccaccgtgccggagccggtgccggagttggtgtccgccttcgaagactgacatgaactcgcaactaggggaagtggctctactatactctgcaatctgcatatgcttatatagaaattttagactcaattttggggcttggtggcaatatttgtccttgcaattgcattcatcaatctgaattttgggagtaaggtttagctattggatattgatcgagctgatacggttaagtttgatctgtctattcatctattgtattgccaatgccatcatggtgatgatgatgaacgagataattgcttcaatgacacatggtgaaaaagttgcctttttggtatgt

SEQ ID NO: 20526 - DNA, 1229 bp, Oryza sativa
  ref <308>: DATABASE ACCESSION NUMBER: AK070842
  ref <309>: DATABASE ENTRY DATE: 2001-12-06
gagtgagtactagtcacaccacacgcttggcttgacgccgcacgcctccgctccgctccgccgccgcggccgatctctctagggcttccaacctcgccggcgacgcgacgccacgccatggccgccccggtcgtggacgccgagtacctccgccaggtcgacagggcgcgccgccacctccgcgccctcatctcctccaagggatgcgcgcccatcatgctccgcctcgcatggcatgacgcgggcacttatgacgtgaacacaaaaactggtggtgcaaatggttcaattagatacgaggaagagtacactcacggttcaaatgctggtctaaagattgctattgatcttctcgagcccattaaagccaagagccctaagatcacatatgctgacctttatcagcttgctggagttgttgcagttgaagttactgggggtccaactgttgagttcattcctggaagacgtgattcgtcagtttgcccccgtgaagggcgtcttcctgatgctaagaaaggtgcactgcacttgagggacatcttttaccggatgggcttatcagacaaagatatagtagctttatctgggggtcacactctgggaagggcacatcctgaaaggtctggatttgaaggcgcatggactcaggagcctctgaagtttgacaattcgtactttcttgagctactgaagggggaatctgaggggcttctgaagctcccaactgacaaggcattgttggaagatccttcatttagacgctatgtggatctttatgccagggatgaagacaccttcttcaaggactacgctgaatcgcacaagaagctttctgaacttggcttcactccacggagcagcggccctgcatctacgaaatctgatctttcaactggtgctgtactcgcacagagtgctgtcggggtagctgttgctgcagctgtagttatcgtgagctacctatacgaggcttctaagaagagcaagtaagattgctatgttcttcatcagcatggcctcatagtaagtatcagggtcaaataacagaattctagtgatgatccagccatacgaacacttccttcatgtctacatataccctatcaatatttcatggggaattatatggagatgacatagcttcactatttaaaagcactttggacatatattattccgtcttctgtgtgctctctaatatctacaagaacagtggtttgtgtcct

SEQ ID NO: 20527 - DNA, 1677 bp, Oryza sativa
  ref <308>: DATABASE ACCESSION NUMBER: AK070843
  ref <309>: DATABASE ENTRY DATE: 2001-12-06
gggactttgccctttcccttcttccgacggacgagcggcgagctaggctttggctctgcctctggttctggccattcccttcctcccgccgcacgcatcctctgatcctccctccctccctccctcctcgatccacgcgcggtccgagcttggtacatcaccttcttgaggttaagatgttggggcgcgcaatacgcagtatggaggttatggtgcattcttcaaccttccttcttccaaagttgcatcagcctgccaactctccagcaaagaagtatgctctagttgttcttaatcagaaccttccacgattcgtgccccgcctgtggactcatgcaaagctaagaatctgtgctgatggaggtgccaatcgtatattcgatgagatgtttcagatgactaatgatccagactatgaaagcacccgaaaaaggtatattccagaaataattgagggagatatggattctataaggccagaagtgaaacagttctactctagccagggatctaaaatttctgataaatcacataaccaagagacaacagatttgcacaagtgtatttctcggatccatcgttgtacacctgatcatgaaaaaacaaatctttgtgttcttgtgactggagcacttggtggaaggtttgatcatgaggctgctaatatcaacattctgtatttgttctcggacatgaggattgttcttctatcagatgactgcttgattcggcttcttcccaaaacacacaagcatgagatctatattgagtcatctgttgaagggccacattgtggactttttcctgttggagcaccatctggaagcactacaaccactggcctgaagtggaacttgagtgaagcgaagatgagatttgggagtatgataagcacatccaacattgttcacgcagaaaaggttactgtacaatccgatgcagatcttctctggacaatttccctccgaaatctgacctgaagagccacctccactttgcacccttcgccagttttccccttctctggcatatcttggtgttgtgtgtaatcagcctagatcctgtacagctgtttatgagttcaaaggcagttctgcttctgcatcggccaaataattttccctgcttcatgataaagcaattcatgatgctcatgaggttagaaacttttaaggaggagctgccagtggattgcatgaacaccacaggcagatgtatgatgtaattcctttattggtttgtttctgtgggatcggatgagcatatgatccctgcaatacctctcttccgattggcactgcgtactctgcacatataacttgctgaagagaaggattcttgcatttatgcccgcctaagacgggggaaaagaaatatgtttgccttctcttctagccggattttttatttcttgttttcagacattagtatgttttgcattgtctcgtctatccatattacagattacatcaagtgtgtaaaaaagacggatcagagatgaactgatttttgtcaggtctggacagcatgcagaatagtccactccgttcattccagctaccggtggcggagccagaaatttttttagcctgggcaagcctaacaagagataaaaactatatatagaaaattgtacagtttatcatagacaaaagtaaagttgattgttgccaagtt

SEQ ID NO: 20528 - DNA, 1408 bp, Oryza sativa
  ref <308>: DATABASE ACCESSION NUMBER: AK070844
  ref <309>: DATABASE ENTRY DATE: 2001-12-06
gatgggctctcgcacactgaagataatacactcccacaaacactacgcacgccttgctattcctgtatcgagatggtgaaagcaagtatgaagccttattttgtcgccatcatcgttcaactgatctacactggcatgtttgtgatatccaaggctgctttcaaccacggaatgaacacctacatcttcatcttctatcgccaagcagttggctccctcatcttgctgcctgcagctcttctacaaaggaaaagtgcacgacaggtcatgacacttggggtgctcataaagctcttcttttgtgccttaatcgggattacgcttggggtaaatctgtaccatgtaagcctcaagttcacctctgcaacggtggcatctgcagtagacagctcactcccagccatcaccttcttcttggcagtgcttttgaggacggagtatgtgaagctgaggagctcttcaggcatagccaaggtcactagcgtagcactctgcctggctggagtcttcaccatcgccttcttcaccggcccatccataagccctatcaaccatcaccgtgccttcgcctctgacgcaggctctaaaaatgtagttccgaggggtgtgtggatcaaatggacattccttatggtgatcgccaacatgtgctggtctttgtggatcatttttcaggcagcggtgcaaaaggaatatccagataaaatgattgtgactttgactcaatgcttgttcagcacggtgcagtcgtttgtcgtcgccgtggtcgcagagcgcgacttctccaaatggaagctaagattcgacatcagcttgcttgccatcctatactcgggtgttatggtgacgggagtgtcctactacctgcaaacgtggtgcctagagatgagaggccccatgttcttcgcctcctggacgccactctgtttcgtgttcacaatattttgctcatccttctttcttggagagattgttcacctcggcagcatcttgggtggaattttgctggtcggaagtctttacaccatgctgtggggtaagagcaaagagggcaatgagactgacgatgtcaccgatgacgatattgagaaatctacacatatctaccccagagagcaacaacatactacaacagatcaggacaaagaatcgacgttgacagggtcggcagctttgcacgtccaagaactataattttttttggcatggcagcccttttatttagtcaccttaaattaggtgacatcggcctatttgaatttggctcatgtgttactgtgttatgagatcgtggaattaattccaccttagttgttatgggcgggttagagtaatctattgtaacaccctaaaaatttcgagtttgaaatacggaaacaaaattcggaataaccaaaaatctttttct

SEQ ID NO: 20529 - DNA, 905 bp, Oryza sativa
  ref <308>: DATABASE ACCESSION NUMBER: AK070845
  ref <309>: DATABASE ENTRY DATE: 2001-12-06
gtctttcttcttcttcttctgctctttcttcttcctttggcactggaggcggccaggctgtcctcggcactgcaggcgctgcggccggttgcacggctgcaggcgagctcgcggtgggacggccagctccgagcagtgcagtgtgccgactagagtcgccgaggtgagctgtgagtgaaacacaagtagcaatgggggacggaaatgaggtcattgacatttcatcagatagtgacgatgaacaagtacaaattgagataaacaagatttatcaaagcgtgcgccgttcaactattacaacaggacaatatggacctcgtactttctctggattcgacaagtactgctggtatggaaatgatgtcacattaacaaaaagtatgcatcttcaaattgctcacgttgccgcagtaaatttgccgctgtcaagagaacccttatgaccaatgcgaaaatgacctttgcagtccagtttagcgagcggtacataaacaagtacattgggagtccaattgatgatctgatggtgtctatggctggaacaacacagtcatatcaaatgaggctgaagaggtccaaggacagtagggcaatgctgaccactggatggaaccaactgattgatgcaaaagcattcgatgagggtgatgtttgtcttttccatttcaaggaggttgacgacgttcttgttctgaaggttcatgttctcaagtagtgtggtggatgaaaatcaccattttgtctggcaatatgtaatgccatccaaattcgtatgatgtaaagctagttaagaccttattatgtggttgacctttccagtacaatcttattatgtgctagttaagacttgattatgtgggtcaactatctgttaatggatgcttgtcaagatggaggaactatct

SEQ ID NO: 20530 - DNA, 2398 bp, Oryza sativa
  ref <308>: DATABASE ACCESSION NUMBER: AK070846
  ref <309>: DATABASE ENTRY DATE: 2001-12-06
tggctaccgatcttgttctctcgccccctcccggcgcgtgattcccggacgcgactcgactcgacatcccaattcccaatacaccaccacgacccccctccgtcctcatctgtcccgcggcctcgaccacgccgggaggagccgcagccagaccgggagacgctcgtacgcctgcctcgaccgatccagcgccgccacggcgaccgtggccaaggagatccgccccctcgtcggtccgccgccaacgatctccgatcgagacaaaccctagccacgcccattgccttctcccgtcgccatgtccgccgcgcatctcctccgccactctcgcaagttgcggagtttacacaatgctctagactgtgagcgttctggcctcgtgcgctacttctccactgcttctggttcgttccccaccaagggaaatggtgctgagaaaagaattggaggtgccagatttcctcagcgcaagcaacctggaaaagagcttgagacctccaagttgtcactaggacttaatggaagctacacttgcaggagatcacctaacaactttatcccaaatactattactggtctcaatggttcattgtcatgtggacagatagcttcagcaagatctttctcaagcagtgcagacctgccaccacatcaggaaatagggatgccatcactctctcctacaatgaccgaggggaacattgcaaggtggctgaagaaggaaggagataaggtctcacctggtgaagttctttgtgaggtggagactgataaagccaccgtagaaatggagtgcatggaagagggctatcttgctaagatcattcatggagatggttccaaagagatcaaagttggtgagattattgctgtaaccgtggaagaagagggtgacatcaagaagtttaaggattataaaccttcaactttggctgcacctgtagccccttctgaactgaaggctcagtctgagcctacagaaccaaaggtggaggaaagagagccttccaaagcatctgagctaaaggccccaaggactgaagaaccttcgcggtcaggagatcgaatattctccagccctcttgctagaaaattggcggaagataacaatgttccactgtcgagtgtaaagggaactggtcctgatgggcgcattttgaaggcagacattgaagattacttggctaagggttgcagaaaggaagctcttgcggctccagggctaagttacaccgatgttcccaatgcacaaataagaaaggttactgcgaaccgcctgctaagctctaagcaaacaattccacattattacctgacagttgacacacgtgttgataatctcatcaagttgcgaggggaactgaatccattgcaggagtcctccggtggtaagaagatatctattaatgatctagttataaaggctgcagctctggctcttcgaaaggtccctcagtgtaatagctcctggatgaatgattttatccgccaataccacaacgtgaacatcaatgttgctgtacagactgagcatggactgtttgttccagtaatcagggatgcagacaagaaaggacttggtatgattgcggaggaggtgaagcagttggctcaaagagcaagggataacagtttgaaaccagatgattatgagggaggcacattcaccatatcaaacttgggaggtccttttggaattaagcaattttgtgccatcataaatcctcctcagtcggcaatcttggccattggttctgctgagaggagggtgatacctggcagcgccaatggtcaatacgagtttggttccttcatgtcggcaacaatgagctgtgatcacagggttattgatggtgcaatcggggcagaatttctgaaagcattcaagggctatatcgagaatccaacctcaatgttactgtgaagctaaagatcatcaaaactattcttcccttgttctcgaatgatgcacagaacggtgctgtctcattttgtatatttccatcatgatttcgaggaggacctgaaaaccaagagcacagagccaagggcaggatgacctggtttttggattaatttttctttttcctgtttgtttcgttccagttacactgggaattaggatcaatttacaagccttctttagcccgtttttatgggtttactccgcaagttcgttgacagcagagtaaattcccgggaaaccatgcaggatagcctttatacgatttgccccctttttactttttttttcatctttgtgcaaaaccaagaggcgcagaggtaataagttgcaaatcttggggagtttggtttataccctttctccgcaaaattctaacgagaaattcacaattgttcagagtaaatgatgcattgcttaatccattttgatgct

SEQ ID NO: 20531 - DNA, 1896 bp, Oryza sativa
  ref <308>: DATABASE ACCESSION NUMBER: AK070847
  ref <309>: DATABASE ENTRY DATE: 2001-12-06
gagcagccagcagcagcggcgtggctgcgcgggccgcctcgctccctctccctctccgcttggccgcttcccttgcccccgccattaactcctcactcgctcgcctcacctcacgcgccgcacgccacatctctcgccagcgagcgcacctcgtcctcgtcgctatatagccaacgcctccgcctccgcctccgcctcgcgcttggtgtcccccaaaaccctaggtggagctctcctcccccctcaccccatgcggcgccgccgggtcgggacggcgggagggttggttcgatcctgactgggctcggcgccgcgggcgagtcgcttgttggagggggatggggaattgctgtgggtggggcgcgcggatcaaggatgggagcccgcaaccgggagcctctgggatgttctcaaggagtggtgctaaagatgggagtaggcttagtggctgcagtagtcgagcctcttcagcttccatgcctccaactgcgaaaactgaatgtgagatactgcagtcagccaatgtgaagatcttcagttttagtgatctcaggatagccacaaggaacttccgtcctgacagtgtacttggtgaaggagggtttggatctgtctataaaggatggattgatgagaatacattatctgcttgcaagcctggcactggaattgctgttgctgtgaaaagactcaaccaggagagtttgcaagggcaccgagaatggttggcagaagttaattacctaggtcagttttgccatcccaaccttgtgaagctatttgggtattgcttagaggatgagcatcgactgctagtgtatgagttcatgccacgtgggagcttggaaaatcatctgtttaggagaggttcgcatttccagcctctttcatggaacctaagaatgaaggttgcacttggagctgcaaaaggactagcttaccttcacagttcagaggcaaaagttatttatcgagatttcaagacttccaatattctgcttgacacagactattctgcaaagctatctgattttggattggcaaaggatggtcctgttggtgagaagagccatgtatccacgagggtgatgggaacatatggttatgctgctccagaatatctttcaacaggccatttaactgcgaagagtgatgtttatagctttggggtggtgctgctggagatgatgtcaggtcgtcgtgccattgacaagaaccggccccagggtgaacacaatcttgtggaatgggcccgaccatacctcacacataagcgcaagatattccgtgtcctggataccaggctagaaggtcaatactctcacgttggagcacaaacagttgccacccttgctcttgagtgcctgtcgtacgaagctaagatgaggccttctatggaagctgtggtcactattcttgaagagcttcaagaatccagccatgtggacaggaaaccagcagcagagaggcgtcaagaatccaccacaggtacaggcaaaaaagcccctactgcaaatgctagcaagaacagcggtaagcctcgtcggaaaagcttgggagaaactcgggaaaagattggtccgaatccaacagcattggtccgctcccattagcaaggcagaatgtgagtgtcattagttggtatttggtagtttgtaaatatgttgtgcatattccttgttgtcatcagtcttttggcaacaagtcctttttgtgcattatcatgagcttcttaacttcagctaactagatgctgttgtatgtcgaaactcatggcattaaagtagagctcatgttacaaatctggcgtggctgtctcaatgggttcaagctttcctggtagctcatcgatcagcatgcatcataggtacattgtcatcaacacatcattggatc

SEQ ID NO: 20532 - DNA, 2559 bp, Oryza sativa
  ref <308>: DATABASE ACCESSION NUMBER: AK070848
  ref <309>: DATABASE ENTRY DATE: 2001-12-06
gatcttcatcctcagctcagctcagctcagctcaagctcaaaagccttttttgtttgttcgctgctgccactgtccccatcctcctctcctcgctgccgtttgcttcactcccactgctcctcctccacgcgcgcgcgcgcgggggctagatctcgccggaaccctagccggtaatgccacgggcggctgccgcggcgggacagtgaggtgttgagggggtttccggatcgatgcatcgggtggccatggctgcggcggcggcgggggacggcggagacgggagggggcggacgctgggggcggtcatcaaggagaaggacgaggagctggccctcttcctcgagatgcgccgccgcgagaaggagcgcggcgctgctgccgctgccgcggcggccgagcagctgctgctttccggggaccgcgtcgacgtggcgcgggatgggatgcttctcgtcgaccaaccgccgccgcgcccgcagcctcccgccgagcacaaggcggcggcgtacaggatgaccggcgggttcaggagagcgcccggcggcgccgacgacttcctcaattcggacggcggcgacaagaacgattacgactggcttctgactccaccaggaactccactttttccatctctagaagagtcaaaaaagtccccagtgagccaaactggaaccccaaagactcgcccaactgccttaaaatcaaggttggccaatcatccagatcctccatcaagaacaacccttccattgagagcaacatcatcaaacaacttgaactcagctgccacaacacgtaggccgtcatcttctggagggcacacatctaattcatcaaggccttcaacaccaactgggcggcctgcactgaccaatacctccaaaggttcaagaccttcaacccccacatctcgggcaactgtaccttctaagtctggacctcctgccccaagatcatcaactcccacttccaggtcaacacttacttcagcaaggtcaacaacaccttcaagaacatctggccctgctaccaggacatcaattccttcaggtagagcatcagcaccagctagcaggtcatccacacctacttcaagatcatcgatacctgctaccaggtcatccacgccatcatccaggccctccataccagcacaaagcaagccagtatcaaggtcatcaaccccaacaagacggccttctgccacttccacccaacatggtagcttggctgcaccagttcgatctacctcaatctccaaaccagcccctacaatgtccaaaagttcttcaccggcaaaaactatagcgtcaacaccttcaaggggcagctcacctactgtcaaatcgagaccatggaagccatctgaaatgcctggcttctcacttgacgctcctccaaatctgaggacatcactaccagaaagaccaacctctgctactcgtggcagacctggagctcctagttctaggtcttcctctgtggagcctgggccagctgctcggccaagacggcagtcttgctctccttctagagggaggactttaaatggtagtgtgccttcaggtagttcggtgccagcagtgagaagatcacatcttaatagtggtgacagtgtcaatcctgttcaaatgggtaataagatggttgagagggtagtgaacatgagaaggctagttcctccaaaacatgatgaccaaagatccagcctcaacggtctatctggaaaatcatcaaactctccagatagctctggcttcggtaggacattgtcaaaaaagtcacttgacatggctcttcgacatatggacatacggcgcagcattccaaacaatttacggcctcttatgacaagcataccagcatcctctgtgcatagcgcacggtcagggtctacaaggagcagaccaattagtgtttcagactctcctcttgcaacaagcagcaatgccagttctgagccgagcgtcaacaacaacctgatgtgcttggacagcatcgaaatcgatgatgagttgtgcagtgatagggcaggacaatacaggcgatgatttgcttctttgatagtataatagttatgattcctgcgaaggtttacgaccttaaaatgttcagagcagcgatgggaggatcatctccaagatgacctgatgggttcctattctcatatgtagttcattgggtgtccaatatttatccggtttattcatgttatgttgcgagctgctccatgtgcaactttattctggaccttatatgctattgaaaagcgtcttttatgtgttcagtccttgagtatcattttcagtactttgggagtttaagttaggtcttcttagccccttgagtctttgacaccatcttgtagcggatttcgcgctacagcctggtagtcacatgtgtttccccggctgaactgtattgacatttttctctgttgttgtatcagcaatgtaaatttagtagcattttttctttcaagtaatattttctcaggagacagtcactgctgccgtaaaactgttgctgtaatcttgtaaattccaaattggtaagcc

SEQ ID NO: 20533 - DNA, 1627 bp, Oryza sativa
  ref <308>: DATABASE ACCESSION NUMBER: AK070849
  ref <309>: DATABASE ENTRY DATE: 2001-12-06
tcttggtacatatgctccataacagtaactgcaatgagttaagaaaaaaaggtccctggaacgtgttggttctctaccctaccaattcaatggtagtgccaaaatctaggtaaattttgacactaccaattatttggtagggtagaattcatataatgtgtttggtttggtaccatttgctaccaatatgcttgttatagtgaagaaagttctagaatgctaccaaattagctatgggtattgccaatactttggctctaatccaaaccaatcaaactactatttgaactgccaaacaattggtagggcacattttggcatcgatccaaaatggcccattttggattgaagccaaaacatgaccttaccaatctattggtatcttgaagatattgtatggttggattaaagccaaatcattggtaatgcccattaacaatttggcactaatctagaactttcttctctatatcatcaatatttggctttatattggtagcaattcaaatatgtaccatgcatctctaccctaccaaagaattggtagtgccaaaacatgccaaaaatttggcactagcaaagatttggtagggtaaagaaccaaacagcttttgtttcagtcagagttaagtggggcaaaaagattgcccaaaatattatgaaatacctctcgatatacctttgatttcacaatatgttgtattaatttatgttttacaggcatacaacagatccaactttcaatgacatgtttattgtttagtttagctacaataattgttgggtagttgtagagcagcacatggtacttatgccacaagcccgcaaataaaataattcgcatttgctcatcctaattcatgctagcatctctattgcagaacaattttgatactattttttttttaaaattagccttgaaaatgccacttcccctaaggaatgacaaatgcatttttttttacaaatgcaaaaacttgcaggtagacacatatttggcaggcgaattcgtgtcatatggacatatctttcattggaagatatgtccatatgttggagctatttcaccagttctttcattggaataatgttagcatttaatcagtgatataggagatgattcaccttcaacaagctctcatttatcatcatgacgagtcagaagaatccgattgtcaagttacgccttctaccatatactccccaccaaaaacagctaccactgtttgttgttttctacgaatcttgagctatttgtatggagaaaaagcagtgacaatggtaaaagatggttttgaaggcactacaagacatgcctcaagttataaccgtgctgttacgaggatccaagcatccaaaacacttggaagattaagcttcaggcgttgtcaacataatgcataattagttgcatacttcagtggatgattgaacgggatgtttggatatgcaaatatttctatgcatccggactgaatactttctgaacacaaagcaagccaacctgccatggccatgacacgatggttctatccatattttcctatttgtcatgtacggctgggctgggcctagcaccaaaactattcgttgttgtttattattattaggtaattaggttattcgt

SEQ ID NO: 20534 - DNA, 2322 bp, Oryza sativa
  ref <308>: DATABASE ACCESSION NUMBER: AK070850
  ref <309>: DATABASE ENTRY DATE: 2001-12-06
cctcgcctgcagtgtctcgtgtcccagaacgcgattgcgttttttttttgcacgtttggtttccatatccctcgtctcttgtactcccttacccacatttggcctagccggaggcggtagccagggcccagggctgcttcttatggccgcgcaggagatggaggttatgatggttgcgatggcggcggaggcgccggtggctgtggaggtggaggcggttccggcggtggcgggggggctaaacgcgacggtgcccgcgttgtacgtgggcgatctccacgaaagcgtgcgggaggagcacctgctcgaggtgttcggcaagattggcaccctcacgtccgtgcgcgtctgccgcgacaatgccacgagcaactccctcagatatggatacgtgaattacctctcccaggctgacgctgcaattgctttggagaaactaaatcatagtcttattttggataagccgatcagagtaatgtggtctaaccgagatccagatgctaggagaagtggggttggaaatgtgtttgttaagaatcttaatgatttagttgacaatgtaagtctacaagaattattttgcaagtttggagatatattatcttgtaaagtcgctaaaaatgaggatgggacaagtagaggctatggatttgttcaatttgcgttgcaagaatcagcagatgcatcaattcaaaatcttaacaactctcatttttgtggcaggcaattgcatgttgctacatttattaagaagagtgaacgatctacaaacaatgatgacaaatatactaacctatacatgaagaaccttgatgatgatataacagaggaacttattaagttaaagttctctcagtatggtttagtaattagtgtaaagataatgaaaagagatgatgggacatctaagggctttgggtttgtaagttttcaaaacccagaaagtgccaaaagagcaaaagaatccatgaacgggatgctacttggatcaaaaaccttgtatgtagcaagagctcaaaagaaagctgaaaggaaacaatatttgcaacgcttacacgaggagaagagaaatgaaataatcaccaagagcaatgggtcgaatgtctatataaaaaatattaatgatgaagttggcgacgatgctctccgtgaacggttcaatgaatttggaaacattacatcagcaaagattatgcgtgatgaaaagggtattagcaaaggatttggatttgtatgttacaacacacctgaggaagcaaaatgtgctgtaagcaacatgcgtggtgtaatgttttatggcaaaccattgtacgttgctattgctcaaaggaaagaggaaagacgagccaaactagagcaacgttttgctgagcttgcaacgatggttggagctacaagtcctgtcatacccacaggatatcctcaattttactttgcccaccctagtacacatctccctcaaagtccagggagacaaggatttatgtatccacccatagggattagtcaagaatggaggcataacatgtttccctcgtcacataatatccaacaaatacattcaccgattatgcgaaatactccacggcaatacagaaacaacaggggaaggatgaatggaaatatgatgcattttcaccacactgtgaactatgttccacatgcgcagccagctaaagaattcatgtccatgtcccgacagcgatttagccatgctaagtatattccaaatgacatcatggccaatggattggctattcatcatggtgactctatttcatcgatgaatgacgcttttaacaacctgctagctactgctccacccgaggaacagaagaacatgcttgggaatagactatatccgttggttgagagacatcatcctgaccttgccagtaaaatcactggaatgttacttgagctaggtaattctgaagtggtcatgctactttactcatcaaacatgttgtctgccaaaatagaggagtgtgtcaaactgctccaagaggtaaaacccaaacctgaagatcaagaggccctgcaccctggtttcctcctagactctgctggtgtaaacgccaactaagaattcaatgccaatccaagcttttgaccgtgctaaatatattatgtatttgtgttttagagatgctaattagatagatgctctttatttcatagtttatggaactatattattgggcttgttatagaacttactaataatgcctaggatttaggtagaaatctcgggagtttttcttaaacggagcttgttacgaatcttagataataaattatatatgatggtgttcttgtgtt

SEQ ID NO: 20535 - DNA, 569 bp, Oryza sativa
  ref <308>: DATABASE ACCESSION NUMBER: AK070851
  ref <309>: DATABASE ENTRY DATE: 2001-12-06
gacacagctgcactacttgcactgaagtagctagagcttgcaagtaaagatggctaccaccaagcattttgtgttgctaataatccttgtcctccttagcataggaatgaccactagtgctagaactctcttgggttatggcattggaggagaaggtggcggtggtggaggaggaggtggtagcggcggaggaggtggtgggtatggtagcggctcaggctatggatctggcagcggatatggtcaaggtggcggtgcttatggtggaggatatggaagcggtggtggtggtggaggcggcggcggccaaggcggaggatctggctatggttctggctctggctacgggtatggatccggaggaggtggtgggcactactagtcctatactcggcaatggagcaattctaccgtgggacttgtgcactcatatatgatgattgtgtaacattggtatatacacaagcttgttttcgtgattatatgtaatgcttcttgattgggcttgctgctgcccaatatatgcgcttcccaagtataaataaatctaaaaataaggttgaaatacg

SEQ ID NO: 20536 - DNA, 1188 bp, Oryza sativa
  ref <308>: DATABASE ACCESSION NUMBER: AK070852
  ref <309>: DATABASE ENTRY DATE: 2001-12-06
gccaaatcgaagccagattcatgtcatcgtgtgtagaaactagaaactggagtacaagtgaagaaaacaaaacgaaaattttctgatccccgcctcgtccgaagccctaaacccccaaacgccgcctcctcctcctcctccttcctcgattccatcgaatcgaaccacgaaaccaatccacgcgagggcaaaatgatccagctgctgttcctggtgctcgtggcggaggcggccgtggcggcggtgctcctcttcaagacgccgctgcggaagctcgccgtgatggggatcgaccgcctcaagcgcggccgccgcgcgcccgtcgccgtcaagaccgtcgccggcgtcgtcctcgccctgctcgcctccacgctctacagcatggccgagatcagcggccgcgccgggggagaccccgaatccggcggcggcggcggcggcgcctccctctcgcccaccgaccaggtcctcttctcgcggcacctcctcgaggcatccctcatggggtattccttatttcttgctctagttattgaccggctccaccaatacatcagagagctacgtgggctaaagaagaatgttgaggccgtaactaagcataataaaatgttggaggaagcaaaacatggaagatctgaggagacaaagaaataccaagaagagattggtgctctcaatgaggatatgaagaaactgaagctacaagtccaagaaaagacagaggaagtccacgttgctgaggacaaggctcttgctattcggaaacaatctgaaagcctgctgcttgagtatgaccgtttgctggaggacaaccagcatctccgggagcagctgcagtcaattgaccacaggctctccagtccaaaataagttcaagtgtaatatttttttttcctatgggattggagaacctagtcaatatattgctgcagaaaattttccatcacagttttggaaaaaaaaagtttacttttatcgtagaataccaagaaattcctggcggtaaaatcatttggatttaatgctcatataatatgcttttagcagtattctcccttatcagttttatcatctttgcttaattagcttttgtaatatatacccgtaggtaagttcgagcatcatattgtcaagcactttacaatttttccatgtgtggttattttaataatgtctgttggttgc

SEQ ID NO: 20537 - DNA, 2271 bp, Oryza sativa
  ref <308>: DATABASE ACCESSION NUMBER: AK070853
  ref <309>: DATABASE ENTRY DATE: 2001-12-06
gggtgaaaaaaaaaagccttcgcatctagcgccgcctctctccacctccctcgtttcgatctagctcgccggcggcgatgtcgcagccggcggcggtggccgctggggcggcggcggggcagcagccgcagggccgggcgcaggcggcgaggcaggcgggcggcggactggggcagaccatcgccgggatcgtgcggatggccgtgttctggtacttcgccgccaagttcttcggcccgaagcggcccccggcggagccgggcatgctcatgtccaacctcttccagaagggagagccgctggatatgtggatgtatttatcagaaaatgagaaattcaatgacttcagtaatgaggatgcactcgtctggcatgaggcaaacataccatatgcagtctggggacctaccagtacgagaacgcacacattgacatactatccttctgaggctatcaagaacaatggttctttgtatgctcatgtttattttgcccgctcgggttaccctgtggatcctactgatcctgaatatgagcaaagttctgcatttggcaggacacaccctgttgtggcttacttgcgaaaaccaaaagatggtaaaaagaagagcttgctgggagattcaagtgaatctaatgaacaaccaccacctaaggagaataaagattctgtagacaaagatgagggcccagttgaatatatttcttattggaaaccaaatgtaacaataaatcttgttgacgacttcacacggtatccacacaataatgttccacccaatgttgctccatatttgaatgttgatccatcttcaaacaactactacccaactgtattcttcaatgagttttggctactgagagataaattgatagcactcaatgagactgtggaggaactgcctttgaaccttgaagttggtcctattagcatgaccaagtggcaaatatttcttcagatggagcagtccttccaagttcatcgcagttatggaagtatgcttgaaggggaggctgatgagctcaagagagttttccttgaaggaaatccatactttttgggattgaccatgattgtttctctgttccactctctgtttgattttctggctttcaaaaatgatattcagttctggaataagaacaagtccatggaaggtctatcagcaaaatccgtggttctgaactttgtatgccagctgattattttcctctacctgctcgacaatgagacttcatggatgatccttggtagctctggaattggtgtttgcattgaattttggaagattggaaaagcaatgcatgttgagatcgatagaagtggaaagattcccatgttgaggttccgggaccgtgaatcatatgcacagaataagacaaaggagtatgacgcaattgcaatgaagtatcttacatatgtacttctcttccttgtgttctgtttctccatctattcccttaagtatgagaaacacaagagctggtactcatggatactctcttctctcacaagttgtgtgtacatgtttggtttcatcatgatgtgcccacaactattcatcaactacaagctgaagtctgttgctcatatgccatggaggcaaatgacctacaagttcctcaacaccataattgatgaccttttcgcatttgtgatcaaaatgccgatgctgcatcgtctctcagttttcagagatgatgttatcttcttgatatacctctaccagagatgggtgtacccagttgacaagaagcgtgtcaacgagtacggcttcggtggggaagacgagccacaagctccccagacattggaagggagcgatctagcagctgcatcccagcaagccggggctgaggcggaggccgagacgagcacggaggacaagaagacgaagtgagcccctcctgctctgcacctccagatcatccaaccacagaacacatctcggctgccaccgggcgtaaattttctgtgccgagcttggaacgctggactcgcctcacccgtcgctgaatgctgctgaccataagagattgtagtaacaggctttgagtgggcgcatcgacgaacacacatacacttgcccaatctatggacgggcaacatcgtcaaacattatcgccactatttcccagtttgtcttaatctttttttaggtaacaacaaccaccaccattaccagatgtcgataacgatgcactagacgcgtattttattggtttatgtataagttttgcattggctgaaaaaaaagtgttcgtttattg

SEQ ID NO: 20538 - DNA, 1540 bp, Oryza sativa
  ref <308>: DATABASE ACCESSION NUMBER: AK070854
  ref <309>: DATABASE ENTRY DATE: 2001-12-06
gaccatttcgccttcttcttcacctgggtttcgcccccataaggccggagatgggatgcttcaattccaagccaaacgacaccggtgcgatcagaagaagacccgggagcataggcgaggtggctgtgttcgtgcctggattgagagtacccgagagctcggatgagctgccccttcagccgctaggtgatggcctcccaaggaggctcaccgaacgcctggccgcgttgaggaatcggataattgtcatggctgctcatgaggcactgtacatgaccaagcccacctggaggatcaccatcactcagcatggggggtctaagtcagctgatcttctgcaagctttggaggattacttgcccactcttcttggcctagtaaaagatgggagcgagttggaagataaggtacagtttgcatggatgaaccaagaggatgacgcagaggatacgtcaatgcccagtgcttggtatgaggtgctatcagttctacacttgatggctctgctgcgtttgtcccaagcaaattcccttcttgttccaaagacatccattgagggataccatgctaaggtatctgaagaaaacaaacgagcttcagtggagatatttctcaaggcagccggatacttggagtgtgcaatccagcatgttctacctaagatatcgccggagaaaaggaaaggtcttcctgtggacttagctgaaggaatcctgaaagctatctgcatgcaagccctgggtcaagcaattgatgttcagcttggattggcaattgacagtccaaaggctaccttggcagtgaagaggaggctggcatgtgagatggtcaagtgctggcagcaggcacatggaagcatttcggacctacctctgcttgatggctgggcagaaaagcacaggctctttgttacatggaaacacatcgaagcaaaagctgcggcatactactaccatggactaatccttgatgaaggaaacagtgagaaatctcataggacggcggtggcagcgctgcaatcagcggaggagttgctcaaagagagcgaagctgcatgtgaagccttccatgcggcatctcctgtttcaagaagcccgccgctgtggggatcgatgaggtatcttcaggagaagatacacaaggagtcgtcgtgcaaagttcggatcaacaaggacctctacaacaaggacaacatcatcatccatgaccatgctgacagcgcgccgccgctgccggacttcgccgtggctctcaaacccgacgagtatcgccttcctcccccactcactgacaccaattaaggatcgagtcgacaagggagaaattattaaggtccaaggcatcatgcagatgcagaggaggaagaatcaatcaaataaaatctattatgtatattcattcatattgtgccatgtatgtatgcatgggtgtcacaccgcaccacatgttgcaagaaaaatgaaagagaagctagttactactacctccatacatatatgtatgacattgactagtataaatttgaactagccaacatcat

SEQ ID NO: 20539 - DNA, 2664 bp, Oryza sativa
  ref <308>: DATABASE ACCESSION NUMBER: AK070855
  ref <309>: DATABASE ENTRY DATE: 2001-12-06
gcgcttggggggagagtcagagatgcatctgagcgagaacgaggggatcgagggcgtgcggttcgcggtgacgggcggccagggcttcgtcggctccgcactgtgcctcgagctgctccgccgcggcgcccgggaggtccgctccctcgacctccgcgcctcctccccctggtccgaccagctgctcggcgccggcgtccgcttcttccaaggggatgttagaaagaaggaagatgtggggaaggctttgcgcggtgtggactgtgttttccatctcgcttcgtatggcatgtcagggaaggaaatggtacaggctgggcgagccgacgaggtcaatataaatggtacatgcaatgtgctggacgcttgccacgagcatggtgttagaaggctcgtgtatgtaagcacgtataatgtggtttttggaggagagccgattgtcaatgggaacgaggcgctgccttatttccctgttgaagaccatgttgatgcctatgcgcgtagcaaatcaattgctgaacagttggtgctgaagagtaatggccggcaaactaagagtgataaaagcagtcgtctttatacatgctcaatacgtcccgccgctatctatggtccaggtgaagagcggcatcttccaaggatactatcccttgcgaagttgggattagcattcttcaagattggggatccaaatgtgaagtcagattgggtctatgtggataatcttgttcttgcactgatattggcaagcatgggacttttagatgatattcctgacaggaagggaattcctgtagctgctggtcaagcatatttcatatgtgatggatcgcctgtcaatacttttgaatttctcagtcctctatttcaaagtttggattacacagttccacgagttagaatggatacctcagttgctcttgccatctcaagattttttgtgttcatgtatacactactctatccatggttggatagtaaatggattcctcagcctcttctccttcctgctgaagtatacaaggtgggtgttacacactacttttcatatttgaaagctagagaggaaatcggctatgtacctatggtgagcccgcgagaaggattggctgcaactatttcctactggcaggagaggaagagaaaagaactagatggcccaaccatatttccttggctgtttgtaacaattggcatgctggcattgttttctgctgcttaccttccacccgtcggtccattgaaatgggtgcttgacctccatttatttgttttccgatcaaagttggtgattcggttagtctttgtgatagcaactgcattgcacgttggtgaagctgtttatgcttggttcttggcaaagaagtatgacccgaggaatgctacaggttggttttggcaaacattcatgctcgggttcttttctcttcggtatctgcttaagagaatgagagagtagatttgtgctgttattcccttcactttgtcaggaaatcttcaacagtaatttctagctgaaatgcctcagcatatgcacttttaactgctgtggaacttcatttttctgagtcatatgtgacttctgtcagtcttgagaagcagagtgtgcagaacccatggtcttctatgatagtaggtattcagccatggttttcgatcttgcatgaagccaaaccacacagcacattgttagagttgcagcttgtaccattagcttagatggcatttgttttgggactggagagaacaattgaacataatggagttgtaagttgtcattgttacaattggcatatgtttggaggctataccatactgtacctcctatgctttgaaactgaactataaatcaataattggaaagctgaacaaaagccagcttctcttgcctgtcagttacgtacatatacagcacaaaccctgtcttttgccaatgcagaactggagtactcttggattggtctttgttccttctctgcagctatctacctacctctgaactggaagtcccaagaactacaagcatattacagcctgatggcagagtgacgacaggtcagttaaactgcttccatgagaaaaatgagttgttgcaggcttgcagctgtgttgtgcccctccactcgtctgattcttctaccaacctcgcaaccaacctttgcccttcatttaataaaagccagtgtcggcggcgagaggaagcaaccgaatgaaaagaagaagaataggtgaggtgaggcccgagtgttattatcggagttggacttgtgaacgacttgtgaactgcagccgcgcaatccgtcgatttgtgtgtggctcgcgtgcttcttccagatcacatttcaggtcccttcggtttgactgtatgagatgatttttctgtcgaatgaattggcgtatgagataatttttctgtcgattgatttttcggtttgactgaatgggatgattgcacgttgccgcaaggaatatatggtgtaagtaaggtcaaagtcctctgatcttggaaagaattgggcagaaacatatcgtaggaacaaaacgtgacacacgcttgcatttgtgctgatgagaaatgtaggcatgcagtttcagtttttgcattgtactgatgagaatgatgtttgtgatggttgcaatggctggcatgtttgattgtttcct

SEQ ID NO: 20540 - DNA, 3237 bp, Oryza sativa
  ref <308>: DATABASE ACCESSION NUMBER: AK070856
  ref <309>: DATABASE ENTRY DATE: 2001-12-06
ggtgcctccctttgcctgccttcattcgtgaattaaaagctttgggtgcacattgccttcaaagttcaaacggtgcaagggcagggcagctattgttatttgggttcatctgttgctcggtcgaggctactctcactggtcagaaatctaagcttcattgaggaagcaccggtggaccaaagagaggcatgtcgacgatggtggtgagcgcatacaagggggtgattgactctgttcttgcaaagctcagagagctgatgggaggggacatgtgtgccaacctcataggcgtgtccagcagggacattttgttcctcagggatgagctgcctgccatgagtgctctcctggagaagctggatgatgccgaagaactcgattcggaggcgaaaaattggaggaaccaagtgagggagatgacctacgacatcgaggactgcatcgatgatttcagtaacaacatcacaagcgtagacgctaagacggggttcctctacaaggcttcccaatttctcaagacttgcagggctcatcttgaggctgcctggcaaatcaaagagctcaagactcgtctacaggagataaacgagcggcgtaagaggtacaaggttggacattacatctctaatactacctcagtgacagttgaccctcgcatctcggcattctataaggagacagccggccttgtaggcattgacagcccaaagagagagctcactaaattggtgatggacgaagagacgcaattgaaggttatgtcaatagttggatttggaggcctaggcaagaccaccctagctagtcaggtgtatcgtgaagttggagtgcagttcaactgtaaggcatttgtatctgtttctcaaaaaccagacatggtaaggctactcacaagtttgctgttacaactcaagcaacatccctctcatgcttgtggggtgcaagaactcatcgacaatctcagggaatatctaatggataaaaggtacttcattgtagttgatgatttgtgggatgttccttcatggaatattattacatgtgcttttccacaaaataatcaacatagcagagttataataactacaagacacggggatgtggctaggacatgttccagtgaccatggaagcattaacaatatgaagcccctaagtgcccaaaactcaagagaactattcttcaacagaatatttgggtctaaagattaatgtccctcttacttggaagaagtctcatgtaaaatactgaagaagtgtggtggcctaccgcttgcaattgttactgtagctagtattttagcttgccaacccacaagactgaaggaggaatgggagtacattcaaagttctctagccactaacaaatttgcaaggaagtccaccttggaagacatgatgcaaatcttggagctcagctacaagagtctgccacatcatctcaaagcatgctttctttatcttggtgcttacccagaggattgtgtgattagcaaggttgatcttattaaaaggtgggtagcagaaggttttgtgagtcactctcctgggcaagatgcatgggttgttgcagagagctatttcaatgagctggtgaatagaagcatgattcaacttccatatcagggctactacaatgaagtatctcattgcaaggttcatgatatgatgctagacatgattctaatgaggtgcaaggaagataatttcatcagtgtgatacaagatccacgagcggcgatagaagttcaagacaagattcgtcggctcaccattgacttgaatggtgccatgggtgacacaatggatatgaacattactaggaaagtgtcacaagttcgttctcttggtgtatttggaggatcaaagtggatacctcctttgttggagtttaagtttctgcgggtgttattccttgaattctttctacgagagatgataattgacctcactggtatcaaccaactgtcccagctgagatatttaaaggttgaatgcaaggaatgcctaatggatggtgacataccatcacaagtttccatagtgttaccaagtcaaatccgaaggctacaacatttggaaaccttggagttaccctgggtatcaaaatgcagcatcccatcaatatcaggcatcattgatttgccgcgcttgacccatctagtgttgcgacagcataaggggggattaccggatgggattagaaaattgaagtcattgcgcactttgcatggctttaatctaccagtaagctcattggaaaatattgatgccctgggtgagctcactagtctagcagatatgtcactccattgtggcaaacaagacacaaaatctactactccaggatggatgactgctctgagttgttccatcgagaaactcggtaatctcaaaggtctttatgtgaggtctaatagtcctagctgttgcgccgatgcgatgagcagctggttttcacctccatttctcaaccttgagaagcttgatctgctagattggacattctccaaagttcctagatggattggccaactccatagcctccgtgagttggcacttgggggcaagaagatactccaggaagatgttagtatgatcggcacaatgctacccttcctcacccatctaagcctacgtattgttacatgcaatatcgcggtgaaggaaatcaggatcatgatagaaggctccataggattcgctgctctccggtttttctgttttgactctaataggatgtcacacctagagtttggggtaggtgctatgccccagctcaagaggctgctattagcacttgatccatgggaatgggatgaggccacacctgttggacttaaacacctcttgtacctcgaggaaatacgagtattgacagcatcaacagctgttgcttctgcaggatctgaatcaatgaatggcaagtctgcactagtcaagggtgtgttccatgatgccgctaatgctctccagagtcgcccagcatttaccgtgctcccaaggatccgttctctctctgatcacgtaaattgttgtaaaattattatggaaacagttgcatgtaagtaggatttttagggaatgtatatgtaattgttgtagcaagatttgttcttgttccaactgaacatggttgttaatgttcttacttgtaattgtaagttctaatcttacatcaaaaggatgcttagcctaacacatgatcaccaagataatctaatgtggaatttggtgc

SEQ ID NO: 20541 - DNA, 2775 bp, Oryza sativa
  ref <308>: DATABASE ACCESSION NUMBER: AK070857
  ref <309>: DATABASE ENTRY DATE: 2001-12-06
gacgcgcagccaagagaggcgaagggcgcaacgcaacgcgaacccctccttcccccgtcgcgcccaaccctaacccgcctcccctccacgtagatccaatcccgccgccaccgccgaaccctagcccgccccacctccctccccgccgccgccggggcgcgcgcgcgcgcgatcggcgtcctcccgccgccgcgttcgtgcggggtggggttgggaggaggaggaggaggaggagggcccgacggcggctcctctcgagacgggggccatggaggcggacggtgccgcggctgcggcggcggcgggggaggcgagcacggaggccggcgcgaggcccctggcgccagaggaggaggcgctgcggcgcaacaccgactgcgtctacttcctcgcctcgcccctcacatgcaagaaggggaacgaatgtgattttcgtcacagtgataatgctcgtatgaaccctagagactgctggtactggttaaatagcaattgcttgaatccaaaatgtccgtttcgccatccgccaattgatggtatgtttggtgctccaactactggaatgcctgcagtttcttcacactacgctccatttaactctggaaagcagttggttccatgctattactttaaaaagggaaactgcttgaaaggtgacagatgcgcattttatcatggaccacaatcagtgggaaataatccatcagaacaggtggtaaaagtttcttccttacctttggagcagcttcagactcaaaagaatgatttgttgggcattaaagattctgtgcagtctactaattccattcagcatggtgctccaataactaatgagaggggcaaaacagccgttgatcggtcaacggttaattctgccaggacagctacagttgcaataccggttgcttccaatgcaatgtcttgtcctaagtcagagaaggtaaaaagtagtacgccagcagcacttaaggaaagcttcactacttcttcaggtggggatcatcctgagtgctaccagaaccattttccaatggatagtgatcctgtgcgagattggaaccaaagttatgaaatgccccctgcagatgatctgccccagaacagtagggaggctgatgaacttttgggtgaatcttcaccaggttttgatgttctcgtggacaatgatgcagatggtgctgcttatttacatgatgaagattttggaggagatatgtatccagtggaagattatgaatatgctccagctgattttgatgttcgtgcacatcatgaaagagagcggttcaatggtatggatgagcaagaccagatgggacatatgtatgatggctacgagagaaaacggcgtagatcatctgagaggagcatggaacggcctttccactcagaaagaaggtttctgcaaagagatagagaccgtgtcgagatggatggatcggatttacgtcatcggctccgtaggagaagaataaatgagtcttcattggcaattagtccagaacgcaatggagagcaacggcggagggatgagcgctacagggaaagggcacatggtcaccgttcacacagggatcatcaccagagctctcgaggaagcactcttagctctcgtctgcaaggcagaataaagcttcctggaagatctcctgacagagttgatactcgctccgagaaagagcgagatagaagaagactccgggacaggctgtctccagttaggcgcacggaatttcagggtaccaggcatagggaggcaggacaacatgaagagcagacccagcggagatcaagtgaacttgctttaggttccaggaatgcagatggccagcatttgacaaaggatgtgcctgactcacacaacttccctcatcgcaaaaactcgagggactccagtaaggccaatggaagtgttgagcctgaagcatcgcttgattttgagggcccaaagccccttagtgtcatcttacagcggaaaagagaggcagcatgggccaatggcacatctgcctgtagccccaaacaagataaatctgccgaggtctcacacaggcaagcttctctggctgaagctgagaaggaaggtgacaacataattagttctgatgaatacaaaagtggatctggcgatgaagaattcagagacgaaggccacatccctgtggagggccatgggcaatcttcatctcatggtgacaaacttgaggctgaagatattattgaggtggatcccgtggaaaatcaagatgctgataattatgaccagagggagggggagtcctactatgagcctatcgaaggccaggactacaaatccgatgacgaggatgcttatgaagatgatgatgaagagtatgatgacgatgatgattttgctcggaaagtaggggttgttttctcttgagctctgtgggccttctcctggttttgttgcatgcagcaaagctgaaaatgcttgccttagtgaatctatttggataaattcctctggtgctttgtgttttgttcttgaagttcatagtgccaaagcctttatttataaggctgataactgataagtataggtcaggtatgaagcgggggtaggattcataaattaaaagggctttacgtgtaaaaactgctgcactcgttgtgttcagcatatatctgatctatcctgaaactattgtattgtattagtttcctaactaacagacaagatatttctttgataaattttttgcctgatatgggtaatataatcagccccattttggaggggttcttttcttc

SEQ ID NO: 20542 - DNA, 1917 bp, Oryza sativa
  ref <308>: DATABASE ACCESSION NUMBER: AK070858
  ref <309>: DATABASE ENTRY DATE: 2001-12-06
gcgcgtcgtcgtcccctctcctagctagcggctatcaaacccccacaccactgctcgatcgatcgtcgcagccggagtaactaaggcagagatcagatcaggcgaattaggagcatatggcgctgtcgacggcgcagacaggggagtcgatgcactcctcgacgttcgcgtcgcggtacgtgcgcacggcgctgccgaggttcaggatgccggagaagtcgatccccaaggacgcggcgtaccagatcatcaacgacgagctgatgctcgacggcaacccgcgcctgaacctggcgtccttcgtcaccacgtggatggagcccgagtgcgacaagctcatgatggccgccatcaacaagaactacgtcgacatggatgagtaccccgtcaccaccgagctccagaaccggtgcgtgaacatgatcgcgcatctgttcaacgcgccgatcggggacgacgagacggcggtcggggtgggcacggtggggtcgtcggaggccatcatgctggcggggctggcgttcaagaggaagtggcagaacaggatgaaggccgaggggaagccccacgacaagcccaacatcgtgacgggggccaacgtgcaggtgtgctgggagaagttcgcgcgctacttcgaggtggagctcaaggaggtgaagctgacccaagggtactacgtgatgaacccggagaaggccgtggagatggtcgacgagaacaccatctgcgtcgccgccatcctcggctccaccctcaacggcgagttcgaggacgtcaagatgctcaacgacctcctcaccgccaagaacgccgagacagggtggaacacgccgatccatgtggacgcggcgagcggcgggttcatcgcgccgttcatctacccggagctggagtgggacttccggctgccgctggtgaagagcatcaacgtcagcggccacaagtacgggctcgtctacgccggcgtcgggtgggtcatctggcgcaacaaggaggacctccccgatgagctcatcttccacatcaactacctcggcgccgaccagccaaccttcacgctcaacttctccaaaggatcgaaccagataattgcgcagtattaccagctcattcgtctcggattcgaggggtacaaggacatcatgcagaactgccgggacaacgcgacggtgctccgggaggggatcgagaagacgggccacttcgacgtggtgtccaaggactccggcgtgccgctggtggccttctccctcaaggactcgtcgcggtacacggtgttcgaggtggccgagagcctccgccgcttcggctggatcgtgccggcgtacaccatgcccgccgacgctgagcacgtcgccgtgatgcgcgtcgtcatccgcgaggacttcagccgcggcctcgccgagcgcctcatcaccgacctcaccaagacggtggccgatatggacgcccacgccgtcaagaaggccgccgccgagccggccaagaagaccgtgcgggagatagagaaggaggtgaccacctactggcggagtttcgtcgccaggaagaagagcagcctcgtctgctgatcatcgactcctgcactcgcgcgtacataaagtgcaggaacgaataattcttgacccgtcttgcattgagttcttcgtttgctgctgcttcttttcttttttttttccttttcacccgctgaattttgagttcagtttcaaattcgcttcgatagatttgtgtatgtcacaccgatttgtggcattcttgcagacaagttaccaatatgaaatgcgtataggcatgtacacgcagagacgtgtcaggcagaacagaagtgagatgcaccgatctgtaccggccatggcatggaattggtttgtcatgggctatagttggttgacagaataagttcattttgtgacc

SEQ ID NO: 20543 - DNA, 1596 bp, Oryza sativa
  ref <308>: DATABASE ACCESSION NUMBER: AK070859
  ref <309>: DATABASE ENTRY DATE: 2001-12-06
gaggtcgtctctcgccgagacgctgcccaccccaatccggcagcacagcagcagcagaagcagctcggatccctcctgcaatggcgaccgcgtgcccgccgctctcgctgcagccggcctacctctcggggaggtccacgcgcgcgcgccgcccgccgcccgccgtccgctgcagcgccgtcggagaggttatggcggagacggcggcggtcgggacggcggaggagccgctgctggtgagcgcgatcaaggggaggaaggtcgagagaccgccggtctggctcatgaggcaggccgggaggtacatgaagagctatcaattgctctgcgagcgacatccttcattccgtgaaagatcagaaaatgttgaccttgttgttgagatctctctacaaccatggaaggttttcaagcccgatggagttatcctgttctcagatatccttacaccgcttcctgggatgaacataccttttgacattgtgaaaggaaaaggtccagtgatatttgatcccttgagaacagcagctgctgtgaatgaggtcagagaatttgttccagaggagtgggtcccatatgttgggcaggctttaaacattttgcgggaagaggttaacaatgaagctgccgtgttgggctttgttggagctccctttacattggcatcctattgtgttgaaggaggttcatcaaaaaacttttcaaagattaagaaaatggccttctcagaaccagagattctgcataatttgctacagaaatttactacgtccatggctaactacattaaataccaagctgacaacggagcacaagctgtccaaatttttgactcatgggctacagaactcagcccagttgattttgaggagtttagcttgccttatctgaagcagattgtggatagtgtcaaagaaacacatcctgaattgcctctgatactatatgcaagtggatctggtggactgctggagaggcttccactgacaggtgttgatgttgttagcttggactggacggttgatatggctgaggggaggaaaagattgggatctaacatagcggttcgagggaatgttgaccctggcgttctttttgggtcaaaagagttcataagcaagcggatttttgacactgtgcagaaagctggtaatagtgggcatgtattgaaccttggtcatggcattaaggtaggcactcctgaggaaaatgttgcccatttctttgaggttgcaaaagggatcagatactgaaatacctaggctattcgatgcattcctttctccctagtccccaccggcagaagttgtagattctgctgcttgaggatagatgcaggaagccatgtctagcgtagaatacctgaagagcacatcttttgcgatttctgtgttttgcgatcaaatttttattttattgttagtcttgtaaggttatcacttgaggtgtaagaaagttcctacttgtttatagcaagtatatattctaatcaaatctgtaaccccgagattatcaatttgtatcggtaagaaataaatattgtatttgaaaatgttttttttcctaaaaaagaagcaggatgtaatgttaccttct

SEQ ID NO: 20544 - DNA, 1176 bp, Oryza sativa
  ref <308>: DATABASE ACCESSION NUMBER: AK070860
  ref <309>: DATABASE ENTRY DATE: 2001-12-06
gcttggtagattttggttcggcccattggatcttccgactcacacgcaccaccatgaccgacgggccctcgaccaccggcgattcgccgccgccgccgccgccggagagcggcggctccatctcctccatggttgcctcctctgccgcctccgctgcggccgcggccgcggatttcactcgccgtggcgaggccttcggcgccgatatggcctccgcagctagggctgccatggacaccgccatcgcccactctcagtcaaccgccatcgccgccgcagaagctgcctcctcggccaaggccgacgccctcgccgccttccccagcctcacgctcaacgcaaaggaggagttcgaatggttaaagaaggagtacacggttcacgagcaggtggtgttcggcaagatcaaagagggtgccatcatggccatcgagcatccgggaattgctgcaggctccacagcaattgctggaattgtgctcttcaaaaggccaaggagctacctgatccaacgggtgcgacgcatatttgtaagcaaggagaccctactttctggcatccaagctggcgtgaatcacatgagacaaactgtcaatcttgtgtccaatgaaagccaaaagttgctggatagagcagcaactgctgaaaaaagatttcagaaaggatggaacacactcagggaagaagggcgtgccattcaaagtgagctgaaccaaataagtgatattgagaagcaagcagtaggtctcaagagcattctcaatcagcttcccagagcacatgcatctgagtttcaatcagagatatctggcctagcctctcaggtgaagaaggagaagagagtacttaacaacaccctcacgaagattgcgaactatggtgtccctatctgactgtcgaaacgcagcttcatttgctgtagtttttatcaatgaagagattctgaagacatgggtgaatcttttactttatactacttgtccgcggaggggaaaggaaataatacgttttatcagtcttggcgagatgtaaatttgccgctggtgctgcagcagcaacataacatttttgtagtgttttgcatcatatgggcattctctgttgcattgtccatgaagtgaaatggacatactgcgtcgaccttccctgcaattaatcaaattatgtttttttttt

SEQ ID NO: 20545 - DNA, 1374 bp, Oryza sativa
  ref <308>: DATABASE ACCESSION NUMBER: AK070861
  ref <309>: DATABASE ENTRY DATE: 2001-12-06
gctcttcaatgtagctcccctctcttcacccacaagtccagctagcctagcaaagttcacatttttcttctatcttgcatcatcacacgaagtgaactgcgtgatcgtcggagacatcgaatcaaagctctcgcccattctgcttgctgccctgatctccttcaaattctagcccaaagaatggaggaccagatggctaaccttcgcttgactgacttcgagttcttcaggatcatcctgcccggatcctccaaaacgaaactgaagctgccttacaagttcgcgagggagcttggggaccgagagctccgggaggcgaggctgcgggtcgccggcgaggggcggcgcccgtgggacgtgaaggtgttcgacgacgacgtcagcggcgacgtgtacctgggccgcggctggcaggagttcgcccgcgcccacgacctgcgtgacggccacttcctcgtcttccgctacgacggcgccgccgcgttcaccgtcaccgtcttcgacgagaccatgtgccgccgcgactaccgccgccaccacgacgccgccgagagcggaagcagcagcagcagcgacagcagtgatgcggcggcggcggtggcgacggcggcggcggagggggtcggcgacgtggcgctgtcgcagttcgccgtgacgctgcggcagtgcaacctcgaagacaagcaggcgcagtacttgaacgtgccgatggagttccaggaggcgcacgagtacgcgaggcgggagaaggtggtgctgcggatgcgcggggaggcatggacggtgaggctgaagcacagcaggcgggagcgcggccagcgcacggcgttccggtacgggtggcaccggttctgcgtcgacaacggcctcgccgtcggcgacacctgcttcttccgcgtcctccgcgagggcgacctccgccgcggcggtgccgccgacgaccacgtgctcaaggtcgccgtgcgcaaggccgacggcaccaccctcgagtgatcgatcttactaattaactactgagattaataaattaattagcgcgctctcgtagtctcgtctcgtcgtgtgtgtgtgtgtttaggtgttggttagtcgttctaaatggcccgtatttgtcttacgttaaatcgtctggtacttgatcggatggtgtttgtgggtgtgccactggcagatcgacaggtggccgagctgtgtaccgaactgctttattactctctttcacgaacaaggccctgtgtttcgcattcacaacaatgggaaacaacccaatctcgtcataagactggatggattcgtatcgcaagtgctccctcagtgttaatgtaaaccaacttaatataaaacgtgatattttatatttaaatttattgtatt

SEQ ID NO: 20546 - DNA, 3546 bp, Oryza sativa
  ref <308>: DATABASE ACCESSION NUMBER: AK070862
  ref <309>: DATABASE ENTRY DATE: 2001-12-06
gatttcctttccttcctttcccttccgagttcgcccgcatcctcccaaccccaacggttccagatctcgcttcgccagcggcgcgatgagccgcaccggcggccgccgccgcatcttcgacggcctccccatcccagccgacaaatcctacctcaaggaagggctctcgcggattgacgaggggtgggcggcggcgcgcttcgactcgctgccgcacgtcgtgcacatcctcacctccaaggaccgcgagggcgagatccagttcctcaaggagcagagcgacctcatcgaggacgtcgtcgacgaggtcgtccacgcctaccaccatggcttcaacaaggccatccagaactactcccagatcctgcggctgttcagcgagtctgcggagagcatcaccgggctcaagggggagatggccgaggccaagaaactgcttgggaggaagaacaagcacctcgggcagttgtggtaccgctccctcacattgcgccatgtgctctcccttcttgatcaggtggaggatgttgccaaggttcctgctcgaattgaaaacttgatggcagagaagcagctctatgctgcagtgcagctgcatgtccagtcaatgctgatgctagagcgagaaggccttcaagcggtaggtgctcttcaagatgttcgctctgatctcgcaaagctgcgaggtgtactattttataaaattttggaagagctgcatagtcatctatacaacaatggagaatacagctcggtgactttaagcatggttgataatgaagaactaccaacatctacggctactggtcgattagtaaacagcatgcaacctctgtccaggagaactaggtcaattaaaggtgataatcactttggtgcgtcagcagatgggattcctaaaaccagttctgttggaggttcttcatttgatggcccagatgatgatagtagcatagacatgcatgaaagtgatggtgggcgtagtcggagggattccaaaagtatttctcgggaagtgccaattttcctttcgtgtgctacaccagatgagtttcttgaatcagtgacaaaggcagatgcttctctcagtgtgaaatacttgagaacattggtgcagtgcttatccatgcttggaaaggttgcggctgcaggagctgtgatatgccaaagagttcgccctacaatccatgatgttatcacctcaaagataagagcctactctgaagaaacttcaaagtccaatgtaaacaaagctgcaaatgaaaattctgatgtgtcacactcaaatggacgtgctgctcgttaccaactgctcaaacagaagacgaaaaatggtgtatcactaatggcaagtcaactagttgtcagtcccatctctccagctatggcacccactggagatgctcagtgtgcagctagtcaacttcttagtgcaatatttgaatgcctggtagacattcttgagaaccatattactgttggagagcttcttgaacagaaatcatcaactgaagttgataatgcaaacactcctcacatggcaaatggggatgcaagctggaatccagattctgaatcttcccaggctactggtggttttactgtcgcattctctttgtcagttgtgcagagtgaatgtcagcagcttctgtgtgaaattttgcgggcaactccagaggctgctactgctgatgcagctgttcagacagctaggcttgcaaataaggacccagtgaaggaaaagagggatggatcagaaggcctttcttttgcttttcgcattacggatgcagcaatcactgcgccaaacgaaggtcaaggatggcgaagaaactcaacagtaccacaagaaggctatggaacagcaagtgtcatacctgaccaagggattttccttgcagcatcagtttaccgtcctgtatttgagtttatgaataaaattggactgatgcttccgcagaaatattggcaacttgggaatgatgggctattggcttttgtgaacaacttcttgaaggagcacttcttgccagcaatatttgtagattaccgaaaatgtgttcaacaggctatatctagtccagccgcatttagaccgcgtgtccatgcaacctcagtgtatagtccattagtcgaaaatgggcgtcctgtactacaagggcttttggctgtcgatataatagccaaagaggtacttggatgggttcaattgatgccgaactatgccactgagcttgttgagtatgttcgcacatttttagaacgtacacatgaaagatgccgtgcatcctatatggaggctgtccttgaaaaacaaagttatattctcctctcaaggaatgatgttgaaagtttaatgcgcttggatccagcaaatctatctttacaaaattcttttggtcaacttgaccacagtattccagatgcagaagctgtagaagtagagattgaactaagtgatctcctattggatatgtgcccaataaaacaggaaaacttgatccatgatgaccagaaattgatactgttagcatctcttagtgattcattggaatatttagcggattcagttgaaaggcttggagagtcattcattaattcatctaccatgttggagaacaaaaatcacatccaccagggtcgccatactcgctcaactagtgcaattccgaaaagccttgcatcacttgctaatgagtatagaaggctagcaattgattgtgtcagagtcttgagattggaaatgcaattagaaactatatatcacatgcaggaaatgacgaaaagagaatatgtagaagatcaagatgctgaagatcctgatgacttcatcatctcactaacaactcagatcgcacgtagggatgaagaaatggctccttatattgcagaatctaaaaggaattatgtatttggtgggatttctagcgttgctgctaatgcatcgataaaggcactcgctcagatgaagtcgatcaatttgttaggggtccaacaaatatgcagaaattctatagcactagaacaggctctggcagccataccctcaattgacagtgaagccgtccaacagagaatagatcgtgttcggacattctacgaactcttgaatttgcctttcgagtctttgcttggatttattgcagaacatgaatatttattttctgcaaaagaatacttgagcgtgttaaaggtcaacgttcctggaagagagatgccaatggatgctgaacgacgcatctctcagattttgggccattaaaacgaattggaatatgaggatggtttctttagctatattctgttgctaacgtctccgcatttttctttatgtatcttttatggcggcagttattattatttttggctatttcccccctttgtttgaatgtatatcagaagtgtaggtggtggtatcttcttgcgtatgccttctcattgattgtaaattttcacaaaatttcctttttcttttggttcttgtaaatgtgtaatttatctggatgctttcgtaataaaatcgtcatactcctgtttttatttgtt

SEQ ID NO: 20547 - DNA, 3621 bp, Oryza sativa
  ref <308>: DATABASE ACCESSION NUMBER: AK070863
  ref <309>: DATABASE ENTRY DATE: 2001-12-06
ggatgatggcgtaaaggcggcgccttttctctgcagttcctcccctcccgtccctttccgctcccgcgcccgagaatttattgctcgcaatgctgccctctctgatgatgagcagagcaaaggatgcagagcctttacactttaaatgcttggtcggtttggctgcaagatgccatattgccatctcatgcgtaccaccgccatccgtccgtcactgagctcctgcttgcgtagtgacgagcgttctggtttcgctcagctcgtctcgatttcacacggattggaattcggccgcattccgcgtggaaagcttcgagttcttggtgcttcttgttctccgctgcgaaaaccgcagctttagattcatcaatgttgttatcctctgaggcttcctttgtaataagaaggcagtgatcaatttgtttgacctgagtaccgggatgaccagcaaaaatgtgctaactgatagaactcacagagatggctctcgagttcataaaagccggcaagatgtcaatagaactgttgatcccaaaataggttgtgtagaggacaaattacaggtagtagctagtactaggaattcttcaagcaacaaatcaaccatatctccaatgaacagattagtagcaatggagatgtccaaaggagtggaatcaaagaggaagccacctagtgtcgttgccagactaatggggcttgatgatgatctacctgctaaagaaccagcattacaatcttctagaagaaatttgcggagaagtcattcacttgataatttggcagcaacaaacaggccccaacaacagcaagagcagcattacagcaggacaacaccaaacatacacataggccccaaagagacagttgaatttaaggatgtgtacgaagtctctgaagatccattaaagagacatcatattctggggcaaaattttccttgggaaagatcttctgggaacaagagtgacactaggatcgaagctgttcgacagaagttcatggaagcaaaacgccttgccacaaatgagaatctcatccattcaaagcagtttcaagaagctcttgaggttctaagttcaaacagggagttgtttctgaagtttcttgaagaaccaagccctgctttcttgaagcagctcgatggacttgacacaacgcctgcaccgcctccgacgaagcgtattacagtgttgaagccaatcaaatctgttgagaacaatggaataagagaaaccagaacacaccaagttattaatgaagaaaatgaacttgtgatgggaaagactcaccagagatcttactcagcagatgacaacttctccaagtcaactaggatagtggtcctaaagcctagccctgggaagcctaatagaacaggagccaggctaactgcccgagcagctccatctgaacaaactcggcggatcgacttccatggaggtttacaagatgatgcatccatcctaggatctagggaattactgcatggttcggttcagcacatgccagagagtcgtcatcggcgggacgaatccctgatatcatccacatattcaaatgggtatggtggagatgaaagctctttcagtgggtcagaagttgactacattgatgaaggaggtagcccaagtgactcagatgcagtcagtccaatgtcgcgacattcatgggattacatcagaagacacaacagtcctcactcagcctctacttttagcagggcccattcacattcacctgagtcatctgtgatcagggaagccaaaaaacggctttcagagagatgggcaatggtatcatacaatgagatcaatcaagaacaagtacctttgcgaaggagctcaaccaccttgggtgagatgctctcccttcaagtagctaagaaagaagaagctgttgctgggataatttctgtttcaagcaaccggtcaagtggcacagaaaatgagttggccatgaaagatgcatgcaaatctactttaagagagtacgatgaaaatgggaagagctctccaaggaatttagcaaaatcaaaatctgtcccagtgtcttcatctatatttgacaacgtagcagtgaatgctcaatctgcaaattctgaagggactccgaaggtgtttacaaagtcaggtagagcaaaattatctttcacggggaaaatatcaagttttttcttcccaggcaataaaaggccaacaaaagagaaaacttccctctcatctgatagctcaggcgagatatttggatgtatcgggcacatggtgccgcagtctgatcacaatcttggtcctgatgaacaaatggctttttgcaaggatgaagctgataattccaccaatcatgctccctgttctacaaaagatgctggttccatagaagtacctgtatcttctgactgtgtaagtggagatgttgatgaagtaaaatcaaatggtgatctaaaatctatccacgatgagactagtcctacttcaattcttgacacggtttttgaagatagcaacagtaatgaacctgaatcttcaagaagaacttcctgcaccgagagggttgccttacgatgccctgctatcgattctgttgcccgctcattttcatgggaagataccaactcaggttctccgttgctaggtggcctaaagcattccaatgtagatgatgccgattatgatgatggtgaactaaaatgttactctcttgtacaagagatagtatcatctgctggattatgccatctgcagttaagtatggtcttcacagggtggtacctgcctgaatccccccttgatcctgcattgtgtgacaagttcttggatcgcaaggaggaggatgctaaatcgagggagcgaaggtcacaccaaaagctcattttcgattgtgtaaatatggccttggttgagattggccaggatacgttactatgcagctatccatggagtagagcatgcttaagaacatggagggagaaactatctgaaaccttgggtgaagaagtatggaacatcgtgagcgattggctttatggagatgggagctttgcggcaaacaaggacgacaatgctggaataatcttggaaagaattatgcaggaggaggtggaagggaagggttggattaagctattgacaatggaaacagatgagatcactgagcagattgccagtgaagtgttggaggacattgtcacagattctgtggagcatctgtcaatttgttgttcagagcatggcatttctatgccagtagcaaatctgtaggaagcaatttctttcatatgagcacttgccttgaattttgttgtgctgaaagaattcctcagcagcttcatagattgtatataagtccatgtagttgcttactcttgcttctgcttatacctacagctcagattggccaaaatcgtgcagttctttactctgtagatgtcctactggtcaaattgggttagtcagaagtctaacaatagcatatggtgtcagtagtattgtagctttttgggaagcgaaatactaacttttagtggccgtgtgtgtttgactttgaggtgcagcagaacactgctccatatgaccatatgctgcaaagagtattatataatgcattccggcgccagttggc

SEQ ID NO: 20548 - DNA, 1433 bp, Oryza sativa
  ref <308>: DATABASE ACCESSION NUMBER: AK070864
  ref <309>: DATABASE ENTRY DATE: 2001-12-06
gtgtccacgggttcaaaaggcctagaagaacgaagcggagcttagctcgcgcatgtgccaacctgaacctccgctgcgaaacgccgcgacatctcgccgcgcgagctaagcttagctgcaggtgagccatcggcgatggcgacggcggcgatgaccaaggtgttcgtcctgctctttctggtggcggcgtgctacctgccggcgcacgcggcggcagcggagtgcgactgcgcgacggacacggcggggcgggacaaggcgcaggcgctgcggctcaaggtcatcgccatcttctgcatcctcgccgggagcaccgtcggggcggcgctgccgtcactgggcggcaggttcccggcgatccagccggagacggacgtgttcctctccgtcaaggccttcgccggcggcgtcatcctcgccacgggcctggtgcacatcctccccgcggccttcgaggcgctcagctcgccgtgcctcgtcggcggcccgtggaagcgcttcccgttcgccggcatggtcgccatggtctccgccatcggcacgctcatcgtcgacaccgtcgccacggggtacttccaccgcacggacgccaagaggaaggccgcggccgtcgccgacgagccagccgacgacctggaggcctccgacgagcacagccacggccacgcccacggcatgtccgtcatgtccgtcgctcccgccggcgaggaagacctcgtccgccaccgcgtcatctctcaggtgctggagctgggagtggtggtgcactcgctcatcatcgggatgtcgctgggcgcctccgacttcccgagcacggtgcggccgctcgtgccggcgctgacgtttcatcagttcttcgagggcatcgggctcggcggatgcatcgttcaggcaaagttccgtgtcaggtcagtggtgacgatggcgctcttcttctccctgacgacgccggccggcatcgtcgtcgggatcgggatctcctccgtctacgacgcgaacagcccaacggcgctggtggtgcaggggctcctcgaggcggcggcagcggggatactcgtctacatggcgctcgtcgacatcctcgccgaggacttcatgaagaccaaggtgcagagaaggggacgcctgcagctcgccatgaacgtcgcgttgctgctcggcgcagggctcatgtccatgatcgccatctgggcgtgatgagtgagtgaccatcacggccagcatgcgacgtgcggcgtttcaatttgttcggcaggaatggcaggtttttgttcttaggcgcgtctgatcacgctcgcgctctcgcgaagacctgagaattcgttcgaggatctcaaaagagagaccactccgttggttgaaactgacgaggagaggggtctcccgtgcacgatatgtagaacagttcagtgaccatgttactctgacttgac

SEQ ID NO: 20549 - DNA, 1589 bp, Oryza sativa
  ref <308>: DATABASE ACCESSION NUMBER: AK070865
  ref <309>: DATABASE ENTRY DATE: 2001-12-06
gtttttcttcgacaaaactgccgcctgccctccaccccaccggtggccgcgccttcctaccaccggcaccatcgggcacacctcccttcccctggtggctgcgcctccctaccgccgccgcgggcgtcgtcgcctgcccctcaaattccgccggtggctacgcctctctactgccggcgccggcgccgttgcctgccctccaaccagtccgcgcctcaccgccgccagcgctagggctccaccccgcacgtgccttccccaccgccagtgccctgaggtgcagccgggaagaagcatccgatgcaggaattaagagcacaagacaacgagatgatggaaagcaacactgtctactagatgcagtttgttaacagtgagtatttctttggtgaatttagtttgcactgaagaactgcacatgcaaaggagggattattgtcatgtgtcaagccatccaactagctaacaacgacagcacattttggtacctctttttggcttgctgcttggcagctacatttcgatttgttaaaacaaattcagctacatttggcaggtaactccaaaatattctgattagggagaaaaagatagctaatgcagttacttgtcaacataccctcatgttactttatgaaatgcaagtgccatggaaaggttatattcgaagttatagccatgtatgtgcgttgtattttctcacatttatcttactttcatctgatatacataagcactatatgttcctccacttatctgtttactatctctttcaaccagtttttcactagcaaagttctttgcaagtaattgctttgtaatctgtattgtgcgttgttatgtaagaaaggataagtggatgagaatacagttgtatatagcataaacacaagtatcggggatttgatggatatactgtttagatcatgaacatttaagttttgaacaggtttatttacaatagccgacatatagtcccttaatgtattatgaaacccacaaggagtttaattatgaaataagcatcataagtttatatcatatttttactaccactattaatatggtttgtgcataataaaaatgttctcttgcaatatgacgagtttgatttatattagttggagaggatatatctggtttaattgatattggcttatacgtgccttgcacgtgcacgatcactagtatccgaaagggagcgactttaaaatggaatgtcaaacgaatgtaattgatcgagtttcaataaagcttccattatataaaaaaaaacaaatgcttgatccttttacttttcatatctcagacaggaattttcatcctagagctggctggctccagtgttcgatatgaacctgagcagagttcaatcccattttaacaaaaaagttgacaacgccattgaccaggggatcatccgccaagcatttgactttaacacttgtaaggtgctcacatgtaaatgatctttcttcaagctcgccaatcattctttgtgatgtttttccccaacgatgctatatataccaagaaaaacaggtaagctatattctcctgatgacatgtgtgcttgctaaaaatctttc

SEQ ID NO: 20550 - DNA, 759 bp, Oryza sativa
  ref <308>: DATABASE ACCESSION NUMBER: AK070866
  ref <309>: DATABASE ENTRY DATE: 2001-12-06
ggatgggcgtggggatggcgcgatgggcggagcctgggtgatgcgagggtgcgacgatctgggtgccgtcggacccgagatggaggagtcaccgctgggtcctggcgtcgggtcttcaggtgaccgtcggcagcacctgagagacggcgatgaaggcggtcagggaccggcgactgcggcctcctcgctgcccccagtgaccgtcgagccgccacatgcggcctcctcgccgctacagcccccacgccaatgccttcggaccctgcgccacagccagcaacctccacgccgctgcccccacgactgccgcgccgccaccatggaccgccgccgccgatagagccgcctggatcgggtctagacattttccccatttcatctttatctttttcctttttaccgtgaatgctagggtatattttggactgagggcaatttggtcattcttaaattgtaacggtgtgaaatcaacggtagattgacgacgatggtatttctgggagaaaaatgcttatacgatggcatttttaagatgttgcttttgtcgatggtatttttgggattggaatgcctgtcgatagcatttcatggattttctcaatttatattgttgtgatcgatcttccgcttcggtctctgtttcggcttaactgcttgagcgttcgctgtggaaataagcagtgcgggttaattactttggtatgtggcgaaaatgtaactttactgtgtagattttgctggaataaacatatattgacg

SEQ ID NO: 20551 - DNA, 1308 bp, Oryza sativa
  ref <308>: DATABASE ACCESSION NUMBER: AK070867
  ref <309>: DATABASE ENTRY DATE: 2001-12-06
gtctcttatctgtccatgggaatcgaaaaaattttcaatactgtgtttcaatcatttttagtgcacgtttgcttatgctgaagttctatatataacgaacatgtgcttcaggtaatggcagtccatgtgtgtttgatttgctcaagtgtggtaggtgcagggagaagactgagaggcgagctgcgcagcagagccatgtcaagttccacgaattcgacggttttggcggaatcggtagcgactgggagctcagtggatgttgagcttctaccctttgtgaatgacaaacatggtggtgtgatcgttgagatgacggccccgatggatccccaattgttttcagcttccttgaaagcatcattgtcaaaatggagggaacagggaataagaggtgtctggataaaattgcccatcagccttgccaaccttattcaatatgcagtggaggaagggttctggtaccaccatgcagaggaaacttacttaatgcttgcatactggcttccagctacaacacatacattacctgtaaatgctactcaccgtgtgggtgttggagcatttgtaatgaatgacaaaagagaggtattggctgtccaagaaaagagtggtgtacttcgaggcctaggtgtatggaaatttccaactggagttgttgaaccaggagaagatataaacttaggagctgtaagagaagtaaaagaagagactgggattgatacagaatttgttgaagttcttgccttcaggcagagccacaaagctttttttgataaatcggatctgttttttgtttgcatattacggccactttcctttgatattaccaagcaagattcagaaatcgaggcagctcagtggatgcctgtggaggaatttgctgctcaaccatttgtccagaaacatgagctagtgaagtacattcttgaagtgggtttggcgaaggttgacaaggactatgcaggattttcgccaatcctcataaaatccgcattcacggacaaaaaatcgttcttttacatgaacaggagggacctggacaaggcctcagaatccagtagtacacagaaaaagactgaaaaacctttgttcatggaaaaactgtagctttcatactggatctttttttccatcactggtagcttctacacctgattttgaccgaatgttgccgctccaccagtcctgtaattcagaaaaaggagcagcagttcagaaatacagctgaatttgttgtacctatgaatttgtattgaatatttataggcttacaaataatgaaaaacatttgttggacacttggacttc

SEQ ID NO: 20552 - DNA, 845 bp, Oryza sativa
  ref <308>: DATABASE ACCESSION NUMBER: AK099155
  ref <309>: DATABASE ENTRY DATE: 2002-08-28
ggaggagggatcgaggaattggagtaaatataggagcttaggaaccgaccgcccagggatcttgcagcggaatcgtccatggcggcggcgcttcgatttgcggcgaggaaggtcagcggtcgcgcccttcaacaggcgacggctttcgtaccgccgtcgccggcggttagagaggaacaacggcggttgttgccgaggcttatccccggcgccggcggccggatgccgctcctccgctcattcagctccgccggagctgctccaaacaataaaaagcatgatcatttgcctcaatcaaaacatatcgtggatgtggaactggagctgtctcgtatccctgcgagcattaggccacaagtcaagacctggtatgaccggcattttcctcacgcagaacctactgtgaacggggagtctggtatcagcaacaaagaacctgctagccttagggcacaagtcgaggagaagaaaatcgagctgttccatctgctatcgcagctgaaatatagtggtgagaactccaacctggaggacgaaaggatactcaggcagcttccgccataccgtgaacttaagcacctagttaatggttacggaataaagctagtcgtgaaacggattgcaatagcttctgttctgagcgccattttcataacggcgatggtgaagatgtgaatccacaaagtttggtagctggaagcaggatgacgctgcaattatcaattcgtataagtctttctagggactcaagtgctagtgttgattcattttgctgtacgctaatttgcctgctactgtgtgagactgaagttttcaaatactgagtggtaactttttaaattccg

SEQ ID NO: 20553 - DNA, 693 bp, Oryza sativa
  ref <308>: DATABASE ACCESSION NUMBER: AK070868
  ref <309>: DATABASE ENTRY DATE: 2001-12-06
gacttccccattatttttccttacgctctccgcctctccgccaaacacgcccaaaatcgtcctgctcctcctccgctccatctactggatccgcgcgaccggcgatctcccccgaacctcgactgatctactgcctttgaccgatggcatcgcctgcagcgccaacagcaacggagttcactcaggaagctgctcgtcagtctctcattgagatctctcagtccctcccggagaaaccttcagcccagaacctggaggtgaagtcaccgagcccacgtgcagcaaacgaagatcatgaagatggagcagagaaatacagatcaaagctgatctcaatctcctacctttctccggatgcccaaccgacgccgtgccctcccaagaatgtcctcacttaactgtgacgatgctcctactcgtgcgtgtgtggcacagtatatcagtgttatacctcacttttagctggaaagatggaaatggaatacttttgggtgcttatgtttctaaccctaagaaacattcagggggaaaaaaaagaacagatagttgtacagatgactttgtgacgaagaactatttaccaggaacaggcttgcttaatccttgcatgttattttgttgttgcataagcttagttgtttccttataatgtatggttattcgaagtgctacattttgccctctttcagagtg

SEQ ID NO: 20554 - DNA, 876 bp, Oryza sativa
  ref <308>: DATABASE ACCESSION NUMBER: AK070869
  ref <309>: DATABASE ENTRY DATE: 2001-12-06
gggtagtttttggaagaagggtttcattgcaattttgcgatccccacctctctctctctcgtctatcgctctcatggccgagccgccgtcgcagtcgccggcgcagacgccgccgcaggcggcgcagcagcagcagcaggggcccggggagagcgcgcgcgacgacatgatggcctgcgtggcggcgctggaggcggcgctgctgccctgcctccccgcgcgcgagctccaggccgtcgaccgctccctccaatcctcccaccagattgatgttgagaggcacgcgagggatttcatggaggctgcgaagaagctccagtcttacttcatcagcctgcagcgcgaggaccgaccgtcgacagaagaaatgcttcgaaaggatattgctataatggaggaagagctgaagaccaagtccgagctcatcgacaaacataagaagctcatcgaagggtggcagaaagagctgaaggaccagctgggaaagcatgttactgaactcgaaagagtgtgacaccactgtcttccatgaaatgtcccaggctccttccgatgatcaacctgagtagccagtgctgggctatgccttggagattttgagtacgccagccaggaaaaaaaaaacaccacaacaatgttttaggatctgaccagtttgccgaagacgaacaaattgcgctgtattaatgttcgttgctatgttcggtttatcataatattattgttcgtagtttctcgtgtgctctccatctcatcgtgttaggcatgcctaacatgttaaacttttagatttttcggagcaacatctttttcccgattataggagtgtatgataacatgtgtgttcaatggaattgtctaattgcctcacttgcc

SEQ ID NO: 20555 - DNA, 3589 bp, Oryza sativa
  ref <308>: DATABASE ACCESSION NUMBER: AK070870
  ref <309>: DATABASE ENTRY DATE: 2001-12-06
gactcaaagcagagagaggagaaaaaacacaaaaggcagcgaagcggccgcgaaaagctcgactcggagataaaagggaaagcgagcgagaaagagagaggagaagcattggtggcgtgaggcggttggagcggggcacgcgcgcggccgaaggggggagaggagagaggaggcggggtggcgccgacgccggcggcaaaggttggttgtcctagggttcctgtcgttgctcgcgggaagggtcagcgaagcaaaatggctacagagagtgctcggccgttgagtggaggaactggagcagggaagtggccaccaagcaaggacacgggttcctatgattctattccagctagcctttcagaagatgagttagcggagttggccttcatgccaaatagtggcggcatttttgggaagtggaggggttctgtcctggaacgcagtggaagcgctcctcctaccatggaaggttctttagttgcacttggtcacctcacaggtcaaccgagtggcaaccttggggccatactgccaaacttgggcactgaagctaacaattcagagtctaaggagaatatatattatgattcggcatgcgtcaaatactatatgtccaaggtgaatttgaacccaaggtttcctccaccactcgtttcaaggaaccagtttggcaagtctgaagaacgaaagccgttctcccttgatgacagcagcagcaggtccttacttcttggtcatcctactctgccaacacacaaggaagaacctgaggacgaaaagtcaccaagtttggattcaagttcagcagacgatgctcaatgtgattctgcccaaagcacatctaacttagggggccacagtccaaatcttgtagattcaattaaggaaaactttcatcggagcaatggtttgtatgataattcttccgatcttttaaatgcaaactctggtgatggagggtcgatttattctggcattagttcattgaagaattcctcactttatgttgtccagtcatcagacttgaatggatttccaccagatgctcatcagcgttcccctagacctattaggactccagtcagtacaaaacttactagcgacagtctgccagcttcatctcctcccacttcatcctgttctgactacagtactattactgaagcttgtcagcaaagaaatccaagcatggccgttaaacctggtgaaccagttggtaccatgcttgatagttcagacttcagtctgaagaatttgaatattagtccggatatcctaagtagttcatatgtcatgcaacagtggcagaaaaatgccccagtgtggaatggcctatcaaatgtagtccatggcgatcatgtgccaatgattcctccaggaattaatcttcctcaagttccatttgtggacaattccggttttggtcatatgaagttccctggtgatgttcaactgatgtcccagatcgggatggcaacacctttttgtacaccaaattcttttgggataccatgttatcctaatttgcagtcgcctagtgtttgggttcctccattcggaatcggcggctatggtttgcctggtccatttgtcccacctgttataactaacttcactcctcaacttcctggttttccttcagcagtaaatcttgctgcagcaactgacttatttcacccatataagatgtatgagcatcttggggtacctatgccatcccctgttcctgatcagagccttacgcattattttcaacagccccctatccatccgtatggtgttggaaatccgtatgatacaatggtttcaagtaataattttgtagggaatcctgctggcgtttttggttcaccaatcattgacccatcagagcagaagtttcagataccggttactactgtagctgctaatgcctctactcccatcaaaggtggaaagcccattgggaattatgagactgcctcaccttactttggcgtaccgatgccttatccagcaggtccaacattacatgggcaacctgcttctggaacatctcctcgtgacaaaaggaacgatgtcaagggattccaaccccctcgaaaaaatatgcctgttagttccgagatacaaggtcagaaagggagggagaagtttgatgatcccaaggcacacttttctgttgaagaactaatatccagcagaactcatagggttgagctggctgacatcaaaggacagatagtgaaatacagctcggaccaaaatggtagccggttcattcagcagaaactggagaattgcaccattgaagaaaaggatttactttttgccgaggtccttcctcatgctttggaattgatgactgatgtattcggaaattatgttattcagaagttcttcgaaaaggggagcccacagcaaaagagagaaatagctaataagcttgccggtcatgtgttttctttgagccttcagatgtatggatgcagagtaattcagaaggcccttgaagtaattgatcttgaacagaaaattgttcttgttggtgaactcgatggacatgtgctgcgatgtgttcatgaccaaaatgggaatcatgttatacaaaaatgcattgaatgtattccattggaacatattggttttctggtgtcatcttttcagtgccaggttgccaaactgtcaatgcatacatatggatgtcgtgttattcagagaatcctcgagcgttgcagcaataattctgaatgcctttgcataattgatgaaatcttgcagtctgcttgcatcctcgcacaagatcagtatgggaactatgttgtgcagcatgttttggagaaagggaatgaacatgaaaggggccaaatcatcactaaattggctgggcaggtagtgcccatgagccaaaacaaatttgcgtctaatgtcatagagaggtgttttgaacatgggggcagtgcagagcgggaacttttggtcaaggagattctgaagcaaactgagggcaataactatttgctggtgataatgaaggaccagtatgctaattatgtggtacagaagatgcttacaacatgcaatgaacaacataaggagatccttctcagtcgtgtgaaaatccatttgccattattgaagaaatacacctatgccaagcacatcgtcagcctagtcgagcgcctctgcggtgacggagctgtgcagtccgaatccaaaaaaactgtaaccaagggctgctgaattcgccacaggaaagccgactcttttctgccaaccctgtcaagttcagcgtagaaggcctatcagtcgcaaaagtggctaacaaagcaaccaaaaaaaaaaactgtcaacctgtcaccatagatcatcatcatacagatatagtcgttccaagcggtttgtccgtgtatttaagctaggaaatgatagtgtcatactataggaatggtaataatcatctgtgtgggctgtggctgtggatgctgcgtctcacagaagagagtctgagtgtggtggtgcgttgccgtacagtacatatcccgtagtcttgagtcttgtacccctgcttggtgatgtgtagttatcgccgcatccagcttgcttggtc

SEQ ID NO: 20556 - DNA, 1122 bp, Oryza sativa
  ref <308>: DATABASE ACCESSION NUMBER: AK070871
  ref <309>: DATABASE ENTRY DATE: 2001-12-06
gcgctgcagctgttcgatcgtgattggaaaaagattgaagcatacgttggctcaaaaactgtgatacagataaggagccatgcacaaaaatactttttgaaggttcagaaaaatggtacaggtgaacatctgcctccacccaggccaaagcggaaggcagctcatccatatccacagaaggcctctaaaaatgcttgtgcagtttcgccagctgctatatcacaaccccctcctctgggggagcaaggttgtgttatgtccatggatacatctcctgtcatcagaaatacaaatgccagtgctgtagtaccctcctgggacaattctattgctcaacctttaagtgcaagtcgcacgcaaggtacaggtgctgttgctacaaataactgctctagtagcatagagagtccttctactacttggccaacttctgaagcagttgaacaagaaaatatgcttcgaccactacgtgctatgccagattttgcacaagtatacagctttctgggaagcatatttgatccagatactagtgggcatttgcagactttaaaggcgatggatccaattgatgttgaaacggtactactgctgatgagaaatctgtccatgaacttaactagccccaactttgcggcacatctgagcttgctgtcatcatgtaattctggtggggacccaattaagtctgaaggcatggaaaatcttggatctccacagagttgccatctcccgttcatggtaacaagtgagtgagggagaactgcttgtatgcggacgaagcttcagttgtttccacaagacgttcttgtgttctctttgtactggagttgtggacggctgatccggcagtttaccaacgctagcacgtgttgtggccgtggcatctgtatagcttccaataatgctctaaccctaggctagttttgctcatcaatcatgttcatgtagatagccagttttgtgtgctcagcaattctttttccctcggggtggggcatggctcgaaatgtttttgtatgtgtacatctttgtatacatgtatgtaaatatgtgtgatcatgtaatgcttaaagatactgttgactgatttgaggtaataatacaataaaccagtggggc

SEQ ID NO: 20557 - DNA, 488 bp, Oryza sativa
  ref <308>: DATABASE ACCESSION NUMBER: AK070872
  ref <309>: DATABASE ENTRY DATE: 2001-12-06
tgagttccagccatttcgtcagtgagggagagagagaggtctgagaagaggagagagagccttctgcctgacaagaaattctgagaagagggagaatggcgtcggcgacgttcctggaggtgctcctagccatcttcctgccgccggtcggcgtcttcctgcgctacggcttgggtattgagttctggatcgatctcttgctgaccatactgggatacatcccggggatcatctacgcggtgtatgtgctggtggcctgatcgaaagagttcgagcagagccagcgtcgggtgatcgagcgatcgtgcaacggtgcaatagcaactgatgctgtgctgtggtgttaagagtacatttgtatgtgtgaaaatgtgatttatgcgatgagattagggtcttgacgtcttgtgatgagagtctttatgctattttagagactgtaattgggtgtcatgttgcttgtttctcttatctaagatacttttttg

SEQ ID NO: 20558 - DNA, 1867 bp, Oryza sativa
  ref <308>: DATABASE ACCESSION NUMBER: AK070873
  ref <309>: DATABASE ENTRY DATE: 2001-12-06
gcgcacagacacacagccaaactcatcctccttttttttttttcttccatcccctcccttgagagagattgagattgaggctgccaccgcccgcgcgcatcgatcgattctactggagtggagatcgagcgaggatatatagatctggactggactggagctccgatcaacatactactactactcgtatataataagccaaggaaggctaatggcgtcgatccggcggccgcactcaccggcaaagcagcagcaccttctccgccacggacacctcggccccttcgcctcttcctccccgccatcctcgccgctccgccactcctcgtcttcgtcttctcccagatcagcggctcatcaccaccaccatctgcttgctgctgctgggcacacctccttccgccgcccgctccctcgcttcgccgccttcttcctcctcggctccttcctcggcctcctccacttcctctcccatctcccccgacccctgggccccatccccaatcctaattcccaccaccgccaccgcgatccattccccatcctccaacacccgcacccgccatccaccccccacagcaaccacaagctgctcatcgtcgtcacccccacgcgcgcccgcccctcccaggcctactacctcaccaggatggcccacaccctccgcctcctccacgactcacccctcctctggatcgtcgtccaggccggtaaccccaccccggaagccgccgccgccctccgccgcaccgccgtcttgcaccgctatgtcggatgctgccacaacatcaatgcctccgcccctgacttccgcccccaccagatcaacgccgccctcgacatcgtcgacaaccaccgcctcgacggcgtcctctacttcgccgacgaggagggcgtctactccctccacctcttccaccacctccgccaaatcaggaggtttgccacatggcctgttccagaaatctctcaacacacaaacgaggtggttctccaaggccctgtatgtaaacagggccaggttgtgggatggcacacaacccacgacgggaacaagctgcgcagatttcatcttgccatgtccggtttcgcattcaacagcaccatgctctgggatcccaagctcaggtcccatttggcatggaattcgatcaggcatccagaaatggtgaaagaaagtctccaaggaagcgcgtttgtagagcagctagtggaggatgaaagccagatggaaggcatacctgctgactgctctcaataatgaactggcatgtgccattcggatctgaaagtgttgtctatcctaaaggatggcgggttgctacagatctggatgtaattatccctctaaaatagtatcaccagctatgttcaccaaagtgctaactcctttgacaggcatatactgtagaaattaggccttggcaagtgtgcagagacatttatactttggagagcatctctcggaaagggaagacttcttcagctgttgcttcataattttgtaggattcataattgcttggacggcctctatccaaatccaatccaaaaaccttctctttgccgtgtatatgttcatgttgtagcaatttgtattcatttttttgggttcaaaagccaaacggcaatacatgtttcaggatatttaatttaatagcattctttcttctggcctgtgcagattactgcctaaatggacctttccaaaatttggcattaccaaaattttggcaagctgacagcattgtctcgtttattcgtggaataagtcaggttgaaaatttaaattttgactgataagcataagtgaaaagatgaggcccggtaggctaaatgtgatgttgccaaattttttacacatgatc

SEQ ID NO: 20559 - DNA, 1755 bp, Oryza sativa
  ref <308>: DATABASE ACCESSION NUMBER: AK070874
  ref <309>: DATABASE ENTRY DATE: 2001-12-06
gtctctcctccgctgagccgcaacggcctccctctccgctgctccccccatcggcggcgtcgctttcccaccggcaacccttcccctccccagaagagaagagaagagaagagaagaggtgggatctggattgtggagaggatggtgaagacagtggtcggcgaggaggcgcagctcaaggcattggaggaaaccctctccgcctccgcctctccagctcaggtggggctcgtcgtcggcaagctcagcgcctcttccgaccgtgcccttgcctactccctcatccccacgccgcccaccgattccggcgctcccgcttgctccctcctccgcgcggcccccaaccccaaggccgccaaagctgcctcttccgacgcctcctcgtcgctcgacttcgatgtcgactgggtcgccgagcacgcgcgccaggtctcgaggatgcttcttggaggaatgaccgtcataggtatttacatatgggcgtcagaagcttcgttcaaagcgacttcccctgctgttttatcacaggttcttagagctgtttctcaggttgctcctttgtatggcactggtgttgatgagagactgctcattcatatttcttacagcccaagaaggtgggcctgtcgtatatgtgatatgagctcaggacgtttaaggccatgtgacttcaagtatactaaactattagcttctcttcaaactttcagatgcacatataattttgagataagactgccagttgttcaagctgagccttttaagaaggttatttcaaaggcaatcagtcatctcacgaagcaagtgcagaatgccaaagctttgattgatggagtcctgtttttggatgacatggacaacactttggaggggccacataacgttgaatttcttgtgcctttcaagaacaatttgccggctgaagtttagagggtgttgctgggctacttctctttgctggatctgtcagcgccttggcatacttgggcccaaaagagtccattgcagaagttatatctgatctaaagttggacatcatcacaagcctgagaagcagattggatatcatactagatgaggcagatgatgactctactactaacaatttggagaattcactgtctcagaaggccacccaagttgtttttcatgagttgagagtaccttacagtttcccattccctagaagaattctgataccttggttggctggctcctatatttgtgactacttgcaacaatcagaaacaacggaggatgccatggagcgctgcaaggaagtgatgtcgcttgaagcagatatgggaaactattcaatcgtagaaccagaaagtgcatcggctgccacgctaggatcgttttgggatgtggtacctggagctttgtcaaaagcgccttcagagcctggtctgaaagagatgaactctggacagaatggttcgaggaagacgcatggcagcagtttcagcattctaatggcgtttgtagtactactgattgccgtgttggttggatgcatattcacattgtctgccaccttgaagacctgatcatgtaaaatcgaccgagatggcatattttctgttttgtccagaaagaattaactcctggtgaatgatgaagaaaatagatcgctaaaaatctgatattcttgtggggtgttctacaattatctatcttgtgtgacagctgtgggtgaaatctaattaatgcccataactagctattaacagttgaaaccgttgcatttttcgg

SEQ ID NO: 20560 - DNA, 1898 bp, Oryza sativa
  ref <308>: DATABASE ACCESSION NUMBER: AK070875
  ref <309>: DATABASE ENTRY DATE: 2001-12-06
ggcacgatactggacccctcgtgatggacacccgcctccccctcctcctcctcctcgccggcgtcgtcgccgccgcggcgccactgctcgccaccgcccagctctccgccgacttctactcctccacctgccccaacgtcgagaaggtcgtctccaccgtcatcgagcgcaagttcaaggaggaccctaccacctccgccctcctcctccgcctcctcttccacgactgcttcgccaatggatgcgacgcgtcgatcttgatcgacccgctgtcgaaccagagcgcggagaaggaggcggggccgaacatctcggtgaagggctacgacatcatcgacgagatcaagacggagctggagaaggagtgcccgcaggtggtgtcgtgcgcggacatcgtggcgctcagcacgcgcgacagcgtgcgcctcgccgggggccccaactacgacgtgcccaccggccgccgcgactcgctcgtctccaaccgcgaggaaggcgactcgctccccggcccggacatcgccgtcccgaagctcatggcgcagttctccgagaaggggttcagcgccgacgagatggtcgtcctcctcgccggcggccactccatcggcaaggccaagtgcttcttcatcgaggtcgacgcggcgcccatcgacccgacctaccgctccaacatcaccgccttctgcgacggcaaggacggcgacaagggagccgtcccccttgatcccatcacccccgacgtcgtcgaccccaactacttcgaactcgtcatggacaagaagatgccgctcaccatcgaccgcctcatggggatggacgcaagaacgaagcccatcgtggagtccatgggtaaaaagaccgaccagttcgacgccaccttcggcaaggccatgacgaagctcagcggcatgaaggtcatcaccggcaaggacggcgagatcaggaaatcgtgctccgagttcaacaacccggtgaacaccgacgacggcccgtccgtcatccggatcagctcgctgaaccccgaggagatgatgggctcctttgcgccggccaccgggaagtccccctccgccgcctcggagtccaggaaggtggcaccaggcggcgccatggaggaaaggatggcggccggtgaggcgaagacggatgcttcaggcggcgccatggcggaaaggttggcggccggtgaggcgaagacggctgctgcggcctccgaggatgaaaaccaagcggcagctggtggcgccgccggcgatgaggcggcggcggaggaggaggggaccaagtccaacaagaagaaggccgagcgggtgaccgcagaagtacctgccgacgaggcggcgccggcggcaaagaagccgagggcgatgggcggacaatcgttcagcatggccggcgccggcgccggcggcgagccggcgaagaagtcgacggcgatgaagagccaatccttcagcatggcgggccagccgcaacagtagacgaagaagaagaagaagaagaagaagaagaagaagatgccgcgctgctagctgagccgttcgcacggcggcctgatcgagcgcgcattgccatttatcgtttttgattttctcactctctatctcgcctgtttgtagaagggacgagcatactactaccgctaattactaggcttaattttgcaagtaatgtcgtgtcgagttttttttaacagcgaccaaaagctcgatgatattttctcttttcattttcccttttttttttgtcattcttgttaagaattcgttgccaactcaatctggctggcaaataaaagtgtattaaatttcccctttttatatagagagacaggtacacaattgtaattgtttttttagatcaaccaatgcatgtgaaacgatatacgtgctact

SEQ ID NO: 20561 - DNA, 2875 bp, Oryza sativa
  ref <308>: DATABASE ACCESSION NUMBER: AK070876
  ref <309>: DATABASE ENTRY DATE: 2001-12-06
gactcccgctcctccatcgtcgtcgccgcgagtttgctcctctcggcggcgccctcctcgtcgtccccgcgcgctcgtgccgctgctccggccagcgggtactccccgtggcgaggcagcattagtagaatatcatcgcacccaacagctatggctaccacacaagcctcagaagcagccactgagaaaggattgcctttggggatggatgtctccatggtggatgaatatgcttcccagtccaagctgctgcaggaattcgttaaaattcccactattggcaacgcttggatcttcaattccaagactgaaaacacatctagggcgatagtttctgttggccaaacagatctgttggcaaacaaaaagaggagcttcctattaaattcccacatctcaaaaaattcctcaaattctgtggatttccagtggtctcccttcccaatcgaaatgagtggagtttcagcagtaattccatcgccatctgggagaaaacttttactaatacggaattctgaggatgattcccctacaaaactagaagtttggggcccctgtcagttggagaacgagattcacattgcacaatctgttcatggatcactctatgtcgacgaatggtttgaagggatatcgtggaatcaagaagagactttagtagcttacgttgctgaggagcctcctcaaccgaagccagaattcaatgattcaggatacaagaaggctggctcgtctgaaaaagactgcaagagctggaagggaaaaggggattgggaagaaacttggggagaaacgtattccaagaaaaggatacctgcattgttcgtggtcaacatttcaagcggtgaagtgcgagctgtgaagggcataccgagaacattaagtgttggccaagtgatttgggctccatcatcatcacatagcctggtttttgtggcgtggtcatctgataatggttaccaaaagacaccaaggaaacttggaattaaatactgctttaacagaccttgtgctctgtatgctgttcctgatcctttcatggaagaagctgataagccatcacttaatgtcagtaagggtgaaactgcacctacaaccaagttaacatcagagttgagcagtgcttttttcccacgattcagtccagatggaaagtatcttgtgtttatctcagcaaagagtgctatagatagtggaacacacaatgcgacaaattcaatgcataagattgactggcctgcagatgggaaattggagggcctcagtgttgctgatgtggtacctattgtgatgtgccctcaggatggttgttttcctggtctgtactgctctggcatacttaggaatccatggcttactgatggacaaactatgattttatcttctatttggggaagtaaggaagtaatactttctgtaaatgttgtgagccgtgaagtttcaagagttagtcctcaggattcggattattcatggaatgttcttgcactagacaaggataatattcttgcagtttcaagcagccttattacagttcctcaaatatactatgggtctgaggtttgtcagactggaaaaccaaaccaatgggagtggcaagaaattgcaactccttttctccgagtccttctgataagatcagtgcaatattagcagaccataagttcagtatactcaaaatcccgattagcaactcttctaacaaactcgctgatggtgctaagctgccctttgaggctatttttgtgtcctggaaggattctgcaacaagaccaacaattgttgttcttcatggtggaccacacactgtttacccatcaagctattcaaaatcgttagcatttctttattcacagggatataaccttcttgttgtgaactatagaggttcactaggctttggtgaagaagcactacaatctcttcctggaaatattggttctcaggatgtgaatgatgtattgacggctttggactttgttataaagaaaggattaatagatgcatctaaagtagctgttgttggaggttcacacggtggtttcctgacaactcatttgattggccaggctccaggcacttttgttgcagcagctgctcgaaacccagtatgtaatttatcattgatggtaggaacaactgacatacctgagtggtgttttgtggagatttatgggaaagaagggaaaaactgcttctcagagtatccttcatttgatgatctttgtcaatttcaccagaaatcaccaatatcacatatatcaaaggtgagcacgccaacactttttctccttggagcacaagatctcagagttcctgtttctaatggcttacagtatgcaaggaccttgaaggagatgggagttgaaaccaaaattattgtctttccagaagatatgcatggccttgacaagccacagtctgattttgaaagcttcctcaatataggtgtttggttcaagaagcacatgagcaaataaacaacatgcctctgttaccacactctcaccttgcttaataaatgcttgtaatttgggtcaaagcagcccaaggaaacgtggttctgttggcattctaataaattaagcctgctgtaacatttctgtactgggataattcttgaaaatgtaaatgcatttggttataaaattttaccctcgtggtacggaactatggattacaaatatgtgatgttagattatgctttactttgaactttgaagtacttctagttcacggttgctgtcctgtagcctgttgggcttgggcattccttttatttttatctttttttaggaaacaatgggatcataatttcttttgaatttcagtgagaaaaaaatacatgaaagttcagttcaagttaggcacatgg

SEQ ID NO: 20562 - DNA, 2059 bp, Oryza sativa
  misc_feature (1156)..(1156): "n"=any one base of a, t, c, or g
  ref <308>: DATABASE ACCESSION NUMBER: AK070877
  ref <309>: DATABASE ENTRY DATE: 2001-12-06
gactcttcctcctcctccctcctcgccggagcttggctgagcttgagctgagctgagctgatcggcggcggcaatggcgggcggcgcgatggtccagacggtgggtggcaagacgtacccggggaagatgaccgcgttcgtgttcttcacctgcctcgtcgcctcctccggcggcctcatcttcggctacgacatcggcatctccggcggcgtcacctccatggactccttcctcagcgagttcttcccgtcggtgtacgcgcaggcgaaggcgagcaaggacaccaaccagtactgcaagttcgacagccagctgctgacgctcttcacctcgtcgctgtacctggcggcgctggcgacgtcgttcgtggcggcgtgggtcacccgggtgttcggccggaagtggtccatgttctgcggcggcgtcaccttcctcgccggctcggcgctcaacggcgccgccaccgacgtcatgatgctcatcctcggccgcatcctcctcggcatcggcgtcggcttcgccaaccagtccgtgccgctctacctgtcggagatggcgccggcgaacctccgcgggatgctcaacatcggcttccagctcatgaccaccatcggcatcctctccgccaacctcatcaactacgcgacgtcgagcatcgagggcgggtgggggtggcgcatcggcctcggcctcgccggcgtgcccgcgctcatcatcacgctcggcgcgctcgtcctcccggacaccccaaactccctcatcgcccgcggctacgccggcgacgccaagcgcgtcctcgtcaagatccgcggcacggacgacgtccacgacgagtacgacgacatggtagcggcaagcgaagaagccgcctcgatcgagcacccatggcggaacatcctccatcgcaagtaccgcccgcagctcaccatcgccatcctcatcccgtgcttccaacagctcaccggcatcaacgtgatcatgttctacgcgccggtgctcttcctcaccatcggcttcgccggcgacgcgtcgctcatgtccgccgtgatcacgggcctcgtcaacatgttcgccaccgtcgtctcgatcatctccgtggaccgcctcggccgccgcgtgctgttcctccagggcggcacgcagatgttcatctcncaggtggtggtcgggacgctgatcgcgctccagttcggcgtcgcgggcgtcggcgagatgtcgcggtcgtacgccatcttgctcgtgctgttcatctgcatgtacgtggccgggttcgcgtggtcgtgggggcccctggggtggctggtgccgagcgaggtgttcgcgctggagatcaggtcggcggggcagagcatcgcggtgtgcgtcaacatgatgctgacgttcgtcatcgggcaggcgttcctcaccatgctgtgccacctcaagttcggcctcttctacttcttcgccgggtggatgctggtcatgaccaccttcgtcgcgctcttcctgccggagacgaagggggtgcccatcgaggagatgaaccacgtctggagccggcactggttctggggcagctacgtcaccgcccacgacgtcgccggcgccggcgccggaggaggaggaaaccgcagaagccacaacgtctagctcttacatatactattaccgtttacgagttacgcgagagagagagaattaatgggtaggttgtgtaattaggtaatgcaagaattaattaaaccaattaatttcaagggacaggtttttaattaattaattaattcggggaggggggagctttagaatttggtcggggcaggttaatttcagggtatttgttgtatagattttgaattttataggtgttttctttttatgaaattcttatgtagtaaattctttggagagcgctacaaatatcgcatggtgttgccgcgcatgtagagtactgtttctctaaccaataaaaaatgtttcaacaaaaatgtatcagttatgtgtatcttgaaaataaaaaatgtttcgttactcttgagaaatgtttcatcgatcgggttaaacagttttaactat

SEQ ID NO: 20563 - DNA, 920 bp, Oryza sativa
  ref <308>: DATABASE ACCESSION NUMBER: AK099156
  ref <309>: DATABASE ENTRY DATE: 2002-08-28
gacgcacaaacaaacgccaaaaatcgccgagaagaatccggagaaaacctcacggcggcggcggcgaccggcgaccagaatcggcgaacgggcacgggccgagcagatctaggcgagggagggagcgatggggtcgagcgagatgacggcgacggaggtggcggcgctgctggatctgaagccgcacccggagggcggctactacaccgagacgttccgcgacggctccgtctccgtcaccaccgcgcagctcccgccgcagtacaaggtcgaccgtgctatcagcactgctatctacttcctgcttccatcagggagtgtttctcacctccatcgcattccctgtgctgaaacatggcacttctacaagggagagcctctcacggtctttgagctacacgatgatggacacattgacctcactgtcatcggtccacacctggaggctggccagcgtccccagtataccgtgccaccaaatgtgtggttcggttctttccctaccctggatgttgaatcattcgcatctgatggcagcgttcttgtcaagtctcgaaagagggatcctgagcttcattactccctagttggctgcacttgtgcccctggcttccagtatgaggatttcgaaatggccaattttgatgatgtgaaatccattgctcctaaggcagaaccgttcctcaagtaccttattccttccaccaagtaatcatgttttgagctcaacatactgtattttagcagcctgtctggcaagattgcctgacggtattggacgccatttttagtgtgattgcttcgggtttgtgttcttgtcttgtacacttaagaacacgcatgtccttggtgatagttgtaacactctcctgtacgaaaacagaataaaacactggcaatgttgagatgaaatttgcttg

SEQ ID NO: 20564 - DNA, 1736 bp, Oryza sativa
  ref <308>: DATABASE ACCESSION NUMBER: AK070878
  ref <309>: DATABASE ENTRY DATE: 2001-12-06
ggattgccgcgccgctccccgtggagcccaagtggcggcgagggtttccgccgcctctcgtccgcctcgccgacctcggaccccggcctccatcctcctcgccgacgagagcccaagtgtgccgctccccgtggagcccaagtggcggcgagggtttccgccgcctctgctccgctcgccggcgacagccccacgttctcgaccgccgtccccaggtccgcttccggaatctcatcctttgcgggctgatactgcttcgcgcgtcaagccatcaccagctgctccctccgtctccggaacaacaatattctctccgactgctcacgacgggagagcggcgcttcggcgacggcgatcccgcagatggagaaggcaaacaacacaatgtttttcaaccaagcaactatctactctactccaagtatctaaggtcactttaggctgaagaatcattgtagcgaatggattatcaacaatcagatggaatttatgacatgccagatgaaccattgtttacactaaatttgaggttgagccacagcaatgacctggatagagttcataaatctttcaccagcaagattgataaggcccgaacgtatctcacgggtaggttcagaaggattgtcaaggtcaaaggttctaagagaaaggagttcgttcttacccctgaaggccctgatgtttttaccattgctttcactgatggtactaacagagtaactgccataattgaagagagaaatatgtggttgagaggtttccaaactgcagacggacacatttttgagtttaatgatgaacacggcaatgaagggaaggatgctaatctggatgacaagactgatgaaatgaataatcagttcaatggtaatgacaaaacaagagatgaggaggtgaaggatgaggaagaggctataaaggaccaaaaactgaaggttataaaggaccaaagatgaaggctataaaggaccgagggatgaacaagcactgcaaacaaaaagaaaagagcaaagcagcatgtggatccaaaaagaagcaagtgaataggaaagaccaactcaatccaaaaaagtatattagaggatctgttctcttacggcatgatagcaattatggttctcttcttggacctaacagactgcctctgtttcaagtagtatacagtacaatgagggatatgctgcagaatttggctcactttgatccaaacaactattcagataaacacaagcgctcgatggctgcactgatcatccatacagctgagactttgaagaataaatatatatcaagtcttgtgttaaattctttcaatccacatattggtgcaaggcttcaagcactggatgatatgggagcagcacatattaacgggtggtctacagcctctgaattaattttgaaatccattcacctcccatcaaaggtttgggactttcaacagcaagaattttccaagtgcaatgaattttacaaaaatcagtgctggactacagatccaaatgtcgcaatgaagtcaattgtgtttttaaaaggcgatgcttacacggacagtaagctttctgttaaagatggtgatacgattaccatatcacatagtctgtgttagatgtattgtatagctagctgtgtatttactcccttcttgagggtgctttcttcatatttgtattgagctttgtgtatatctgtttggcccagttggcccatttaatctgtggtccaatatttgc

SEQ ID NO: 20565 - DNA, 1498 bp, Oryza sativa
  ref <308>: DATABASE ACCESSION NUMBER: AK070879
  ref <309>: DATABASE ENTRY DATE: 2001-12-06
aagtgcgatcaaactagcaaccctaagatacacttgagaatatttttaaataactcgagaggaactgaagttgttatgaactacctggcaaagatgcggaaagaagttggcaagaagataaatttgcggtctgcccaaacaaatgcagcatttcggaaactctttaacctcccaccggaagagtttctcatcgatgattttacctgccatctaaaacgaaagatgccacttcaggggcgcctcttcttttcaccaagaattattggattttattccaacatatttggtcacaagaccaagtttttctttttgtgggatgatgttgacgatatccaagttatccctcccaccctgtcaattggtagcccatccttgacgatcatcctccgaaagggtagaggtttagaagcaaaacatggtgccaagggaacagatcctaatggaagactcaaatactattttcagtcctttgtttcattcaatgatgcccatagaataatcatggcaatttggaaaatgcgatcactgagtccagaacagcagggggatatgatcgaaaaagagtccgataccaaagaactccagctcgaagaaggtggaaccttatttacccatgaagatgtcaaaatgtctgaaatattctcatcggccctctctgttgatgtcgagtccctgatggagatgttttcaggagggcctttggaacacagaatgatgcaaaaagctggttgtattgactactcgccaacagaatgggaacttgtaagccgaaatatataccagcggcaaatcagctacaagtttgacaaaaacttgtcaagatatggaggagaagcaaccaccactcagcagaggtatgccctagtgaaccaagaaggctgggccattgaagaggtgatgagcctacaaggtgttctactgggggactgcttcaatgttcagatgaagtacactgtggtgaatgtaccgtcaaaaccgaacacttgcagtgtgcaggttttgttggggatagcctggttaaagagcactaagcaacaaaagaagatcacgaagagtgtcatttccaattcatccattagattgaaggagctctttgctgaagtagagaaggatcttacatcgagaagcggggcaagctgacatctgcacaaactaacagtagattgttcattgcaacaaccaaatgtgtttgaagagaccagtatacatggagcaatttgggagaactgtggctgtttgcctgcggttgactggtttcagctttgtcaacattcttgctggtagagttaatacacagatggcaaagccaaaaaaagaaaaagaaaaaaaaaagaagtgtgacatcaatgtgaatagattgttcaaaaacactttttttcttaaacattcctgatatgatcttaccttcataggaagtgaagtagagttgtatacttgtatatgcacagctgaccaatgttatacaaacgatatagtaaaaggaatctaactttgattc

SEQ ID NO: 20566 - DNA, 3618 bp, Oryza sativa
  ref <308>: DATABASE ACCESSION NUMBER: AK070880
  ref <309>: DATABASE ENTRY DATE: 2001-12-06
ggcggacccaactagggcggcacgccgccggccgccccaagggccaagaggcttcctccgcgagtccgcctccgcctctctcctcctcggccggcaacacgccatgatgacgccaacacgacggcggccgaccaatctacactcggagtccggcgagttcgtgtagatttctattgggggatgcagaaccactattcctttcctctatggtactggcctgctcatatttattcaccctgaacctgcaagttttcagtaatcagtttgcacgattactaagacttgttttaattgttatgctggtgcaacctagacctggtatatatgttgcccaacaatcatgtcataactgtgacatgtaaagagtgtccattatgaactgcttaatttgtcagcatgataacgaaattttgttttcttcccaacaaaaagttgggggcgtcactctttttccagtttcttcactgccaaggagcagagttaaaggtagacttggaaattgacagtgacatatcagaattcagagcataaatccaaacagcaatatttattatggttgttgaatgggtgctgatgtggaactaaagcaaacgatgccattagaagaactacaaaaatatctattagtttcttttcaaagaattcacaatactgttgctgcggtgattgagaattggggcaatgttcagaacagatggccttgatcatgtttgaatggagacgtcgattcatctcccagcttctcaactgactacatggcttcgataatgttcgaagatgggatccatagaggcgcaccatcgtgtatcagacatgttggatattactaagaagataataggagcagtattgcaaatttgccacatcgaaccaagtactgctgtaaaatttctatcttcattctgccgtatgttaaaaaatactctatcttgcagaataaacacaaatacgcaactcaagcaggtaagttgtaagagtttccctttctggtggagagtaaacttttgcagaggttcaactataccatattttctatcatgcggttcttcagatttcagtacagttgaaagttgccaaaacaccaccagaacatcagaaacaacgacggttgttgaatgagacgttgaagtttgcctttgtgcacattctgccgcaaaggatctgttcagccgcgagacctgtatgttttacttatttcagcttatggaggcctattcttttgagctaatcgttgacggattcccaagatcctaaatgctgtctggtacttggttgactcttgcacctgctccatgacgaaggtaacgagtggctacgtacgccgtggccgtgctaatcaatgggcgagctctgtgaagaagctaactcccaaccaactattccaactcggttattaaagccaatggtaatcgcccaacgctgcatgctgcactttacccttgtaaaactgtgagcgttttcctttggtggatagaacagttgggatgcgatgcacggggaaaagggaattgcagacacgccagaaaggcagagacattgccggtatctatcacgtgaaaatgtgatgctgcaacttgtccgtcccatgtatgaattcaacattttgggtgagaaaacatgtttttgctgttgtttacgtagcttaccgcagggattacctcctgcgtgttagactgcaccagtcaagaaaacccactacgttacgtgaagctagcagcatcgatcgcactagtgtcgctctctggaagtaatagcctcttaagttagctgcgagctaagcctgcaattatacaccgtctccgcctccccttcccatgtcacaaccaaccttggatatattaactccctctcccgctgctccactccactcccacaccatcagcgagcacctagcggtcgcatcgctagctgccatctcctggtgagatccatcgagacgcccggcacgacgacgatggtgtcgcggaggttcaagcccgtggaggagtgcagctcggatgggaggtcggagcagacggtggccgccgacttcgacggcacgctggtcaggtcgcggagcgccttcccgtactacctcctcgtcgcgctcgaggccggcagcgtgctccgcgccgtcgtgctgctgctgtccgtgccgttcgtctacgtgacctacattttcttctccgagtcgctggccatcagcacgctggtgtacatctccgtggcggggctcaaggtgaggaacatcgagatggtggcgcggtcggtgctgcccaagttctacgcggaggacgtgcacccggagagctggagggtgttcaactccttcggcaagcggtacatcatcacggcgagccccaggatcatggtggagcacttcgccaagacgttcctcggcgccgacaaggtggtcgggacggagctggaggtcggcaagaacggcaaggccacggggttcatggtgaagcccggagtgctcgtgggcgaccacaagaggcaggccgtcgtcaaggagctacgcgacgcggtgcccgacgtcggcttgggcgacagggagacggatttcgacttcatgtccatatgcaaggaggcctacctcgtgacatcaaggaagtacagcgcggtgcccaagaaccagctgctgagcccactcatcctccacgacggccgcctcgtgcagcgtccgacgccgctggtggcgctcgtcaccttcctgtggatgccgttcggcttcgcgctcgcgctcctccgcgtgtacgtcaacctgccactcccggagcggatcgtcttctacacctacaagctcatgggcatccgcctcatcgtgaagggcaacccgccgcctccccccaagaagggacatcctggcgtcctcttcgtctgcaaccaccgcaccgtgctcgacccggttgaggtcgccgtggcgctgcgccgcaaggtcagctgcgtcacgtacagcatctccaagttctcggagctcatctcgccgatcaaggccgtcgcgctgtcgcgggagcgcgagaaggacgccgagaacatccggcggctgctggaggagggcgacctggtgatctgccccgagggcaccacctgccgcgagccgttcctgctgcggttcagcgcgctcttcgccgagctcaccgaccgcatcgtgccggtggcgatcaacaccaaggagagcatgttccacggctccaccgtgcggggcttcaagctcatggacccctacttcttcttcatgaacccgcggccgacgtacgagatcaccttcctgaaccagctgcccaaggagctcacttgcagcggcggcaagtcgcccatcgaggtggccaactacatccagaagacgctcagcggccagctcggcttcgagtgcaccgccataacgcgcaaggagaagtacagcatactcgccgggaccgacggccgcgtcccttccaagaacaaggagaaggaaaagaactagcgagtcacagcctcctatcgatcggagtactccgtattcgcccagccgactagtgtcactcatggcttctatctattgtttacgatttattgttgtttttcaagaagttggtaaattacatattgtttccgagaaggatctccttggaaagaattcttttgcacttcttt

SEQ ID NO: 20567 - DNA, 807 bp, Oryza sativa; identical to SEQ ID NO: 20443
  ref <308>: DATABASE ACCESSION NUMBER: AK099157
  ref <309>: DATABASE ENTRY DATE: 2002-08-28

SEQ ID NO: 20568 - DNA, 1433 bp, Oryza sativa
  ref <308>: DATABASE ACCESSION NUMBER: AK070881
  ref <309>: DATABASE ENTRY DATE: 2001-12-06
gatgagctgcgaggtcgagaagagggcgaagacggcggcggcggcggcggcgaggaagaggaggaggacgacgtcgacggcctcgccagcttcctcgaatcggagatcctctctggatctagcggcgacgaccctaccggtcgggaggaaggggatgagaaggagaagcagttaggagatgatgcgaagaacaataagaggaagcaggagtctgaatctgatggggatagcggcagcggggaggagcagaacaagagggtgaggagagcaaaggggaaagagaaggacgtggcgtcggtggcgcctcagatcgatagcggcatgttctgcaatatcccgccggagttgttcttgcagatattcaagttcctctcatcggaggatctcatctcctgcgccctcgtctgccgcttcatgaacgtggttgcgtccgacgagaccctctggcgccgcctgtattgtaagcggtggggcctgtcatgcaataccaaactcagggagtgcgcttggaagaaactctacatccagcaagatagagaggatatggttgagtttgtgagaaatacacctacagaattcaaggagtattatatccagatgcaggcttcaaaaaggagtcaagctccccttccctctgaagtcaacgatgacaaggttattcttgataaaacaatagccgatcaggtgtctagctggaaaagcagcagaggcctcactgatgatgcggtcaaggggcattcttgttctgggaatacatgctcttacacccagattggtgatgcttatatttgtgagaagacaggccgtgttcatgtttgcgatgacgcttgtcgtgaatttgtcttggaccagtctagtgggctgctgctttgtacaatatctgggcactgctttgaaaggtggttgtgtcctgatgatgagtgggatgctgatgatgatactgatctacaacaagctggtatgaccgatgaagcagagccatttatgggttctggacgatttgcacgcgcatatcagttgggttacagctgtgctgatgagaaggaacttgaatatgacttgaggttttgctgataattgggattgcctaatcatactggcaacatgaaaccaagtttttggtttgcaagggaaattatggtcagaaggcttggtgctatgtttattttttttttttacctagtttaggtttctggtatgttcctatgtgtacaactcacgcacaaatatgagacggctaaaattctgatctgttttgatcagttgaggaagctgtatattgttgtaatcttcctaaattacaaggtgcatgctagtaataaaagaaaccttctgtaatgctcactgtatttgtttttgcgctgtatttgtatcgttatgttctaattgatgtccagcttgcaaagcatcaagtttttagtgtttcagtaatg

SEQ ID NO: 20569 - DNA, 875 bp, Oryza sativa
  ref <308>: DATABASE ACCESSION NUMBER: AK070882
  ref <309>: DATABASE ENTRY DATE: 2001-12-06
gcaagttataagtcagatgtaaacatattttaaagagataaagaaagaaagagaagagcatcaggctataaatctgtagctagctgcagcactgactctaagacataatgtgtgtttctttttttacttttcctctctgattcccacttgcgacgaaatatcggttgagatgaacctgtccgtgttcttacctgttcttgtgatcttcgtgtgatctgatttcaattttttttcgcccttctcctgttcgttttcttgtctgttctggcgtcttcgcggcatgcgccctctcctgcgaagcgggcggtgggagaatttaggggaaaattcatgtgcgtagagaggtcaagaagaggcgcggcggtggccaacctccgacgagtagagaggcgcggtagtcggcggctcaagagaggtgcaacctcatcttttcacttatacttatcaaccaaactttaaactttaaatttaaagttgattttaaaatatttttcatgaaaatttatttttcaacatttgattttaggtcactaagaaaacgtacataaacgttttattcacaaattaattttttatataaatataccatttgacttattctctcaagaagtatgcagtggagagaccgaaaagaaagggagaggctactcacaatgaacatgacatttttttatttttatttttactttgatgactagattgccaccatatcgtcagtcagatgaaaaccacctcattctcattctggaattagcgatgtaaattgagcggttttagaagttgagggtgagttatattcggtttttgaagttgagtccctaagaaatgctgtatggctaaactaaaaatcatacagctaacaaacactgtagttc

SEQ ID NO: 20570 - DNA, 1619 bp, Oryza sativa
  ref <308>: DATABASE ACCESSION NUMBER: AK070883
  ref <309>: DATABASE ENTRY DATE: 2001-12-06
gatcttccatccgcccatctacctccctcctccgtccaccctaactacggcgggtcgccggccatgctcgcgttcgcggtcatcgtctcgccttccgcgtggccgagagccgtctcctcagctttcgcggcggccgtcttcgcgttcctggacgtcgtcgacgtgctcctctgcttcgtgtacggcttcctcgacgccgtcttcgaggacagcccggtcagctgctactgccacgggagccacagcgcggcggcgctggacgacgacgacgaggtctccgacacattgtaccaccggcggagcgctctccgagacgcgctgatggggctcgtcagaggcaggagcggcggctcgccggagacggagacggagcggcgcaaggggcggagcccgaggtggtcggactgcggctgcgattcgtgccgcgcatggcagcgccacgacgacggccggctgcacttcgtcgccaaccaaccgccgccgccgccaaacgatggagcagtgacaacgacgcagcagagtggagaagaagacgccatcttcatccacggcttcacctcgtcatcgtcgttctgggcaacagtgttccgcgaatcatccatcctcaacaactgcagaatgttggcggtcgatctcctcggcttcggcaagtctcccaagccggcaaactgcatgtacagactgaaagatcacgtcgagatgatcgagcggagcctcatcgatccactcaacctgagctccttccatcttgtcagccactccatgggctgcatcatcgccctcgcattggctgccaagcacccagaacgagtcagatcaatcacactgattgcaccgccgtacttcggagcatgcgaagagaaggcgagccaagtggcactgaagagactggcggagaagaagctgtggccgccattgcagttcggatccgcagtgatgtcatggtacgagcacattgggaggactgtctgcttcttggtctgcaaaaatcacctgctctgggagcgcctcttcaggctcatcacaggaaagagggatgtggactttctgctgggtgatctgacgaagcacacgcaccactcggcgtggcacacgatgcacaacgtcatctgcggtggggccatgctgcaggacaggaacctggaggccgtcgaggcggccggcgtcccggtgcaggtgatccacggcggcgacgatcaggtggttccggcggagtgcggccgccacctcaaggccaagcttcccggcgccgagctccgactcatggaaggctgcgaccacaagacggtggttttcggcagggagaggggatttgctgaggagctcagagcattctggtccgcgtctcatcagaataagcagctagcagcatctgcatcagggtgggcaggttaacggatgttgattgttggtgtgtagaataatgtctgatatgaaatcatgatgtagcatagagaaattcagtccacactttgaaattactggtactacaatttttagagattaaagactagggtgaatccatcgacacgtttctttcgtcagaacagtgtccgtatattggaaaatccttttctagctcgtggattggcagattaatctttgaatttgcaaagggg

SEQ ID NO: 20571 - DNA, 2321 bp, Oryza sativa
  ref <308>: DATABASE ACCESSION NUMBER: AK070884
  ref <309>: DATABASE ENTRY DATE: 2001-12-06
gggatagtctcctccctccaccaccaccacctccttccacgatccctccccctcttgatcccatccgccgccggaggagatcttgccgttcttgcgcttggatctagaccgcaagatcggtgaacggcgacgctctcattggttggtttattagttggctggtttctctctcctcgtcgattcttctccggcgaacacgccgccgccgccgcttcggattcaaggatcttgcattgcctgtctttccaatttcacattggatttactcgaactgattcgtgctgaaacaaatttgaccaagaaaagaagaggaggtcatcagcaggatgaagagggtgtcgtcccacgtctccatcgcctcggaggcggagatcaacctcgatctctcgcggctcctcatcgacaagccgaggctgacgctggagaggaagaggtccttcgacgagcagtcgtggagtgagctctcccaccgccagaacgacggcttcgacagcatcatgcactccccggcgttcccctcgggcttcgactcgcccttctcgctggggacgctcggtgatccccacccgctcgtgaacgaggcgtgggaggctctcaggaagtccgtggtgtacttccgggggcagccggttgggacgattgccgccgtcgaccatgcgtccgaggaggtgctcaattatgatcaggtttttgtgcgagatttttttccaagtgcattggcttttctaatgaataatgagactgatatagtgaaaaacttcctcttgaaaacactccacctgcaaagctcggagaaaatggtagaccgtttcaagcttggagcaggagcgatgcctgcaagtttcaaggtggatcgtaatcggaacagaaacactgaaactttagttgcagattttggtgagagtgcaattgggagggtggctccagtggactctggattttggtggattattctactccgggcatatacaaagtatacggcagatactagtttggcagaatcaccagagtgtcagaactgcatgaggctgatactgaacctatgcttatctgagggatttgataccttcccaactctgctctgcacagatggctgctcaatgatggatcgtcgaatgggtatatatggttatcctattgagatccaagctctattctacatggcgttgagatgtgctctgcagatgcttaagccagatggtgaagggaaggatttcatagaaaagatagggcaacggctacatgctctaacctaccacatgaggaattacttctggctagatttcccacacctgaataacatatacagatataaaacagaggagtattcacacactgctgtgaacaaattcaatgtcatcccggattcaatccctgactgggtgtttgatttcatgccatgccggggaggctacttccttggcaacgtgagcccagctatgatggactttcggtggtttgcccttggaaattgcattgccattatatcatctctggctactccagagcaatcagtggcaataatggatctgattgaggagcggtgggaagagctagttggtgagatgcctctgaagatatgttaccctgcaattgagaaccatgaatggagaataatcactggctgcgacccgaagaacacccggtggagttatcacaatggaggatcatggccagttctcctgtggctgctgacagcagcctgcatcaagactgggcgtccgcagatggcgaagcgcgccattgagctcgccgagtccaggctactgaaggacggctggccagagtactacgatggcaagctgggacggttcatcggcaagcaggccaggaagttccagacatggtccatcgctggctacctcgtagcccgtatgatgctggaggacccgtcgacgctgatgatgatctccatggaggaagaccggccggtgaagccgaccatgcgacggtcagcatcatggaatgcctgaaatgttttgatagaatttttttttcccaaagagaggttcaatgtggaaacttataggagttttgtccaaacatgaaaatggggttcaaaatttactgtaactgtactgtcagttaggacagaagtgtatacgatagatccaagtcgtttcagagcaattttgtccaacttttcgtatctggcttcatcaatccaacagagaagaagtttttgttggtgaaacatttttgcaataattaaacagttttgtcttgacatatatactagcatatgtttctgtgatggataattctttgtaatactttgtaggactttctgttaatatactcctcacatattttcattgtgg

SEQ ID NO: 20572 - DNA, 4248 bp, Oryza sativa
  ref <308>: DATABASE ACCESSION NUMBER: AK070885
  ref <309>: DATABASE ENTRY DATE: 2001-12-06
ggaccgatctgaacggacgcacgaaggaagaaaaagtgtaggagttgcggcacatcaccgccgccgctcctacaccgtccgccatagcgattcccttccatctcgcagccatccaaagtgagtccttcttcgccgtctccgatctggaacttcaccgccgccgccgccgccgcatctcctccttcctctcttggcaactgtcggcggcagccaacggctctcttccccccttgttcctcccgctatcgcgagtcaacgggatgctcgattcgttacattttttttaagtactagtattgctaatttgttggagcaagctaactgcattgatcgctcacgtggtactgcttcgatcttcacaatcacccgataaaaatagttgcgacagagaaaaaaaaaaagaaagtgtgggacggaagggaaaggggggaattcgctataaaagcactcggaattggcctgctcgatgcgccgaggctgactgatctcctgcagttccaagactgaacagcgagatctctgcagatctgggtgcagtgatttgattcgcaggtgtaagcttgattagccattacttgaggagttaggtttcatgtttggataataatcaggcctacttttggtactgtcgtactaaggactgatctggtggtaatggcggagacggtgttgagcatggcaaggtcgctggtggggaatgccatcacgaaggccggagaggcagctgctgcagagataagcttactgattggtgtgaacaaggagatctgctgaagagatggagaaaaaacccaggctgttgaaagcgtgggtggagcaagtaagggatttatcttttgacattgaagattgcctcgctgagtttatggttcacgtggggagcaaaagcttgtcacaacagttgatgaagctcaaacatcgccatcgcattgccatccagattcgtgacctcaaatcaagagttgaagaagtgagcgataggaattcacggtactcattaatcagccctaacaccgatgagcatgacaccttgagggatgaatttcgctactggtcagctaagaacattgatgaggctgaacttgtgggttttgatgatgcaaaggaaagtatacttaatttgatcgatgtccatgctaaccatggtcttgctaaagtgatctttgtagttggcatgggcggtctagggaagacaagtcttgttaaaaaggtttaccatagtattaatattgttaataatttctcatgccgtgcttgggtcactgtgtcacagtcatttgtcaggacagagctcctgagaggactaatcaagcaacttttgggtggtgattcggaaaatgaacacttcaaaggtcttcagagcatgcaaaggaatgagaaagtggaagacctcgtggaagacttgaagcaaggtctaaaagagaaaaggtactttgttgttctagatgacatgtggagcatagatgcattgaattggcttaatgaatctgtttttcctgactctaataatggaggaagtcgcataatagtaaccacgagagatgccagcataattcaaaactgtgcttatccttcttatctgtaccgccttgaacccttaaaaacagatgatgctaaacaattgctgctgagaaaatcaaataaaagttatgaggacataaaagaggcaaggctgagaaggtgtttgataggatactagaaagatgtggaggcttaccgctagctcttgttgcgataggagctgtccttcgcacgaaatgcatagaagattgggaaaaactgtctctgcagctatcttcagggctcaaaacaaagtcaagtcttgaagaaatgactagagtaattacacttagttatacacacttgccatctcatctcaagccatgttttctgtaccttagcattttccccgaggattttccaataaaaaggaggtgtatggtaaatagatggatagccgagggttttgtggatgcaaagtttggaatggctatggaggatgttggaaatagttatttcgatgaactcatcaatagaagcatgattcaaccatgtaggttttatagtcatggagtagtacagtcctgtgtactccatgatatcatgcgtgatatcgcaatttctatttccgcagaggagaatttcgtattcatgacgaaagggtttgtctctggtattccacctgaaaacatccatcacctttctattgatgggagacaggattcatacctaagctttgatctaagccatgtccggtcattaagtttcttttacaatcctaaagagcaactagcttcactgtgctcaccacagctaaggatgctccgagtgttggatctagagtttagtctatgtcgtgtaacacagaacgacatcagtaacataggatcattttgccacttaaggtatctatctgtgaagaaaggttcatatatttaccatattccaagatccatcaggaaattgcaaggattgcaaactttaaacctgaaaagatcattaattactaaagtgcccgcagaagtcactgaacttcgtagtttccgcagtctccggtgtagcacccttggagtttacagtcacttcgaatttactacccgtgagcccaaaaaatccttagtaactacaatgaaattgcccttgatattgccacatttgattagcggagacaaatcctcggaggtggtggcggagttccgcaagggtgagcgtaccaaaaggaatagggagcctgaaggagttacagattcttgagcttgtggatatcgcacgaagcaacaagaaagcagtccacgagttgggggaacttactcagctgaaaaaattaggcgtggcaggggtcaccgagaggaatgtcagttatctctgtgaagcccttcagaagctttcttctctctgttcccttcgtgtggaggccaaacccttccgaggcctccacatgcttgagcagcttgcttccccacctcccttcctccacaccctcaaattgaaaggctcccttcatgaaatccccagttgggtcggaaagctcgagaagttggtaaaggttcagctagttttcaccaaactgaaggatactgaatccatacaagtactcggggaattgcccggcctcaaatgcctccgtcttattttaaatgcctacattggaaaagagctagttctttgccatgggaagttccgagggctaaagactcttcgacttgactctttggaggagctgagaaaggttacattcgaggagaggacctcgcccaagctggaaacaataaccattcaggattgcagctcggagttagcagtctgcggcacggctaacctccaaagcctcgagaaaattaagtattttgcaaaagggaaactggtgaagcgtcctgtggtgcaagcgggtcagagccaaagtgcgcatcatcgggaggacatcaaagctgcagagataatagagaaatctcaaacatcatcactagagaaaggcgagagttcacaatcaatacctaggcctgatgtccttcgtactcttccacccatctctgcaacaaccaagctgaagagaagtctgtcctgcccagcatcaacatctatcgtcatgtgaactatagatcaaagactctcaacatcaaatgttgatgccaccatcttgtagaactcatgacgcatcgtagagctgtgataattgtagaactcatgacacatcagagagctgtggttgttgtagagagctattttcagggactgaacttacctccatggtggtaactgagacttgcaatcttacagactcatttatggctgaatccaaattggttgcttggagtctggagctccatgagatcacaatggccactttttgttgccatgagtggtacatggatcgtgctgctaagcctttactctgagctagcggaaaactggctggctgtatatcgagttcacaatcgccctcaactttgtcaatgcgatggtggtcatggatagatgtatgtcatatagcgcaaagtggagcctccaatgttcgccaaccgtattgtaaacgtgggaggagaaaatttctcaagggacaaccatggaacagaggtgatggagcaaactacttgctatcatttcagagcacaggctgaattttagctcagataagagtactaattcttatttgtctgtcattgatctatcatactccttccgtccctaaatataagggattttgtttggatatgatatatcctagtacaataaatctagataagctcc

SEQ ID NO: 20573 - DNA, 912 bp, Oryza sativa
  ref <308>: DATABASE ACCESSION NUMBER: AK070886
  ref <309>: DATABASE ENTRY DATE: 2001-12-06
ggtctgcattctcagctgcggtttctctaccggttttggtgcaacagtgaatgtcgcgaaaccgaaaaagggccagaccgtggctattttcggtcttggagctgttggtcttgctgctatggaaggtgccaggctgtctggagcatcgaggatcattggtgtggacctgaaccctgcgaaattcgaacaagctaagaagtttggctgcactgacttcgtaaaccccaaggaccacagcaagccagtgcacgaggtgctgattgagatgaccaacggtggactcgacagggccgttgaatgcacgggcaacatcaacgccatgatatcctgcttcgaatgtgtccatgatggatggggcgttgcggtgctggtcggcgtgccgaccaaggatgatgtgttcaagacccacccgatgaacttcctcaacgagaagacgctcaaggggacgttcttcggtaactacaagccgcgcaccgacctgcccaacgtcgtcgagctgtacatgaagaaggagctggagctggagaagttcatcacgcacagcgtgccgttctcggagatcaacacggcgttcgatctcatgctcaagggggagagtctccgctgcgtcatgaggatggatgagtagagatgatgatgatctatctctctctctctctctcttgcagtttcagtgcatacaagaaaccaaaaatgaaagcaaaaaatggatgagaagtttgaggttttccatttaagtttaataatggtcgtgagacagggcttgtgtggagtcagctctgtttactccctcctttcatggcttgatcttgtttattgtcagcattgtggcttagcagattttcaccagttttaccctgtaaattagtaccattctgaaatcgtaataaactactagcagtgtgaggtact

SEQ ID NO: 20574 - DNA, 1506 bp, Oryza sativa
  ref <308>: DATABASE ACCESSION NUMBER: AK070887
  ref <309>: DATABASE ENTRY DATE: 2001-12-06
gtggatcatctcctcctccctaccaacaaccaccaccatcctcttcttggcacttggcatcaagagacacatccagacgcctcgagttgtagctagcaccagtggctcagcttgcccagtgctgctgcatcgatcagtggcagtagctagctcagctctagccttttgccaccgaccgctccgatcgaatccggtgctaggctagccagcctcctcgctctttataaccccagccgccattggagagggagggagggagctagagctttgttcttgttcttgcatgctgttcttgttgatcgagtgagagagggggaaggaagaaaggagggaggcacatgcttataccgttcgtgctggagttcctgatcgatgtcgcctgtgatcagtgagatcctcctctcggggtttatgatcaactccacactccggcgccgcacccatctcgtccagtctttctccgtcgtcttcctctactggttctatgtcttctcataagctactcgccatccatttccctctcctcctctctctctagcttccttctacaataatcgatctcgtgttcgtcgtcgtcgttcttgtcgatctctgtgtgtgttcttcgtcgtcgtcgtgttcgttttggattttggtttcagtttagtatatgcacttcttgttcttcactgctgctgctgctgctaagcttgtagcaatctagtggtgcttgttgttcttcttctcccgaaatctttgcgatcgattgattgatggcatcgtcaagcgggagcggggggagcgcggtgtcggcggcgacggcggcggcgggggggtcgtcgtcggcggcggaggaggagctgagggcgcttatggagcagcggcgggcgaagaggatgctgtcgaacagggagtcggcgcggcggtcgcggatgcggaagcagcgccacctcgacgacctcaccgcgcaggtggcgcacctccgccgcgagaacgcgcacgtcgccaccgcgctcggcctcaccacccagggcctcctcgccgtcgacgccgagaacgccgtcctccgcacccaggccgccgagctcgccgcgcgcctcgcctccctcaacgacatcctctcctgcatcaacaccaacggcgccgccgccgccgccgccgccgccctcaccgtcgccgccgccaccgacccgctcctcgccttcgactccgccgccttcgacgacctcttcagatcctcccccgagctgttccagctttgctagctcaaacactgaagctgaagctgccatggcagagaccaagaagaagatgaagaaaattacagtacttgccactgggggtaagcaactaagcactgcacctaacgaagctaagctagctgctagggctaattaatggcctaattatcttgtgtaattggtaaatcaagtgatggttaagttaagccttctgcatgcatcatcatcatcatgtactccaactatgtaaggattaatgaggcagtaagctttctgtttctctgtc

SEQ ID NO: 20575 - DNA, 1326 bp, Oryza sativa; identical to SEQ ID NO: 20508
  ref <308>: DATABASE ACCESSION NUMBER: AK099158
  ref <309>: DATABASE ENTRY DATE: 2002-08-28

SEQ ID NO: 20576 - DNA, 3224 bp, Oryza sativa
  ref <308>: DATABASE ACCESSION NUMBER: AK070888
  ref <309>: DATABASE ENTRY DATE: 2001-12-06
gcatctccctctcacggcctcgcgtcctcctcctcccaattttttttctcccaaaattcctcgctctcgagctccccggatcccgaaggcgcggcgatttcttcgattcggccgcgggaaggaggagaggtgctccgatttgattgcggcggggcgccgcccgccgcggggtgattttgggcggccggggaatgctctacctcaagcagccgggcgcggatttagggttccggccggcggcggcggcggggctgtgatctgctgaccaggtcggcggatgcgaggttgagccgtgggtagtcggccggccatggcggtggaggcggaggcggaggtggaggtggaggtggaggcggggggatgcctcctgcagagcttcgagctctacgaggccgagtcgaaattctatattctcggaactaacactggcaaaacatcatggaaagtactcaagattgatagaatcgaaccatcagagctcaacattgatgagagttcaactgtgtactcacatagtggatatcttgatctgctaaaggttcttgatgaagaccacaggtcaactggtggagtaaaatttgttacaaaatgttttggaatcatcggtttcattaagttcctcggaccttattacatgctaatcatcaccgagcagagaaaaattggggctatatttggccatccagtttaccaagttactaggactgcaatgattgagctgtcaaattccgagtcgagggcaaaatttctaaattccaaggatgaagacagatacaagaagctcttgcagacaattgatcttagaaaggacttcttttttagccactcgtataatatcatgagaagtttccagaagaattttaatgatccaaaggaaggatgggacctgtatgacacaatgtttgtatggaatgagtttctaacacgaggggttcgcaacattctaaaaagtaccatatggactgttgcgttggtctatggcttttttaaacaggataaactcgcaatatctgggaaagacattatgctgacgcttgttgctagacgctcgaggcattatgctggcaccaggtatttaaagagaggtgtgaatgacgagggtagtgtagcaaatgatgttgagactgagcaaattatttttgaggacatgcttggaccaaagcaaataagctctgttgtgcagaacagaggttccattcccctattctggtctcaggagacatccaagctgaatcttaagcctgatatcatattgcatgaaaaggacaagaattatgaagctaccagacttcattttgaaaatcttaggataagatatggaaatcctataatcatcctaaacttgattaagaaacgtgagaggaggccacgtgaatctatactccgcagtgaatttgataaagcaataaagattataaataatgatctaccaggggaaaatcatctgcgatttttacattgggatcttcataaaaactctcaaagaaaaagtacaaatgccctccaaatgcttttgaaagtggcttttgaagctctgaacttgacagagttcttttactatcaagttcctccagctcgaagggctgagagttccttcaatttgcatgctccattgaagaatggttttggtcctcatgaatgtgatgacagcaacaatgatgatatcacagactgtatcgataatattgatgatatgtcccaagaagatacttgtggcagttctgatacttctggtaatggaactgcagaagatatagccgagggcaatggatctatatcagtaaagcctccaaaatttcaaaagggtgtcctacgtacgaactgtatagactgtttggaccgtacaaatgttgctcagtatgcgtatggtttagctgctcttggacatcagttgcatgcacttggttctatagaatcccctgaacttgatttggactcccccttggctcaccatttgatgcatttttatgagcggatgggtgacacacttgctgtacagtatggcggttcagctgctcataacaagatattctctgcaaagagaggacacttaaagttcgctatccagtcgcaagagttcttcaggacactgcaaagatactacagtaatgcatatatggatgcttacaaacaagcagcaataaacttatttttaggatacttccagccatgtgaaggtgaacctgcactttgggagttagaacctgttgctggggagggtgtccttggtgagaatgcaagtaaattgatgaaaagggcaaggtcagatggcagcattcttcggaaaagcaacgcatccatgtccagcaatggtcgaaatggagtgttaaagtcatcatttattgattctaaaagtgagcttcaatctccaaacagttcttctgatgcaataaacgaaatttcatcagcacctgataatacagttacagtgtcaaaatcaaggtatactcccacggaacctcatgttaagcatgtaagctgtgagcttgattactgcaatggttctggtgattcaaatttcctggacattgactggctttcatcttcagacaacgaaaggccaacaaccataagtactcctgatgtgaatgcttcagccgatagtgtttctgctggtgtatcctctaggagaacggaagatcatgctgcagagattcaggctcaggggttatcggagcgttttgttcagtggattgatcaaggggagaccttttggttctaatattgctagatgatttcatcactcatagccaagctagacgacggcagtcgttatgataccactgcaaggaggcgtaagatgtgagacaatatcgcccttaccatattctccttgtgactcatgactctccaaggggtctgaccatcctccagagtcctccagggaagtgtaccattctgtttatttgttgagcttgatcaccggttatacctctaggggcgagtagataggcattgttcttattttcttaaaggaaggaaagaaagaaggtaggtagtatattattcttttgatgttgtaccattgttcagccattctcattgttgtaaatatatatatgatgacccaagtgttttcccttttttcttgagttgaggtggacatgaaagcaccatttttccctcaacttgtttcttttctttcttttgctgggatcttatgagatcttatgtacatgtatttcattgcaacagaagatatgctattgtgtatttttgtaccc

SEQ ID NO: 20577 - DNA, 791 bp, Oryza sativa
  ref <308>: DATABASE ACCESSION NUMBER: AK070889
  ref <309>: DATABASE ENTRY DATE: 2001-12-06
gacacagcccgcgcacctccacagcattagccatcaacgaccagcatctcagctttgctcgccttctcgaagcttctgctgccatggcggaccagctctccgaagagcagattggagagttcagggaggccttcagcctcttcgacaaggacggcgacggttctatcaccaccaaggagctaggaaccgtgatgcgaagtctagggcagaacccaacggaggcggagctgcaggacatgatcagcgaggtggacacggacagcaacggcaacatcgaattcaaggagttcctgggcctgatggcgcgcaagctgagggacaaggactccgaggaggagctgaaggaggcattccgcgtcttcgacaaggaccagaacggtttcatctctgccaccgagctccgccacgtgatggccaacatcggggagcggctcaccgacgaggaggtcggcgagatgatcagcgaggccgacgtcgacggcgacgggcagatcaactacgaggagttcgtcaagtgcatgatggccaagaagaggaggaagaggatagaggagaagagggaccacgacggcggcagcaggacgaagagtgcagggccctccgccgcgccggcgagcaagcgtggccagaagtgcgtgatcctgtaataattgagccagcactgagattctcatgagtcaatgagctacacgaatgatgtgtgttgttgtaaaatggcaaaacaattgtgtgggcgtgtagtatgatgctccactgaaagatcgagaaataacactggccagtgcaagtcc

SEQ ID NO: 20578 - DNA, 3928 bp, Oryza sativa
  ref <308>: DATABASE ACCESSION NUMBER: AK070890
  ref <309>: DATABASE ENTRY DATE: 2001-12-06
ggcccttctcccttcgcgaacaccgtcaccgccgcatcctcgcccacctacagccatcgtcgccgcgccgccactgccgcctcttcctctcttcaatctcggccccgccaggctgccaccgcctccctttcctcgcccactccgcttcgctctgccatatccggctcagtggttgccagatccagtaagaggagcctgggaggagaagggaagttgagagggacgccatcgcctggagcgagacacgccccagccgtggccccgcgtccgtcgctcgctgcgagacatgctttccgccccggtcggtgcggcgccaaatccgcctcggggaaatcggctgactcgccgatgtatccggctgcccggagacgacggacataagccgccgccatagtcctcttcttctctccctctttgcgctacttgatgtgctggttcttgctcaaggtccaccagatccggtagaaagaggtggtaggagcagtgggctcagtgacgaggtcagggaagagaaggaaggagaagggcagctcagtcatggctgccacgaggacagatgtgggtcggcagctactacggcaaggccagcgcccagtgccacatgtgccgttgtacatggcgcctcgccgccctcgcttcctccagttgaatctcttctccgtactcttcaggtgagtttgagagccactaacctgaccttgccataactaagtttaggctagttgagacatggtggcataagtgtggcttagaaatagttggccacaagtgtggcaagcttagcttcaaatttgagagtatgacatgtgggtcctaaggctatgaaagtgtggcatgacacaattgccgtaacgaaccaaacacatatctaaaaaattatggcatacttcctccgtttcacaatataagtcattctaacattttccacattcattttgatgttaatgaatctaaatagatatatatgtctagattcattaacatcaatatgaatatgggaaatgctagaatgactcacattgtgaaacggagggaataactaaagtgtggtgtggcaaagtgtggcaaccaaccaaacaacccctaagccatgcttcttctcctagctatgctaacggttactggctactgttactactgcttgctattttactgttgttgtatttcacggatatttgatttgggcatagttactattgattaggatctcactaatgcagatttaaagtaactcatgtgctcatccattccattgaaaaatggaacttgcgctgagttggtgatctttagatattaccgataatacaaatgtctttttaagtttttatttgttgcagtgtgttattggaatgagggtcttttggacttgctcttgcctagagcaaccgctgatttttccctcattatgaacatatcaggaatggccaattcatcactgaatattttcttgatgttcatgattcctaacactatgaagggatggctgacaattttgactttggaggtatgtacctgatcctgtcattctgttttttagttaagaaaagccggatctacccttatgtattttttcatgcggttttgcctacattatgctataaattacatcaagcctaccggtgctctcctacaatatctaacaaaggtttaggtatacttatatttctgttagacccgaaatctcatgaaagagtatgtatttgtgttctctatttaacaatgtgtgattcattgaagatagaatcttaaagatatgataatttgaatcaagatcactaattatgcttcaataccaaatggccatgttggtggccatgtcgtagttgtcgaattaactatgaacctatctcagcagttgtcgaattcatgaataattttccctcttttttcctgtgtcgtttatttctatcatttacattggatttgattaggaaatgaaaaatatttatcacatcctaccatcacagctgttttttttttctgaggtaggagtatgtagtactccagatattgagtccagaattattaaatatgcgtgttttgtgtttagatgcgagaaagactgcatgaccaaaatctttacttaattcatgcaccacgcacatgcatgaaaaagtctgaatctttccactggtcatttattttgctcacggccaattcgaagagctatgagctattcgtatttcttgcctcacaccaatcttaatcctaatgtttggggaaaaaaaaaagagattcagtctgtatctttactttacgcaaaaacacattgttcctttgtattttgcatttcagaattcagttatgcctaggaatagccttttgtcctataattaactaatcgaacaacaaattgacgtcgggaaaatctctctaataatcaatgtctgctccaattgtttcttaccattcatgctctgtacttgtgcgtgatgataccatgccttcatagcatataactaagtttgcattataccttcttatcagtctgttgtgtgcttggctaagcaaatatattggagtgctattctttgtataggcatgtaattgagcttatatttttctggttgtaggtaatctttacataaatgagttgttttgatctaataatccagtattctgttcaggctttacccattcctttctattaagtgtattgaatcagctcattgacgtgttgctaattatcctttcatgtgcatctactgaataatgttgcagggttcagtggaatctattcatgtactgtgacctgaaaaatatgatattatcagggattgccaacttgcaaaattgatttgattgataagaaatccacgtcccattttcaatggctcaatgcgctcaagagtcaagaatctgtgctggtaatggttgctacacgaacttttctgcaattacaggtttcaatcatttgctccctttatgttctgtgcacttttcatacagtatttatcaaggtaagaacatggatcatggatggcatgtactaatgtacatatttgccaaactatcacctttctaaatatggactttcctatttcagaatttagataagatttagggctgacacttgtatttagtgattagtacaatttcagagttttgtcatttttccttggtgcatcataggtcaattgaggttcattaattcttgccaagctttatttctgacaatttttgttttccctctacctgtgtttctacctgacaacttacaagcatgaatattggtagaaaaaaatagtactataatttgctcaaataagtaaactaggataggagatgatttggtgtggcttgagacaaagctaaattaatcagcaaattgataatcagttattcttgataatagcattttaagaagttgttttcagttttgcaaaaatagtataaaaaagaagaaaagttgtttacaattttttaagtaaacttgtgagctattatatgtgatagtgcatccgttatttgtaagataaatgtaagccgtttactctcaaaagtttaaatgaatgaaccaatgcccacctttcgttttttctggtctcaataccttttatcgcatataatcctttatgttgttgcacgatataaaataatggaatcttaccaatgccctgcaggtgaaaacattacagcgtacattatagttcatcattctatcatcgacaactaataagacttttacggctccttcgattactcaggcctcggtgcagctgtgccaattggattagcaatgaaaattcctaggcgtactcacacatttgcatgggaaaactcatatgtgattccaaaactaatgttgcatcacatatctgttatgtaaatcaaagttaacagtacagcgagcttgatgttgcaaatgtattgtcttacacgatttgtctattgcagttttgctatatatgaaatgcttcttgaatgc

SEQ ID NO: 20579 - DNA, 1126 bp, Oryza sativa
  ref <308>: DATABASE ACCESSION NUMBER: AK099159
  ref <309>: DATABASE ENTRY DATE: 2002-08-28
ttgacgcaaacccccacaagtaccacctcgcaaatgctccattagctcccgaaatccaaaccacccccctcctcccctcacgggctcacggcctcacccacccaccaacccatccatccaactccgcggcggcggcggcggcgatgacgacccgatccaacggcgagcaccaccacgggccgccctcgtaccagcagcggcgcccgcactacgggggcgggtacggcggcgggtcggcctcgttccgcggctgctgctgctgcatcttcctgctgctcaccttcctggccctcctcgcgctggccgtcgcgctcgtcgtggtgctggtggtgaagccgcggaagccgcagttcgacctcaaccaggtgtccgtccagtacctcctcgtcaccccgccgtcctccgccgcctccgccgtgggggggaccgtggccgccgcggtccccgccgcggcctacctctccctcaacatcacgctcctcttcaccgccgtgaaccccaacaaggtcggcatccgctacggcgccacggcgttcgacgtcatgtaccacggcgtgccgctcggggtggcggccgtgcccgggttcgagcagccggcgcacagcacccgcctgctccagacccgcgtcatcgtcgaccgcttcaacgtgctccaggccgacgcccaggacctcgtccgcgacgccgcgatcagcgaccgcgtcgacctccgcatcaccggcgacgtcggcgccaagatcctcgtgctcggcttctcctccccaaaagtccaggtgtcggtggattgcgcgatcgccatcagtccgaggaggcagtcactgacatacaagcaatgtggcgtggatggcctaagcgtctagcagcagcaaccaaccaccacaccatcgcagcaacagcagcagcagaagaagaagaaggatgcagaaggcttaatctaatggagatagataagtggatgtgacccgtgtttgtcgattctaatctctctttctctatctaatcctgggttccgattcctgtacgtggggggtaaattttgagctctctcacctcaccctagaggaggaggtcgccgctgatttttgtgaattactgtccggtaattatcactatcgcccaattcgcc

SEQ ID NO: 20580 - DNA, 1441 bp, Oryza sativa
  ref <308>: DATABASE ACCESSION NUMBER: AK070891
  ref <309>: DATABASE ENTRY DATE: 2001-12-06
ggtccgtcgcacgcctccccccaatcctcgtgagccctatccgattccgcaccaccgctactcgccgccgtctcctcccctcctccgcgctccgcctcacccgcccgctctcctcctcctgctccgcgtcgccgctcgccgtcgtagcctccatggagacgccgccggagaactaccgcaccaacgtcggcatctgcctcgccgacccctccctcaccaagattttcaccgcgtccaggatcgacatcgccaacacatggcagatgcctcagggtggtattgatgcgggagaggatccgagggaagctgctttcagagaattgagggaggaaacgggtgttacatctgcagaaatggtggctgaggtccccgtttggttaacgtatgatttccctgttgatgtgaaagaaaagctgaatgctaggtggggaggaacgaactggaaaggacaggctcagaaatggtttctatttagatttactgggaaggaagatgaggttaaccttaatggtgacggatctgagaggccggagttttgtgaatggacatggatgacacctcagcaagttattgaaaaggcagttgaattcaaaaaaccagtatatgaggcagccctgaaacactttgccccatatctacagtcagatccagcaactacaacttcatcatagctgcaacgaatttcctgaagttctttatatagagcgctctcatgttgccatagatccacaataatttattagtatgaattaacggatgctagtatctttgaatacttggcattatcctgacaattattatcccaacattggatcgaagtgtgcaaactgatacaataattatcttgttactttactccgtaccgtatttctacctccaacatcctctcagtatggaattcttagaaaaggaccagagagtttctttgacaacaaatatcaaggcatgaaggttgctgtggcttttgttgtgcgaggacaaactgccctttatgctttgtaccgtgtcatgatattgtcccctatagagaaaaggaaatgtggttaggaagatgtattgcttgctcctccacctccagatgtggctctgattgtacaagatttggagtaccagtagcagcatgaagtgtggggattcttaaatgccaataaaggttgacctcgagcattggtgaggaaagcaagtcgactgaatttactagtccctcatgaactgctttatttcatgtgtgtctgcttcttttccctcatgaacttgcgcaggcttgatgcctgctagtagtagtgtactagtaccttactaacttccaccccttttctttcgtgaaccatttaactgctgtggtgtttagacagaataactgaactgaacacaaaagtagagtattgtactacttgtatttacaccctgaagatggattatttgggtatcttcaatgctc

SEQ ID NO: 20581 - DNA, 2791 bp, Oryza sativa
  ref <308>: DATABASE ACCESSION NUMBER: AK070892
  ref <309>: DATABASE ENTRY DATE: 2001-12-06
gtctttccctcctcgagagaggagagaaaaagggtggcagaggcagggcaacccgcgtaccagccaagccaacccagcccagctgcgtcgtcaccatctcctcctcctcatcctcctccggctcgtccgccgccgccgccaatccgttgttccgagagcaattcaaaggaagatagccagcattgaatagaattgtctcggtttctcaaagtcctcaatgtccaaagtattggaaagaagaaattcatttggtggtagcactcctacgagttcagcttcaggttcaagaaaggatgagaaaacgacaccccattacctaagagcttctacaggttcttgccataatttatgcaaatatggacacaaaaatccttttgaggaagagaagaagctttcaacttcaggaggcagaagaaagaaacttcctagtcatttaaataatttgacgttgcacagatcagctatcttggatagatcaaaggatgtcaggcagagaaatctttctctagccaagtcgagtatatctctgggtgaatctgaccgcattgctcccaagaaaacacaagcaaatttgaaaggatcctctgatcatttgattacacgcacttcttcatcagctgatcataaaaacgtgaaccttgatggaagaaagaagcatctaacagttgcacagaagacttcagctgattcaggatcttccaatggagttcctaaatttgacaaaaaatcagcaatgccagttaagggaaccatagtgcctgccaagttgaagctggcagagatgccacaactggaggaatctagaactatggaaaaggtcacaacggtcaagcaatcatcaattaagagaccgacttcattgcctactaagcttaacttgattaagcaagtgcccgtgccatctcaggtttctagtcatctactttcttcaaaagctaaacgtactgtaaagggagagcttacatcttcaccagcaactgttactggtgtgcgtcgaagtaacagtgataaaactggaagaagttcgatgaattcaagcaagccaagtatcaatgggaaggaaggcttgcatatggccagatcatcattctctgtagaatcgaagatggatgtttctgttgtaatacaagaacatgatgtgcaagattcattcataagaggtcttcatgtggagtcgacactggcaggagtgtcttcagataccacagaatgtgttgatgaatctagatcagcaccagaagaaataattaggcctgtgtcaggggatgatgggatggaaagcaatcggaagaatgaagcatcaggagggaatgaagaacccctgcagagctccattgtaacaggcttgctgcaatcatcggatgatcagcaactcaagaatgcactgagcaatttagaggcagaagaaaaccaaacagacgatgcttctccttgccaatcatctaaaaactcgatagctgtggaaaatgcagttctgggcgactctctatcaaccgaaaatagttcagaaattgaagctgatggagtgaaagccaacgctagcatggagtctcaagacgctgaaggtaatgaagaagaggaagcccatgaaggccttcaagaatctatagaacagttggcactcggtgaaaaacatgctaaggagcctggatcttttcttggttccacctcaggaaatacagtggaagatgtcaaggctgatgaaatatttgagggttggactaataacagtccttcacactgccaaccaatttcagaaacttcatcagatggtgaacttctgggggagccaaagtctgtgcaaattcaaccaagtgattctactctacaaacagatgggttagtgatttctagtactggcaacacctttgaacaggatgaactgaaaccagggtttttccttcaacagtcacctgaagaactatcagaggatgaattttacgaagagtatgattttgagttaagtgaattagatgaatctggtacagaagatgaaggaccaacgatcaataaaaacagctatgatcatttaaaggctgatggacaacgaccaaaaagaatctcagcgcttgaacaggatgatgatagtgccacaccttacaaattgaaatttaagagaggtaaaattgttgaactccaaccagacagtaatggcccaagaaaactcaaatttagaagaagaagtgcaagtgaattttcaagcagtgaaggcctgtcagctagaagaatatataagatgaatagcacaatagatgctggaccttctaacctagatgtggaatctcctggtgtgaaactgcgacaccaagatacacaagagaagaaagatgcacaggggctgtttaataatgttatagaagaaactgcaagtaaacttgtcgagtcccggaaaagcaaggtaaaggctttagttggtgcttttgaaacagtgatcttgctccaggacggcaaacccgcgtctacaccacatgctggcaattcaccacatttatttcatgatgacgagggaaatgcatctgagcaagctgcatagatcatgtgtgcctttttaacattgccaacttggcggtcatgttttcagctttcttcttcttcttttttatttttttttctgatctggattaatgcagaggatgttgtgtagcttgtacattaaatttctttaacaagtaatattttctcaacaggtttagagtataataagtagtcaatgtacttgtaaatagtgatgtcaggtttatttcattgtaaatcaaatgagaagttataaaaccaagtgtgctttacttgt

SEQ ID NO: 20582 - DNA, 1592 bp, Oryza sativa
  ref <308>: DATABASE ACCESSION NUMBER: AK070893
  ref <309>: DATABASE ENTRY DATE: 2001-12-06
gaaggaggtgagatgaagccctaccttttgattgggatttgctcttgaatctgcttccaaaccatcgattcatcatccatctcttccagtcttccttcgcattctcctggaaaaaaatcagaaaagaaaaaggaaaaatctcttgtactctcctcgattctgcaatttttgtttggttgtcccaacaaaaatcccccaattctccccaagaacaggagcacacgaccctgttcctgtcccctagatctgcgtggaggcggcgagaaaacctcaatccggcacaaggggcttgtggttgataccccggagcgccgtctaattccaatcttggtagctgccggcggtgcttccggtggtagacgaggagatggtgccgtgggaagggtatgtgagcgacgagacgatggggacgttcgcgcccatcgcgctgtactgggtgtacgccggcggctaccagctggtgctgcaccggcggccgctggagcggtacaggctccacacgcgggcggaggaggaggagaagaacctcgtcgccctccccgccgtcgtccgcggcgtgctcctgcagcagctcgtgcaggccatcgtcgccatgatcctcttcatggttacttcagatagttcagcagttgtagttcagccacctatcatcattcaagctttccagtttttggttgcaatgcttgtcatggattcatggcagtattttgtgcaccgctacatgcaccagaacaaattcctctatcggcatatccattcacaacatcatcggctgatagttccctacgccattggggctctctacaaccatccattggagggactccttctggacaccgtgggtggtgctatctccttcttggtctctggcatgacaccaaggacttccgtgttcttcttctgttttgctgtcctcaagacagttgatgatcactgtggactttggttaccgtataacatcttccagtccttgttccaaaacaatactgcctatcatgatgtccaccatcagcttcaaggctcaaagtacaattactctcagccttttttctcaatctgggacagaatactggggacccacatgccctacaacttagtaagacggaaggaaggcggttttgaagcaagaccactgcgagactagcttgaaccgatggaagtgtatagaactccagcaactcagtgagatacaatgctctacctccctttcatatgtttagaacctcatagggaccaatctaacttcgaagatgttgaagctgttcaagtactcccagattttctttttcgcgtcttgctggaagcaatacgctagtcgggatttgggaagacactgaagctcttgcgcgatgcttgttcttacacctgctgttaatctagttagatcggtcacctggaatgtgtgtggtactgtatggtttgtcttgatggcttttctccttgtcatggctattttttgtgcagagctggcatttacattgctgtgcagatagtgtatttggaatcacacttctgtatgtacccccaattatttatgtaactgaatatctgggcatggttggtaacttcaaagttcaaaccaatctttatct

SEQ ID NO: 20583 - DNA, 1057 bp, Oryza sativa
  ref <308>: DATABASE ACCESSION NUMBER: AK070894
  ref <309>: DATABASE ENTRY DATE: 2001-12-06
ggttgttgttgttgttgttggcttcgctttgctgctaagctagctggaggaaggaggaggaggaggaggaggcgggatggggcgcgggaagatcgagatcaagaggatcgagaactccaccaaccgccaggtgaccttctccaagcgcaggagcgggatcctcaagaaggcccgcgagatcagcgtcctgtgcgacgccgaggtcggcgtcgtcatcttctccagcgccggcaagctctacgactactgctcccccaagacctcgctatcaagaatcttggagaagtaccagaccaattccggaaagatactgtgggatgagaagcacaagagccttagcgcggagattgatcgaatcaagaaagagaacgataatatgcagattgagctcaggcacttgaaaggtgaagatctaaactctctgcagcccaaagagctcatcatgattgaggaggcacttgacaatgggatagtgaacgtgaatgataaactgatggaccactgggaaaggcacgtgagaactgataagatgctggaagacgagaacaagctgctggcttttaaactgcaccagcaagatatagcgctgagcgggagcatgagggatcttgagcttgggtaccatccagacagggactttgcggcccagatgccgatcaccttccgcgtgcagcccagccaccccaacctgcaggagaacaattaagctgctaggttgccccgccacttcgatcagttatctcatccactgatccaccactggattgaatgtcctagtgcattgtcaactgtatccctgttttcatgtctgtttcgatgaactattgagcatgtcatatgtgagttgctttgtgtgccaatatatagtctgtctctagtacaagctctgtgcttgccattctgcctcgctgtagatagcaccagcaatggagctagctcagatatcagtaacttcgtgcaagctgcaaggtgtgcttgtgttatcaccgcatttgtcagatggtgaatagtagtttgtgattgtaacaaacaatttatgcaagcttggtttcatgct

SEQ ID NO: 20584 - DNA, 1198 bp, Oryza sativa
  ref <308>: DATABASE ACCESSION NUMBER: AK070895
  ref <309>: DATABASE ENTRY DATE: 2001-12-06
ggccgccaatagctcgccgccgtcgaaacccaaaatcttctcttcccgtacgtgagaagcgccaggtcgtcgtcgccgccatgggcgtggaggtgtgcgtcaaggccgccgtcggccacccggacacgctcggcgactgtccattctcgcagagggtgctgctgactctggaggagaagaaggtgccctacgagatgaagctcatcgacgtccagaacaagcccgactggtttctgaagatcagcccagaggggaaggtgcctgtgtttaacggtggtgatggcaaatggattcctgattctgatgtgatcactcaagtcattgaggagaagtacccaaccccgtctcttgtcacccctcctgagtatgcatcagtgggatcaaaaattttctcatgcttcacaacgttcttgaagagcaaggatccaaatgatggttcagagaaggcacttcttactgaactgcaggcactcgaggagcatctgaaagctcatggcccctttatcaacgggcagaacatttcagctgctgaccttagcctggcaccaaagctctaccatctccaggttgctctggagcatttcaaaggctggaagatcccggaagacctaaccaatgttcatgcttacacagaggctctgtttagccgcgaatctttcatcaagacgaaggcagctaaggagcacctgattgctggatgggcaccaaaagtgaatgcgtaagagcctgcccttatgctctggtgctgcttggacaccatgctgtttatctgatcggtccatgtcagtggtgggcactactactactcttgtgtagcttgggtgcatgattgggttggaataatgtagcctcatccgttgagtaccttgatatggttgttgcaagtgtgcactttttctatgaactatctcctgctggcttaagtcgaaaccgtgggtcggtttggccttatgttcaactaagagagtgcatatactgtaatggaacctttgctagtacaatatgttatatgaataatggagatgcagcctgcagctgctcttgcttggagcttatgatcagtatattcagcaatgtagtatgtatcactgtatagtgtttttcacctctagttcaagcctgcaaacattagatttgctggtgaagttgttatgcaataatgcaaagtggagcagtataactgacaccatgtttcatc

SEQ ID NO: 20585 - DNA, 1867 bp, Oryza sativa
  ref <308>: DATABASE ACCESSION NUMBER: AK070896
  ref <309>: DATABASE ENTRY DATE: 2001-12-06
gaagcactcccagagccaaagccccctccacatcccaagttcctaacctgacctccaccatgagagattaacatcccaaccagctgctgctcgcaacgtacgtagcatcttgcccgcccctcgtcgaagtccgacccgcagctagctcagccggcggccggcgagcacaacgtacgtggtggggtcgcactcgcgcaccaccggcggagctagctagctagcgttgcccctgtctctgccaccgctcgtcgccgcggccggcctgcctgtagatcgtacgccgacttcgacgacgtacggccacctcctcccccaacgaattagccatacggaaggacaagttttttaattaaggggtaaagtccatcttactctccaaatatggcaaaggcaaagaaaaagaagaagaaaaaaaaccccaaagcttacttttgaataattggattggacagtcataggaaagaaaaaataaatgaatggctagccgcccccgtcgcactgctcgtgcaccaaaccgtttcggttttgaggaagttagagttgagccagaggcagatcatgaggaagactccatcattaacatgttggtagctgatttggaagcccatgagcaaggaacatgagcacttctgaaagatcatatggttctaaggatggctactacagtgaggaggaggactcctttctggacatgttggttgcggctttgaaggcaaagctatgtgtgagggcagcacgttgggtatcgcaacaatctggaatggaatgggtgatggagacaatggaaaacccatctcaatgccaagcaattttccgtctgatgccagatcaaatccatgctctgtttgggttacttactaatcgatacaatcttcatggatcaattgaggtatgcccaatggaagcacttggaatatttttgtacatcatggcggggggcaattcaaatagggccactaataataggatgaatgatgaagaattccagccatttgctggtgcggctggtgcagtggatggagcacacattcattgcattgtggcagtggatgattccattcaacacaggaaccgtcaccacataacttctaggaatgttcgtcgctattggattggacgaccgtgtcatttttgcagatgttgggtggctagggtctgtgcatgatcaacctaacagaagcagtacggggctatccgtttgttttcccaaggctaccatgggggaaatatttccttgtggactcgggatatgctagccggtatagattcctaccaccttacccacatgtttggtaccacttggatgaatttgcgggtaataagggagcagccttgccccatggaaaggaagatacttttaactaaatgcacagttcgtagcgtaacatagtggaaaggacatttggagttatcaaaagccagtgagaatcctgagggaaataccttatttccttaggagtgacgaccataccaagatcatacattgtgcattagttctacataacttcaggattgacagctccgacatgtatttccttacacagaacccattgtacaatggataccccatcgtttcagatgctccaccctacgtggctggaacgatgtacctaacagagcggcggcaatgaatacactccgtgataccattgcagatgaagtttacaacaggtaaatggtatttagtttgcaccgtttaaaataattaacatagccatgtctgtcatggatatgttctctatatgtattgtgtttctaaaatctgtctgtactcgtccatgtgtagttcactgtgttcctactactgtcgtgtttgtgtgatttatctctagcatcctctcatgcttaatattaccagctttgctct

SEQ ID NO: 20586 - DNA, 823 bp, Oryza sativa
  ref <308>: DATABASE ACCESSION NUMBER: AK070897
  ref <309>: DATABASE ENTRY DATE: 2001-12-06
gtggagctcgaatccaccaccaccaccaccaccaatcggagccaccggagagcggcggcgcagcagacggcggcggctgcggggggcgagaggccgattcgccggaggagagaaggagagagagagagagatggcgttcacgatgcgcgcggtgaaggtgccgccgaactcggcgtcgctggaggaggcgcggcaccgcgtgttcgacttcttcaggcaggcgtgccgcgccatcccctccatcatggagatctacaacctcgacgacgtcgtcaccccgtcccagctccgctccaccatcgccaaggagatccgcaagaaccagggcgtcactaaccccaaggtcattgatatgctcctgtttaaggggatggaggagctgggcaacatcaccgaacacgcgaagcagcgccatcacgtcatcgggcaatatgtggtcggccaaaagggactggtgcaggatatggagaaagaccaagggtcctcagacttcctgaagaaattctacactagcaattactcctaatctgtgctgcaaactcctcctccttcagtaatacccgagaagtgatctgaataagacgctgagaacccacagctttaattgttttatcactggaatctttttgttattctgcttgatccttcaatcatctgcgcagtgtggcgctgttgctagtgaattgtttgtaacttgtagactgtactctgcaaagttgatgttcatgagttcataccgtgtgtcaatgggttcgaactcatgtacccagcacatgaccatcactcgtttgtcgtgaagtcattgattcgattaatctgtagc

SEQ ID NO: 20587 - DNA, 4268 bp, Oryza sativa
  ref <308>: DATABASE ACCESSION NUMBER: AK070898
  ref <309>: DATABASE ENTRY DATE: 2001-12-06
ggtcttctcctgcgcgagagactcgaggactcccctcccccccctctccaaaccctcgcctcggctcccccgcagccgcgcacgccaccgccgtcgcctctcctctccaccgcctccccacccacccgctaggtttccgccgctgcccggggttctcgccgccgcgccgccctcccccacgctcgctctccgggtgggggtggtgccgcccctctcctcctccgtttccaggcgggtgccggccgggggggtctctcgccctcgtctcctctccccctggtcgtcggcaccggcggctgggaactcgccgacgcgtcgtttccccgcgaggccgccgcctagatctggaggagggggtttgggggtaaaatactgtttgttagacaacaagattgagattctcaaacctgttggctggtgctatatcatttgcatttggttgaactcgaaaccaaaaggtgcaatactgttggccacataacactattcagattctcaaaccttttggctgatgctgtatcatttgcatttaattaaagttgaaaccaaaggctggcaacttgttaaaattggtgtaccatttgttatttgaagccatagcatatctcagctcctgaacaataaggtgctgtattcagcacagtttaagtgtgaaaaagaatggatagaaaaatcacactttgttgccactggtatgcttttgaaagaaattaggggtttggatctctatctattctagttacaatggattgcaacaaagatgaggctgttaaggcaaaagctttggctgaaaaaaaaatgcgggagaaggatttcgctggtgcaaaaaggatgattaacaaggcacaaaatctctccaaagatgttgacagcaacatttcacaaatgttaactgtttgtgatattcattgtgcttctgcaacgaaggttaatggagagattgattggtatggtatacttcaagtacctgtcacagctgatgacacactaataaagaaacaatatcgtaagcttgctcttttgctacatccagacaagaacaattttgcaggtgcagaggcagcatttaaattagtgggagaagcaaacatgacgcttacagaccgctcaaaacgttctgtctatgacatgaaaagaaatgcctcagtcagaattggttctgcaagagttccttatcagcaatcaaggagaactgcacctgttagacctaccactacacctgtgaatctccataatgtgcatcaatcacaacagcataagccctcaaatccttcagactcacaaacattttggaccatatgcccaacttgtggcatgcgatatcaatactacctttcaatattgaagaaagctctccgttgtcagaattgcttgaagccctttgttgcacttgatttaaacgagcaagctgttccttctggggcaaatcagaggtctgctggggtgtggaaaagttcaggagcaccacaaaactttccaggttcacaagcaaatgtaggacagcaagctcagaattctgccaatccagtccatgctaattttggttctcataatgcacatgtagaaacaaagaggggagctgatggaaacgaggctggtgggctaaagaacaaaagaaaatttgctaaggcaacagggaattcttcaaaagcttcttcagttgctggatcaaaaaagcgcagaaaagctatgtttgaatctagtgaatctagcgcttcagacaccagcactgatagcgaagaagagattattgaagatggtcctgctgcaagtaatgtagggccagatcaacatccccgcagatcaagcaggcagaagcaagaagttaagtataatgaagatagcgatggtgacgacactgactgtcacggcaatggtgatgatggttttgtgagttctcccagtttgaaaaggttaaggaaaggcggtctgtttcatggtggtgaaaacaatgaaactaagttgaatgctgacacaactgggcctgggcatgatggtccaactaatggtgttaataattacaataatacagaagacatagagagaggctctgcttgtgctgagcaaatcaagagggaaacaatgtctggtggaggaaatagtgctgagaaagaaaaattatcccattctgtcagcaacaatggtctagagtcaaactctgatgatgctccaaatgaggttatttgtgcggattcagaattttttgacttcaatcaacttcgacatataaatcagtttaaagccaaccagatatgggcttgctatgatagtcaaagctgtatgccaagatactatgctcgaattacaaaagtaaaacatgtcccgaagtttatgttaaatttcatttggctggagtttgatcccaaaaataaagcagaggctgcttggtcttctggggacctaccagtgtcttgtggacgttttaagcatggagtgtcagatacagcaaaagagagcagtatgttctctcatgccattttctatgaaaaaaacaagacaagaaactcttatgaaatatatcctaggaaaggcgaagtatgggctcttttcaagggttgggatattgattggagtgcagatgctgacaaacacaaaaactatgagtatgaagttgttcaagtcctctctgatctcactagtagcactagcatcattgtcatgccacttgtaaagataaaaggctttgttagcttgtttattcagtctaaagaggcatccccatatgtgatacctcaggatgacacactaaggttttcacattgtgtccctcgtcatacgatgattggaaccgaaaaagaagggattccagaaggggctattgaacttgatcctgcggcgcttcctctgaactttggagtggcttttgcttctgttgttccagaaagctgctgttcagtgaaagtgcagggttctggtgctgaacacataggttcatccagtggaaataactgtcacaagggatcggtggatgttggggagagccaacatgctacatgcgcaaatacagggttcgctacaaggacaacaaaggcagagatcaatgagcacaacgctcgatctgcagtagaaggtacagatgatgacgaggaacctgatgattttgcccaagcagaagtactatatcctgaatcagaattctttgaattttcagaaataagatcgatccacaaatttcaacctgggcagatctgggctctctatagtgatgtagataagttccccaattactatgcctgcataaaaactgttgatgtcaagaataatgaactgcaagtaagatggcttgatgcttgcccacagagtgaagaggagagaagattggtaagagaagatctaacagttgcgtgcggaacctttaagatttccagtttccatggtattcaaacttacaatggtacagagtacttgtctcatcctgtacaggccaaacctggtagaagaaatgaatatgaaatagttccttgccaaggtgatatttgggctgttttcaagaactggaggactggatggaccgcaaaagattataagaaatgtgactatgaattggtggagatatttggccacactgattcatccatacaagttcagcttttaagaaaggtggatggttatagggcagtatttatgccagacagaagagagggagctgtgaagacaataaggaaagatgagtacccaaagttctctcaccagattccttgcttccatctgacaaatgaaagaggaggcaagcttcgaggttttttggagctcgatcctttgtcagtgccagagatgtttcttttcaccgaatcaatctgagataagccttatcccaagttaatctgctagagcatttcttgtgatgctaccggaactaaaggttttccagaagttgggtagtccacaattcaatattttgcttagtgacagaagctgctggattttcagaatttgtatgtagcagtaatgttatgggccgcagcttttgcctattctccaatcctcactatgaaggcgttgtcaggcaatcgggaccgttttgcaagattagctgcagtctgaactgattaattttcctgcagctgctttacctagttaccgatagttgtatctagttctctagctggactatcaatcgtcctttctcttgtcgtactttgcattgttggaccatgtaaaattgaactgtgcgaggccagtctgattaattcggaaatctctgttggcctccctttcctggaacttaatgaattgagtccaacttctgtttaggttgccaattgacc

SEQ ID NO: 20588 - DNA, 2342 bp, Oryza sativa
  ref <308>: DATABASE ACCESSION NUMBER: AK070899
  ref <309>: DATABASE ENTRY DATE: 2001-12-06
gattctctcggctgcctcgtcgactccgacggtgccaccgttcccctttcgtctccacctcgcgcgcgcagctcacgacgctcgcccttgtcgcttcctggcgaggccatccgcggccgctgttgcttcttcctggacgccgccaccatctccccacccccacgcggcaccccgtctcgccctctctagggttttctcggatcaagaatcgctgtaagccacatttccccacccgtgctactcccgaatccgcaatccccatccgaagatccttgcgacctccgccccaagagtcctcgccgccggccagcgctaccatcttctcgcagtgcaagcagccatcgccttgtcgccttacttgccggcgacccagcgccgcttcgtcgtcgtcgagctagcggcgccgcagctctcccctggagccattgtcctgcaccacctccccgcggacacggtgccggctgcagccgtagtcttctcgtggatccaccggccaacaccgccaccaaccatctcgtccacggccatctcctcgcttctcatggctgctgctcgtcggctcctccacacctctccagttggtgcgtaggatacacactggtctgggatatcaataatgttcctcttccattgttacaggtttcatggctttgcagatgcttttgtagctttcatgtgatgacgagggccttcatttgtgcgaatatacacgagttgctggcatttcttcattttgcatagtacaaactctgctggtatgtgcaaatgaggccatatggatggttcatcaccatgaggcttcaatccatagtaaccggcaaggtcacaaatttataataacaggattgatgtgcaaatctgattagaaaagggagtaaactacaatcatgactcttttcactttttactgatgacatgcttcctcagttaatgatgcttttattgatccgctgcttcttccactccatgcggtacacctgtgaaatgtgcctgctttgactattttgtatacaacaatacaagtacccacctctttcctcttgacaagtgcccacctctccatcaacccctttccttctctctaggtgagtattaaaggtgcacatgagctagctatataatttttggtctttcttcaattgacatgcgtagaaaagttctattagtttctctattaaattgtctatatccagctttaccttcatatcacatccaggtaaattgttccttttcccttcacatggtgcatcctaaactgccagaatatatgccatgtgatacgtcttattttttgcgtgcacgtgtggatgacatcgctatatgcatgactgtcccttttgggtatatgcccaggatggcatcagtatgcacacccagccttagaagcaacaccatttgtttagaaggtctgcattatagccgctaatgtaaatagctgctgtcatatatatggtgtttgcttcttaaaattcttttgctttacataaaactgcaatccagactatgaacgagcacttatggttgaaatcctatagctcttaattattattactctgaatgtctactactttgctatgcttcttattttcagggtaaacatgtgccatgaaaagttgcattaggtaagtctcagccagctattgctgataatctggcatgagctacatttttgttaggctacattactgttgttatggaaaaatgaaaaggtattaaactggggtactattgttgctaatctgggatgagttagatttttgttgggctgcattactgttgttatggaaaatggaaaggtattaagcaggggtacatatgtgttgctaatctgggatcaactacatttatttcccagttaggttcatctctagcagcatcagctttatagatcttttatcttagttaatcctattgaatagtgctattttgccttaattttcctttcttatcttctggaatagcatatctttactttcctaattattttctacaataatataacatatgttgtaaatcatccttaggtgctgtattttaatcttaataaaagtctggcaccttcaagcagtctgccaacaaacatcttcatataccgatattttccatagtatctattcatacaccatgtaaccaattcgttcttccatcacctaaaattgagattaatgttatagatatattttaatgtttgagtaattgttgtgatagatatttttttattgaagtttgccttttggcgtccgcggcaacgccgcggggtccttgctagtacttaatgaacttgtagtctcctataactttctttggtacaatatttcctttccaagctctagctggtaacc

SEQ ID NO: 20589 - DNA, 3331 bp, Oryza sativa
  ref <308>: DATABASE ACCESSION NUMBER: AK070900
  ref <309>: DATABASE ENTRY DATE: 2001-12-06
gagcagatcagcaatatcagagaagccagcaaagacgtgcgtcgccgacggaatctgttgtgtgtgtgtccacccaatttgctgctcgtgtgtgttctcccgtgagtttgttgcttacgtgagtttgtgattttcttgggccaaagctaacagagcccacgacagcgcctggggcgagggacgacagcacgcggaaggcctcctgtagcccgttgacctcgcgcctcctggtcatcgacgccgcccaaggcaccatgcccactggatttgtgcgtgacgaggccaagggaggcaaatctggtggcgtcgcgcccctccgccgcccggcggcacatgtcccgtgctccttcaccgctaggagtgcttcgagcaagaataggggtggaggagtgctcgcgacaagaagtctacgaaaaggcaccgacaccggcgagaggtggcaagaagtgctgtaacgcatgtctttcaggctctcatcactcacctctcgtctcgctagcaatgtcacaccaaatcctcaacacctcagcacacattcaccaccgcgccctgcatcggcgacttgccagtcacggccaagccttccaggatgttagcagggaaaatcaccattggcctcttcggcgacgaggtccccgccggtgcgtcccggctcctgtcgcttggtgtcggctagttaagatagtgtggggctacatgcaagcaggacggtgtggtgtcacacccggccatcccggcgctgaccgaccggctagcggcgaagatggacgccgcacgcgcgcgcaatgcgatggggacaggagtggcgtccacccaactcccacggcatatggtgacggccggcgaggcagcggcggctgaacaactgagcttctagcttccgtcgtggaagaagcgaccgaacgggagagggagagagagaggaggaagagagaagcgaggaaaaagaaaaaaaaacaaataagtgccacgtaggacatgtggggttattgttttttcttttcactgacatgcgggtcccctaagtgccacataggatgaaaccgctatcaaacagccgagggactcaatctgctctggttttcaaagatggaggagacgttatacccggtattgcgattgagggaggttatttaatcaggggcaagagttgagggaggcaatttatacttattccttacaaggcagggtccgacatttccagcccaaaagaatcggacccatttattcggcccaatctggcccatgctcggggcctagtttttccaggtaaagttgaccaaaagtcttcacctagtcgtcgtcttccctcggccggcctgaccatgaaaataaacgctacccaacgactccgcagtcacctcaccacacgtcgatggacacggcgcaccagtgaaccccctcggccccaccaaccaccaccaccatcaacatcctaccttacctctctctggcaaccgggtcccacctaaggtccacgctacacccggtccaccaacacccgtgggccccaccgctctctcgtcgtcgcaccgaccccaaccgaagcggtaacaaagccaacgtcccaccaccaccacacgcgcgcgctcgcacagacacacacacagcacagcggagaaagagagagagagagagagaaaggaaaaatcggcaccaccgcgaaaggggggaaaggggggaaggaagcgaggcgaggctagggtttcgattcgatcccgccgctgccatggacgccggtgatgcgtggggccgctcctcctcctcatcctcctccgccgccgccgccgccaggcgcctgcaggcgcgctacggtaagctcacacgacgacgggtcggctttctctcgatccatcggtcgatctccccagctgttggattgccatgggctgcgatttgatgcgtgggtggtggtggtggatgtgtgtgggtgttggctcagatctgtacatggggttcgacgacgcggacgcggcgggcgtggaggaggtggaggcgcgcggcggcggggaggcgtacaactgccccttctgcggcgaggacttcgacttcgtcgccttctgctgccacgtcgacgacgagcacgccgtcgaggccaagagcggggtatatgccacatcctcccatctgacaccgattgtaaccgtcagtatcagattgttgtgtttgtgattggttggatacttggaccgggccttggtttcggaaatgtgcaattcgtaggcacgcgtgcaaattttttttttagaacaggatgcctccgcaggtatcaacaggtttcaactgtgacgaaccaagaccagcgaaagcttgcaggttttaggagttggaattttggactttttggttggagttataagattggttgttttggggtttgggtaggtgtcttcgtttgcttgattggagaaaaataattcgtagtggctatccttgtcggggagaatgattgattttaattttggggggtttagttggggacttgagttttttctgtcttttggggggagtttgggactggcggaaaacatttcttgtgttgttcatgctagtcattagcctattacactctactgtagtttttatttattttctttcttgttcttagtatctgatgaaatatgttctctcagctttctttattttttgtaaatctgtggtcattttgcagctattaagatcccagctctattctctccagattataaagcacatcagcacttgtttctcttgaaagtgaaacatccataccaaactgacaatattacatattttcatttcaatctaacaatattacatattttcattcaatctaacaatatgatgattgttcttggcttggtggttaggattattatttgtctatggaagaaaagagtggtactaactagtgatcactttatgttttgtgattgggacttgttcatgattaatagtgggattcagtacaacttattacaatatcctttatgaactagttcaccagttcccttgcttcgatcacaaaaatgggcataacttttctttgttttgtcttaggtggtgaagctcattgaaattgcaggaattttcatgttttattgctttcgtaggatcgtttacattatatttggatttgtgagatacaccctttgattaatatttgaaattatgatggtgcttggatacgagggaaggaagtttagatggttactggtattgttttatctggtgctggtttaggaaattctcttttatctatttctattttctaagatgtttttctcagatattggttgttagttctgaccatcttttgtaaataaaaataacagcttttgtctgttgtatc

SEQ ID NO: 20590 - DNA, 457 bp, Oryza sativa
  ref <308>: DATABASE ACCESSION NUMBER: AK070901
  ref <309>: DATABASE ENTRY DATE: 2001-12-06
gatctctgctctttccaatttccaaacaattccagcatcatccatctctctctcggtcccttcttcctcatcgatctctcgtagctacagctactcacccagccatggacggcaaggactccaccaccacccccgcccctgccccggctccggctccggctccggcgccggcggcagagcctcagacgacggggaacgcgccgccgtccccggagacggcaagtgatgatcggatcgaacgatgagctttgtctgtttggctttgtacagtgtggctgtgtttcattacttgtattttgatgtgttttgagtatatatgcatgctttggtgtcctcctcctagttgttggcatgtatggaggacatcatttgttatactatatatactactaaatattagtttgtcgaggtcgctattgtgtgtatataatttgacaaacattataggtttttatgc

SEQ ID NO: 20591 - DNA, 2681 bp, Oryza sativa
  ref <308>: DATABASE ACCESSION NUMBER: AK070902
  ref <309>: DATABASE ENTRY DATE: 2001-12-06
gattccagtttctcagcccaccagctcagaactctcctctctctctggacgacgcggcggcggcggccgagcggcgtcgccggagttggagaggctggccatgggagtccgcggcggtggaagcgcgctgggacgggctggggcctccagctccaagcgcacgaagcaaggaggacggggtggggccaagcgcacgaagcaaggagggaggcagagagcgaccgagcccggggacgcacaccaggtgttcgacagattgctcaagcgaggcgaccgtgcctccatcttcgacctcaaccgcgccctctccgacgtcgcgcgtgccagccccgccgtcgccatctccctcttcaaccgcatgcccagagccggcgccaccagtgcggctcccaatatcgccacctacggcatcgtcattggctgctgccgccgcctcggccgcttggacctcgctttcgccaccgtcggccgtgtcatcacgacggggttgaggatgagcccaatcctcttcagtcctcttctcaagggcctctgtgaccgcaggaggacgagcgatgcgatggacattgtgctgcgacgaatgcccgagctaggttgcaagccagatctcttctcctacaccattcttctcaagggtctctgtgatgacaagacaagtcaacaagctctcgacttgctccatatcatggctgatcataaagggcgctgcccactcgatgtggtggcgtataccactgtcatcaatggcttgcttagggagggtcagctggacaaagcttattccctgtttgatgcaatgctggatcgagggccatcaccagatgttgtgacttacagctcgattatcagtgccctatccaagactcaagcaatggacaaggccacacaagtctttactaggatggttaagaacggtgttatgcctgattgcatcatgtatactagtcttgtgcatggatattgctcttcaggaaagcccaaagaggccattgggattttcaaaaagatgtgcagacatggtgttgaacccgatgtcgttacttatactgcgctgatggactatctatgcaagaatgggaaaagcacagaagctagaaagatttttgattctttggtcaagaggggacacaagcctgatagcactacctatggtactctgcttcatggctatgctactgaaggagctcttgttgagatgcatgatcttttggatttgatgatgaagaaaggtatgcaacttggtcatcatatctttaacatgataatgggcgcatatgctaaacataacaaggtagatgaggccttgcttgtatttagcaatatgaggcagcaaggattgaaccctgatatagtcaactatggaacagtattagacatactttgtacagcaggcagagtggatgatgctttgtctcaattcaacagcctcaaatctgaaggacttgctcctaacattgttgtttttaccaccctaattcatggcctgtgtacctgtgacaaatgggacaaggttgaggagctagctttcgaaatgatcgatcgcggcatctgtcttgacacaattttcttcaatgcaataatgggcaacctatgcaaaaaaggaagggttatagaagccaaaaacttgtttgacttgatggtgcgcataggtattgaacctaatactaatacatacaatacactcattgatggatattgcttagatggtaagatggatgaagcaatgaaactacttggagttatggtgttcaatggggtaaaacctagtgacgttacctataataccattattaatggttactctcaaaatggtaggatagaggatggacttactcttttgagagagatggatggcaagggtgtgaatcctggcattgttacatatgagatgctgctgcaagggttattccaggctggaagaactgtagctgcaaaagaactctatctcaggatgattaagtgggatacggtttgaatttagcacttgcaacataatcagtctggtactttgccaaaatagttgcacctcagattccctccaatggttcagaaccgtgtttgatggatttacagattgagaatagaaatgatgacgctgaggatttgtttgctgctctctcgaccaatggtttagtgacaaatgttgtgacctactggttaatgatagaaaatgttgtaaaacaagggttgctagaagaattggatgatttatttcttcatatggagaagagtggctgtactaagttatttcacaaagagcaggtatgcaaggctggggattacctctccattctctaaaattaatcaagagaacttccccctgaagagtcgtaggctgagctgctgattgtgctggtttcatgtgggagacacgttcaacatataaagtttatcctgaaaaatatcgtcctgtgtgaaatcccaggctctttgatgatactgcctggctgcctgctgtggggatcgttttttgtttcttatgtggggattgtaggtatgaagagcactcttgttacgctgtatatgaactccggagaagtaaaaataacccaattcctattatagttctctaattttgtttcctttgttagctttctatgaaatgttagtactgctctcttatccttatactatgatccaaacaaaaacatttatcactatcctatattcatctggatttg

SEQ ID NO: 20592 - DNA, 2133 bp, Oryza sativa
  ref <308>: DATABASE ACCESSION NUMBER: AK070903
  ref <309>: DATABASE ENTRY DATE: 2001-12-06
gggagtttgccaatagaatacaaaaacagcaggtgaggagagaggagagaaaaaaaaacagagctttctctctctccctccctctctctctctcttcttccaatctgcggcgcgaggcggaggtggtggtggtggtggtgggcgccgccggcgagatgggcccgtaggcgccggtgtgggcggcatcctgtcctcgccgaccacccgcccccgccggtgcggcctcgccggcaagaagtctttgtttttcttttcttttttttttttcatctttgaagattggatccttaatttaggggcgaaaagaggggagtttgcaagaggaatcatccctattgggttgtttcttgctgctgggtaagatccaatccagcctctaggttaggtttgtttgctgttggtgaggagattgaagggttggctggtcatgttgggggaccagcgcaggaaattcctgctagagtcagcgagctcatcatctgaagaggttgtttcaagaagccggaaccttgcggttgagagctcggcggtggcggtgacggcggcgggggtgaggaagggagaagaggtggaggaggaggagctcttgaaccgtagaagcaagaagaataaggttgccagtgattcggggaattccggtaccggagtttgggactcagaaatgcaggatgctgatcagaatggtgaagccaacacaagcgagctcataggcgcgatcgggcgggagctggccattacatgcctgctccataccccccggtcttattatggtatgatagcatgcctcaaccggtccttctgctcccttatgaggtccgggcagctgtatagattgcggcgggaggctcgcattgttgagcacatgatctactgctcctgcaatgtgcttgagtgggatggctttgatccgtgccgccagcgctggttcaacatcccttccatgcctcccatagagtgcttcacgcttgctgataaggagtcccttgctgtgggaaccaatatccttgttttcgggaagaaggtggaggcccatgttgtgctgaggtatagcctcctaagtaactcttggacaacaggagatatgatgaactcgcccaggtgcttgtttggctcggcaagctttggtgagaaggcaatcgtagctggtggtatcggtgataatggtacattgagctctgctgagctctatgattctgaagcgaagacatggaccactctcccaagcatgaatagggcgcggaagatgtgttctggtttcttcatggatggtaaattttatgttattggcgggaaagctgataaccataatgagatccttaattgtggtgaggagtttgatttggagaagggcacctggcgtttgatcccagatatggcatctggccttaatggcggcagtggtgctccaccacttgttgctgttgtgaataatgaactttatgctgctgattatgcagagaaggaggtgaggagatatgacaaggttaataatgcatggatcactcttggatcattgcctgagaagtatacatcagttaatggctggggtttggcatttcgtggttgtggagataagctcattgtgattggtggaatgagtgcacctggtggtggagtgattgaaatttgttcatggatacccaataatggacagccagattggaaaatcattggcagccgccgttctggaagctttgtgtacaattgtgctgtgatgggctgttgacataccagggctattacattattgactgtacatcttgaccaaaaggaaggataaaagaggcaaattcttctgagcttgtttagtgattgtgctcgatgggtaatttctgccttctctggcattttaggctgagctgaagattgggtagaatttctcatgtagcttcttacttgcttatgtctaatctcttcattttaattccatttggagggcctgcaaatggtttccagaaagtgggacatgcagcgcagcattagattaataatttggtgcaacctcaacattttgatctaccttggataccttcatgaaagttttttagctccagagagtaggttacattggcaaaccatttgcccatagattgtaagaaataaaggaagaaagaaaaaatgtccttgttgacg

SEQ ID NO: 20593 - DNA, 1319 bp, Oryza sativa
  ref <308>: DATABASE ACCESSION NUMBER: AK070904
  ref <309>: DATABASE ENTRY DATE: 2001-12-06
gcttgatgtgcagcttgatcagttcatatttttcaaggagagatgcttggagtccatcgaaagaggtcggtttgatcttaatttggtgacattttgttctaagcaaagtgttccttttttgcgcaattaattgggtttccgacttatttgcattgttttggagtgacaaagttgcttaattttggtgaatgtcatccaggtgaggatgccccaattgatagcaaagggtttgaaaatgccctctataccatggacatagggcacaatgatttaatgggcgttttgcacttgtcctatgatgaaattcttcgaaagcttcctcccatagttgctgaaatcaggaaagccattgaggtacatttggttcaagtcaataaaacagtagcacatatgataaattattctcagtaaacagctcaaatttttatctaaacttctcccttaaaccagtaagttctgaagtaaaaaaaaaatactatcagttattcagagaaatgatcattgaacccttgccaaactgcagactttgcataagaatggggccaagaagttttggatacatggaacgggtgcattgggttgcctgcctcagaagcttgctacgaggggggaaattgatcgtgatctcgacgggcatggctgcatcacaagaatcaacaatgttgccaagaggttcaacaagttgagcgaaacctgcgatgatctgcgcttgcaattcgcaagctcgacgatcgtcttcgtggacatgttcgccatcaagtatgatcttgttgccaaccacacgaaacacgggattgagaagccattgatgacatgttgtggacatggagggcccccttacaactatgatccgaagaaaagctgcacggccaatgacaaggacctgtgtaagcttggtgagaagttcatcagctgggatggggtccacttcaccgatgctgcaaacgagatcgttgcttctaaagtgataagtggcgaattttccattcctaggatcaagctgaccgccagcgttgtcaggcccaaaaaggctaaaaattcgcggttatgaaaaattaagattattttggtttcccaaaggaaatggtgaaggtgaatcactaacagatctggccaacagaagggaattcatttgatttcaggcccttttcggtcattgaggaagaacagaatatgaagaatttcaaaattttattttttttgtacacttggggtgtgtgtgtatatcctagggggttgatacgtgcaggttaatactatgtataattcttttctttaattttgataaataaatagagatgaatctataaatttaaacc

SEQ ID NO: 20594 - DNA, 1320 bp, Oryza sativa
  ref <308>: DATABASE ACCESSION NUMBER: AK070905
  ref <309>: DATABASE ENTRY DATE: 2001-12-06
gaccgttctccttcgcgccgccactctctccgagctctcgcctctcctcctcccccgtcttcccttcgcgcgcgccacccccacacacgcgaccatggcggcagtggcaggaggcgcagcgcgggcgctgtcgcaggcggagcaggacgtgcagatgatgctcgccgccgacgtccacctcggcaccaagaactgcgacttccagatggagcgctacgtctacaagcgccgctccgatggtatctacatcatcaacctcggcaagacatgggagaagctgcagctcgcggcgagggtgattgttgccattgagaacccccaggacatcattgtccagtcggcccgcccctacggccagcgcgccgtcctcaagttcgcgcagtacactggcgcgcacgccattgctggaaggcatacgcctggtacatttaccaatcagctccagacctccttcagcgagccccgtctgctcatcctcactgacccaaggaccgatcaccagccaatcaaggagtctgctctgggaaacatcccgaccattgccttctgtgacaccgattccccaatgcggtatgtcgatatcggcatcccggccaacaacaaggggaggaacagcattgggtgcctgttctggctcttggctaggatggttctgcagatgaggggtactatcctccctggccacaagtgggatgttatggttgatctgtttttctacagagaccctgaggaggccaaggagcaggaggaggaagctccagcacaagactttgctgccatcactgattacaccgcacctgaacaatggtctgctgaccagtggacctctgatgtggctgctcccccagctgctactgttggtgattggggcgcagctccagctccagttgctgctgccgaaggatgggatcaagcaggagcacccgtagccactgaagccgccgtcgttccaccggttgcgcctactggatgggacccggcagctcaaccagctgctcaaggctgggattaggctaggcaatcactttgagatgtcttccgcagcttaagttaaatatttcccgaggcatgaatgaacacccaaaatccaatgtgatcatctatagctacaccatgaactcaactgtttttaggaatttctagctgaacctgtgttgtttgtccgtccctatttcgaacaacaatgctgtgagggtgagctcggcaagatgtgtggtatatgttaagctttctacttttgtcctaagtttattctgtagcgtttatatcaatcttttcctcggtgcaatggcatggttctatacgctcagtttgttattc

SEQ ID NO: 20595 - DNA, 1768 bp, Oryza sativa
  ref <308>: DATABASE ACCESSION NUMBER: AK070906
  ref <309>: DATABASE ENTRY DATE: 2001-12-06
gatagaatccggtctccgattccgatcccctttcgatcccccttggtcgatctactagggtttccgatccacgaatcaacccaccagagtcgcccggccatgccttgggtttatcatccgcaacttgaattgctggccgttccgcaacaacctgaatcgtgtcccatggctgcggcggttacgcagcctgaatcgccggccatggctggggttgatcgtctccgcttggacggtgccatgcccccctcgtatccctcctcctggtctgtgctgccgcgggaggtcgtggttgtcgacgagatcgacgacggggaggagctacgccggtggaacatcctgagatgcgatcgcagggccggctacggcgtctgcgaggcagtggtggagggcgtgaagctcggtgcgcgcatcgtctccgaccggggcttctccgccctgtgcatcatcgtgagcaaagccgcgcgggctgggacgagaggccaagtctgcgccgcggtgctggctatcaagaatcatgtcatcgtcctctccgtcgcctttcccagaggtgatttgttccactccctcaagtgtgcgtgttcatccttctacctggtctacgacgcctccgacgcgtccatcaccatgatccccgacctgcaattctcctttcaccaccacaaagtgtcttctgctgtcaccaaggaacctctcccaatcgcttgtggtgttgcacattacctcgtcctcctaggccgtgccatgacgattaaggggatggatcagcacatagaagatcgtgtctgcctgagtccgctgcagcagtcatctttggctcatccatcgccatcgtccagcaccaactgcagtctgtggatgaccaagtcggccatcttccccaaagaggtggtgacgagaggcttttctgcaaataagatgctctcgttcgatggcttggctatgtgggttgacttgcatcaaggaatcctcttctgccaacactacgacttgttctccaattccaatgacagtggctctgtgccgttctactttgttgatctgccaccgggctgttgtaatgatgacatcaccacccgcccgctttctgactcctatccaccagagatgtaccgttctatcgtgtgtgtcggagacagcatcaagttcgtcaccattgaaggctacctccgcgacagcactgcccctatcgaggatcggatggtgactatgtggagcctgagaccccaggaatcttggtcgtggaggaaagaccgtgacctcagcattggaggcatatgcgcgcagcttttcaagaagattcctatatgcgcaacgatgctggagccgatgccgaatatggcaccgcagagtcctatcctgagcacggaggatggcagcctccatctccttatcgtgaatgataacagcaatgaaatgctcgagaatcagaatattatggtcactgttgacatgtccaagggctacgtaatctccgcttgtttgctccctactgactttggcgatcagctgcctgggttgtatggtgtcatgctgccgcgtatgctgggctccaacttcttccggttctgattggcaaaaaaaagaagcacatggaacggcaatgagaaaacacatgcaatttatctatattattagatgtaatcggatatttgtagttctcttcttatctttctctaagcactatgttagtggtggaaactttatctgcactgcaagctatcttagcactgatgatcggcatgcaatcttagtaaaatttcttgagatg

SEQ ID NO: 20596 - DNA, 1543 bp, Oryza sativa
  ref <308>: DATABASE ACCESSION NUMBER: AK070907
  ref <309>: DATABASE ENTRY DATE: 2001-12-06
gagttgaactcgcctcatgatcaaaaaaaaaaaaaaaaaacagaagttgaacacgcctccccccttggctcgtcgccgacgcctccaccaccctcgcgtttcccacccgattccaccccgaaacccctcaaatcgagcgcgaattcctgtccaatagctgcggctccagcctccggtggattctggtctcgccgtattcgagctctggtcggcggagagcaccggatccggaggtcacgcgggcaattggtgtgccccggaagaacaagaaccgggagaccatgcagtaccaaccactcgacagcagcggcactgatgacgaccttcctccgacataccaacctagaggaccaagagtgattttcaatggaaatggatcacttcctcaaccaaacctacacagcaacgtggacagagaaatacgtcagatcgagcaacaagcgtacactggtgttctcagagcatttaaagtgcagtctgatgctataacttgggagaaagaaagtctaataactgaactgaggaaagaattgcaaatttctgataaggaacaccgagtgctcttaaaaggggttactgaagaggaggctgtctgtagaataaggcaatcaagacagacaggtggaacacagtccagctctcaccatagcagtgtagttcatactccggtacctgcaaagaggcagaagaaatcccattcagtccctgtgaccccccaggcccctgtcattactatgcatgcagtggtgggcaagaagggtggtcggcaggcatctgatcgtgtattgaagcggcttcctagcaataatagtcctatgttgggttcaagcaggagaagaggaaggctacacccaaatgaactgataaagggatattctccattagatgggtttggcatacctaataccggcaatgttgtaatggaggttgagaaggtattatccaatccaaatatgcttgaaattgagaaggcaatgaaacttcttagagatcaggagcaatcattgcttgatgcaattgcaagacttgacgaagcatctgatggtgaaaatgaagatattgtgctcgttgcaagccaactaggtactaccgttgcatgacatcggtggtcatggcatcacttgctggtgacgtcttgagctttagaactgcaggcactaactggatacccacttcagacggtgggtgaagatggaaactcatgtgaagaatgcaaggtcggccagatatattggtcgacatgaattgtgaatttgtggttggaatatatattgttagagatctccatatcttgtattgttgcaatggtattttctttgcaaatgtagagataactgccctaaaaatagagcgtagatgaaaccccctttctccttcagaaatggggacataaattagtaggttgtaaattatttgcttctgtgccatccgtgcctgcaaagaaattgcggcactgtacagtatgcagcgcgctatcctgtatcaagaaaattattttatgaatcctgtgactaatatgaatctgtgtaaaaaggtttggagt

SEQ ID NO: 20597 - DNA, 3123 bp, Oryza sativa
  ref <308>: DATABASE ACCESSION NUMBER: AK070908
  ref <309>: DATABASE ENTRY DATE: 2001-12-06
ggaaggaaacggaatttgcttacggattaaaagggaggtcttgactcaacccgtctccttctcctcctcccctccgcctcgtcgtcttcgtctcacgccaccatcgccatcgcggggcttcgtttggtcgggatgtctcgccgccgggacgctgcgccgacggcgcgcgagggcgagagggatctcgtcgtgaaggtaaaattcgatggcactcttaagcggttcactgcttttgtgaatggtccgcactttgatcttaatctggctgctcttcggtcaaagattgcgagtgcttttaagttcaatccagatactgagtttgtactcacctatactgatgaggatggggatgttgtcatactggatgatgatagtgatttatgtgatgctgccattagtcagagactgaaccctcttaggattaatgttgagttgaagagcagcagtgatggggtacatcagacaaaacagcaggtgttggattccatatctgtaatgtccactgctctggaagatcaattggctcaggtgaaattagctatcgatgaagctttaaaatttgtaccagaacaagttcccactgtccttgcaaaaatatcacatgacttgcgttctaaagctgcatcatcagcgccatcattggctgatttgctggaccggcttgctaaactgatggcaccaaagagcaaaatgcagtcttccagtggttctgctgatggttcatctggctcctctagtggtaggggacaaactttgggaagtttgaatattaaaaatgacactgagctcatggctgtttcagcttcgaaccctctggatatgcataactctggatcaactaaatcacttggtcttaagggtgtgcttcttgatgacatcaaagctcaagctgaacatgtatcgggatatccttattatgtggataccctttcaggctaggtaaaagttggtaacaagggaagtaccaatgcccaaagtaagggcaagtctgttacatcctctgctgtgccacaagttactagcattggtcatggtgcacctactgttcattctgctcctgcttcagattgcggtgaagggttaagaagtgatcttttctggacacaactaggcctttcttctgagtcctttgggcctaatggccagattggtggtgatttgaactcgacatgccctcctccaccactgtttccccgttacccacttcagtctctccgagctgataaaagcagtatcaagggtggttgctcttaccctccgtgcatctgcaaaagtagcacatctaagcctgagaatctctccgattacccagttcagtccctccaagctgacagaagcctaaagggtggtcactatttccctccatgcacctgcaaaagtaacacatccaagccagataatctctcaccagtcggtctttatggaccttattctgaaggcagcagctgtaataggtgcccatacagggatctaagtgataagcacgagagcatggcgcagcacacactgcatagatggatacagtgcgatggctgtggggtcactcctatcgctggttctcgctacaagtcaaatattaaagatgattatgatttatgcaatacctgtttttctcgaatgggcaatgtgaatgaatataccagaatagacagaccatcttttgggagtagacgatgtagagacctcaatcagaaccagatgctctttccacatcttcgacagctacatgattgccgcttcattaaggatgttactgtccctgatggaacagtaatggcaccatcaaccccatttacaaagatttggcgcatacataacaatggatcttccatgtggccatatgggacatgtcttacctgggttggtggacatctatttgcacgcaacagctcagttaaattagggatctcggtggatggtttccctattgatcaagagatcgatgttggtgttgattttgtcacacctgcaaagcctggtgggtacgtgtcgtactggagattggcatcacccactggccagatgtttggtcagcgagtttgggtttttattcaggtggagcacccggtcaaaaccagtagcaacaagcagagtgctgctataaacttgaacatgcccccagaaggaagcaacacagaatggaagcattctgttgatgcaaatattcagtctgcagatattgtgggtaaatactctggaagcaccataactgatcctcttgcacatgcactataccatgaagccaccaaacggatggaacctgagcttgtttcaagtgccgtaccttctgtacctagagcatttgaatcagtgctagtgccagctactgatctcctcacttcatctgctggagctgaaaaggcttcgaagcctgctgccacgcctggacctgcacctcaagccgttcccctgccaaaacctgttagcattcctgcatctggacctgcgcctgctcctgttagtgcgactaccgctgcacctgtcggagctgctgctgctcctatcagtgagcccactgcacctgctgctgccattggaatgccctctgcaactgctcgcgctgcttcttgcctgcctaccgagccttcatctgatcacatcagtgccgtggaggacaacatgctgagagagctggggcagatgggcttcgggcaagtcgacctgaacaaggaaataattaggcggaacgagtacaacctggagcagtccattgatgaactctgtggcatcctcgaatgggatgcactccatgatgaactgcacgaactgggcatctgatcagaacggagatgaacaaggcgctcaccaaggacggcgaggaagcatgtggccgtgaatcttttttgcccctcctagaagggccagtgatgacctcgtcgtgttcagctattgagcaccttgcagtatccaagatatagaccgtagtatatttataaatagcttacctagttaaaagcggcgttcgtgctgctgtgctacccctactcgccagcaaccttagagggtctggtgtagtgccagtagtggtgtttaaagacttctaatcatcggtgtgtaatcgaaataagtaccgtacctactagttgtttattatgctatatgatgtattaaacttgtgttgcc

SEQ ID NO: 20598 - DNA, 1162 bp, Oryza sativa
  ref <308>: DATABASE ACCESSION NUMBER: AK070909
  ref <309>: DATABASE ENTRY DATE: 2001-12-06
ggttccagacattgaacagttgaaaggtcttctgtcaaacaagacgaagattgttgttgttcatcatgtctcaaatgtactcggttcgatgcttcctattgaggatattgtaacatggtcaaacagaattggtgctaaagttcttgtcgatgcttgtcaaagtgttcctcatatgcctgtcaatgttcagaggcttggtgcagattttcttgttgcatcatcacacaagatgtgtggccctacaggcgttggattcttgcatggaaagtttgacctcttatcatccatggagcctttcttaggtggtggtgaaatgattgcagatgtgttccaagacaaatccacatatgctgagcctccttctagatttgaagctggaacacctgcgattggagaagctataggattgggaacagcaattgattatttgtcacaaattggcatgcagaagatccatgagtatgagaatgagttggcgacctatctctacgagagccttattgctgttccaaatgttcggatctacggtccagctccatgccaaactgttcaccgcgccccattatgttcttttaatgttgaaaatgttcatccaacagatattgccgaaattcttgacctccagcatggcgtggcaattcggtcaggccatcattgtgcacagatattgcatcgaactcttggtatcaatgcaagtgctcgtgctagtcttcacttctacaataccaaagaggaggtggatgtctttgtcgatgcgctgaaagatactattgatttccttacttctgaacactagtaccacggttcgattagtatacggcattctccctttttacaagtttcaggttgactttatctagccaaggggtcatacaattacaaaatgaaacaaccaaccaaaacatgtgtattagattgcctactttggcctttcttgtaaatcaagtccctttttctcccatccctgaaattttgcagaagctgaatttgtacaacagaataatttaagtgttgcagcaagctgtgagaaagctcatgacattgaaggtttatttgtaaattatgctgacctgtatgttctcttcgttgaaaatcataaacaaggttacacaagcataaacaagtttttttttaacacgtgatgccttctgtttcctgttgg

SEQ ID NO: 20599 - DNA, 1284 bp, Oryza sativa
  ref <308>: DATABASE ACCESSION NUMBER: AK070910
  ref <309>: DATABASE ENTRY DATE: 2001-12-06
gattcctttcctcctgcgagtgcgagtgcgatccggggcaaggcaaatccgattccgagctcagaggcatcaggcgtcgagttcgtcgatcgatcgctgcagagaagcagagagagatcgagagagatgtgggtggagattctgtgcgggctgttggcgtacaagatcatccgccgcgtcttcttcgccgactccgacgaccccgcgcacctcgccgacctcgattccgcccactccgacctctgcttcgccctcgcctccaggctcgagaagctctactccgcccgctgcttcgtcggcctccgcatccccgaccccgacgccggcgagcgccagcatgtcgacctcgtcctccttaccaacagggaggtcatggtagtggctatccacaacatttctggttttgttgaggtcgataaggatggcaactggacttgccccagtgataagaagaacaagcatggtgttatcccaaacccggtactgcaagtcaatagactggctgccaatcttcaatcgtacttggagaagaggggagcaaaactgcctgatggtcatataactggaaagattgtactgccaaatcccaactgcaggccttcctatgccatcactcttcaaccagaagttatcttgtacgatcaatggaaagatcttaaagcagattccaaaggtggactttcaacatggattaaaggtgcattcagtggaagcaaaggtgacatgcaagattcgttactccaaaatctacatttcattctcagcacgtcgcctatgtgggacaggttggaactcaaaggggacaggaatattcttggtgaattcattgaattcaaaggcaggcacgatgatattcaggccttgaaatgtctgaagagatcaaaagtttgccgattcatagtccagaaatcaactctgtttggaggttttggtcggtcaagagtgcaaatattgtattcaccacgagattatcgtgctgaaggaacttcatcctctgaatggaaagagatatcagtgaaacaatatacagaaattctttttcagccattgcactcgaaaaaagttaagaagttcaagctgtcaagtgttgcttctgtgacactgagtgcctagtgagttgaaattttatccacggggtacttcctgttgcagtagtatatagagtaccttcctggcttctgtatgtgctcctcagttaaagtttgtcttgttgtttctgtacaccaacctgtacttactttaagatgtcagttagcatgaaattagaaaaaaatgaatgatttg

SEQ ID NO: 20600 - DNA, 963 bp, Oryza sativa
  ref <308>: DATABASE ACCESSION NUMBER: AK070911
  ref <309>: DATABASE ENTRY DATE: 2001-12-06
gggcgtccagcttctccatcttcctccacggcgcccaagttttgcgttgcctaagcctgccttcctgccgtttctttctgtcgcccgtcgtctcctcctcctcctcttccttcagctttaactccggtaataaggtcgacgcgcgcggccgcgagaggaggctgatcagcccggagagacgatctcgttcgatcgatcgatggagtgcctgcttggcttgctcaaggtgcgcgtcatgcggggcctcaacctggccatctgcgacccgctcacccacagcagcgacccctacgtcgtcctccgccacggctcccagaaagtcaagtcaagtataagatatcattccatcaacccagaatggaacgaggaactcacgttatcaatcacaaacatgatgctgcctgttaaaattgaagtgtttgacaaggacaccttcaccaaggacgacagcatgggcgacgcggagttcggcatcctggacttcgtcgagatcgccaagcaggaccacagccatctcggcgacggcgcggtgatgaagacgatccacccggacaaggagaactgcttcgcggcggagagccacatcacatggaaggacggcaaggtgtcccaggacatcgtcctcaagctcaggaacaccgataccggcgagatcatcctgcacctccaatgggttaacatcccaggtgtctcccggtgattcgccggcggcgagcttatatatatatacacacacaacacacacatatatgtatgtatgtatgtgtgtgtgtgtaatatacacacacacacacacatggctggtgtggacacggtctatgaggtatgaaagataagtaaaaaaaaaaaacatcctgatgagatcatgagatcagtaggatgggataaaaatatgtgatgctgatatgcagcaggcctgtgctactgggagtaatatgcttgtttttcagtgtttggttctgc

SEQ ID NO: 20601 - DNA, 970 bp, Oryza sativa
  ref <308>: DATABASE ACCESSION NUMBER: AK099160
  ref <309>: DATABASE ENTRY DATE: 2002-08-28
ggaccgtttcttcgccgacaagaagaagaaggctccccgcggctgcggcggcggcggcgaccagcccttccccttctcctgcttcgacagttcgccgccatggccactcggtttctgcctctggtgcgccgcggccttgccggcgtcctgaatcaatcgcccgcgcccgcgtccacccgaggattcttgtttcctgcacctgtgactgctggcataagatctctgcaaactatcatggaagcaagcaataatgcttcagatgaccgtaaccaggacatagaggattccaaaaccgacaccgtgccagctacggtcccttcatcggattccggcttcaaagttagagatacatcaaacttgaagatctcaccgagacacgacctcgccatgatctttacgtgcaaggtttgcgagaccaggtctatgaagatggcgagcaaggaatcatatgagaaaggagtggtggtcgctcgttgcggcggctgcaataatttccacctgatcgcggataggcttggctggtttggggagccaggaagcatcgaagactttctagccgaacaaggagaggaggtgaagaaaggctcaacagatactcttaacttcactcttgaggacttggttgggtctcaggctaatgataagggcccttctgataaaaaatagatttctcttcagtatggctttgggtcaagacaacttaaaaaaggttaactcctaaggaaatccacaagttttttactcgatatcatgacttctcaaggtggagtagtccaactttttgcacttgttagttctgatgttattgcagtgtaattgtcaattctcaaccttgtggctaagtccaccgtgtggctttggtaaatttattgtagtggacacgacccgattatgtactaggctgagtgtcatagttttgtgatgttcttgacaaaagtaacaaaactaattatggaaatgtttccctttg

SEQ ID NO: 20602 - DNA, 1672 bp, Oryza sativa
  ref <308>: DATABASE ACCESSION NUMBER: AK070912
  ref <309>: DATABASE ENTRY DATE: 2001-12-06
tagtgtaacccgagctagagtggaatggcggccactcttctccccaccttatcgccgccggcctcccgcgccgccgccgccctcctcctccggcgagccccaccgttcccctcaccccttcccgctcccctcctccgactcctcctcgcccccgccccctcccctccgctacggtcctctcctaccttccgctccctcgccacaatgccctccgccgccgccgccgcagacctcctcatgctcggcatcgagaccagctgcgacgacaccgccgccgccgtggttagaggcgatggcgagatcctaagccaggtggtatcttcccaagaagatttactcgtgaggtggggaggcgtcgctccgaagatggccgaggaagctcattctcttgcgattgatcaggttgttcagaaagcacttgatgatgcaaatgtgtcagaaaatgatctttcagcagtggctgtcaccgtaggaccaggacttagtttatgcctcagagttggtgttcacaaagctcgaaaaatagcgaaatcatttcgcctgcctattgttggagttcatcatatggaggcacatgcattagtttccaggttagtgaacaaggatcttgatttcccatttttggccctcctaatttcaggaggacacaatcttcttgttcttgctcatggacttggtcaatatgttcaactgggaactacaatagatgatgcaattggtgaggcttatgacaagtcagcgagatggttaggtcttgatatgcggaaaggtggcggtcctgctcttgaacagcttgccctagaaggtgatccaaatgctgttaagtttagtgttccaatgcgacaacacaaagattgcaatttctcttatgctggtctgaagactcaagttcgattggctattgaatccagaaacatatcaacagatgatattcctatttcatccgcgacaaaagatgacagacaaataagggcgaacattgctgcctcttttcagcgagttgctgttttacatttggaagaaagatgccagcgagcagttgaatgggcattgaagatggagccttctattaaatactttgttgtttcaggaggtgttgcatcaaaccagtatgtcagaactcatttgaatcagatcgctgagaagaatggcctacagctcgtatgccctcccccaaagctttgcactgacaatggtgtcatgattgcttggactggtattgagcatttcattgcaggcagatttgatgatcctcctgctgttgatgagcctgatgatatgcagtatgacctgcgtccaaggtggcctcttggtgaggaatattcagaaggaagaagtgcttctcggtcaatgaaaactgctcgagtccatccatcactcacatcgatgatacagggttctgttcattagtagtttagtggaaattgcaggagcatttgcccattgaagctagtgctttcatgtgccatgtggtttatcagtttcagttttagtgattactgaggcgcggcttgtttcgagtgaataactcgcaattttcagtcgcagtttagttgaaaaccatggggcctgtgagcagtacaatttgtgtgaaacttcgatgatggttttggggctttgggcttgtgcaactgatgttagtgcttaatgcctgaaattcaaaatgctttgt

SEQ ID NO: 20603 - DNA, 1340 bp, Oryza sativa
  ref <308>: DATABASE ACCESSION NUMBER: AK070913
  ref <309>: DATABASE ENTRY DATE: 2001-12-06
gaccatagtttggagctcccagtttacgagaggaggagaagaagaaccgcacgacaccccaccccacctcccgatcgccaagaaccacaatccccaatccacccaataactctaattcctcccccgattcgccctcgaccaagaaccactcggatcgatcaaagccgccacctttccaccaaatccccaatctttttttttcttcttcttttcttgcaattgatgcgcttcgccatcgggatttgaggggaggaagaagaaggggatggcgtgcagggggttcttcgagtgggtcctgaagctgctcaacttggtggtgatggtggtcgggctggccatgatggggtacggcgcctacctcctcgtggcgtggctccagctgctgccttcgccgccgccgctgccgcctgcgccggcggtggctcccggcggcggcggaggcggcgagatggtgcggctcgggaggccgctgctgctcctcctcgacgtgtcgtccttgcccgatgggacggcggagaggctctccgctgcatggtttatttacgcgtttattggtgttggtgtaatactcttcattacatccatctttggttgtgctggagcatcgaggggcgggtgctgcttatccttttattcgttcctcattattctgttcatactggtagagcttgctgcaggaggtttcattttcttcaaccatagctggaaagatgtaattccagttgataaaactggtaactttgacatgatgtacagctttttgaaggagaattggagaatcgcaaagtgggttgcacttggagctgtactatttgaggcagtgctgttcactgtagctctcatagtgcagtcaggcaatcaagcagactatgacagtgatgacgagtacattgccccaaggtcttcaacccggcagccgttggtgaacaagcaacctgttgctgaccctagggtgcccaaccttgactaccgtccaatccgaaacgatgcgtggagccaaagaatgagagaaaagtatggggtggacacctttgatccaaacaggttccaacaggcgacaatatctcccgcagaacaaagaaaccgatgcgcaatcctctgaaactcggttggtatcagtcggtagcggctctaatttacacccaactgtacaatagcatcgatcggttcccgcataatgtatacctgcttgatgtctttgaaccaatgttgttcagttgtttaggatgtggagagcctgtccagttaaaaaaaaaaaacttgcacagttagagttctgttgaacattttgtagtttatgcgcccttccatcttgcaataattaaatttcagtttttgtt

SEQ ID NO: 20604 - DNA, 1033 bp, Oryza sativa
  ref <308>: DATABASE ACCESSION NUMBER: AK070914
  ref <309>: DATABASE ENTRY DATE: 2001-12-06
gaaattttgatacttccaagtcgcgcgtgatttgtcagctgttagttgtcacacctactcatcagccaaccaattcgccatcaatagcaaaccaagcggattgatcatctcatctcatctcatcgaccgagcattctagcgagcgagcggccaagccagcaagatcgactcctcactctctcaccgatctagcagcagcagtggtagtagctagcagcgtcagcgtagcaaggggttgcgagaatggcctcgccgtcagcgccggggccgaagctgcagaaggcgatggtggcggtggacgagagcgagttcagccaccacgcgctggagtgggcgctgcgcaacctcgcgccgaccatcgcgccgccgctgctcgtgctcaccgtgcagccgctcctccccctcggctacgtctccgccgcctccttcggctcccctctgggcacccccgttgtagccccggagctgatcaaggcgatgcaggagcagcagcagcagctctcgcaggcgctcctcgacaaggccaagcagatctgcgcgcagcatggggtggctgtagagacaatgatcaaagtaggagatcctaaggagatgatatgtcaagcagctgaggaatcaaaggttgatttactgatcgttgggagtcacagccgtggacctgtacaaaggttgtttcttggaagtgtcagcaattactgtatgcatcattcgaagtgcccagttcttgttgtgaagaagcaggagtaaataagctttccgaatctcaataaaaatctttgtgtattgtcgatgtgttatcctcaacaatgcaataaacaaagccgtattagatgatattcagataactgaataatgtattgtgtaaatagtcaagattatcttgcaaataaatatccgcttcttgttgctgtaaagtaagggcgtttcctttaggagtatcatccatgtagctggcatctgttgcagaaccgaagacgatgaacacccaacttgtgtatatatgtgatatgtgtgtatgttttgttacttatcc

SEQ ID NO: 20605 - DNA, 1040 bp, Oryza sativa
  ref <308>: DATABASE ACCESSION NUMBER: AK070915
  ref <309>: DATABASE ENTRY DATE: 2001-12-06
ggttctcctcctcgacttcgaacctcgacgcctgcatccgcatccgcctccgcctccgcctccgcctccgccgcgaactcgccgccgcgccggccatgtcgatcttcgagtacaatggttccgccgtggtggcgatggtggggaagaactgcttcgcgatcgccagcgaccggcggctcggggtgcagctgcagaccgtcgcgacggacttccagagggtgttcaagatccacgacaagctctacatcggcctctccggcctcgccaccgacgcgcagacgctgtaccagcgcctggtgttcaggcacaagctgtatcaactgcgggaggagagggacatgaagccccagaccttcgccagcctcgtctccgctctcctctacgagaagagatttggaccatacttctgccagcctgttatcgctggacttggagaggacaatgagccatttatttgtaccatggactgcattggtgcaaaggaactagctaaggatttcgttgtatcggggacagcatcggagtctctatatggtgcttgtgagtccatgtacaaaccaaacatggaacctgaagaactctttgagactatctcacaagctctgcagtcatcagttgatcgtgattgcctcagtggttggggaggctttgttctgcttgtgacaccaaccgaagtaaaagagtgtgtgatcaagggcaggatggactaaatttatcattgcgaagagttcttggaaccatttctgatgcctgctgttcctggtctctcagcattactatccgtgttgtatgtggattccgagggaaccttgtaatatcaaagatgttcattcacccgtagaagaaactgttgttttcttacttttctacgcttcctatgaatgaaaggacttctatttgttgcatgagatgtgcacttcttggcagtccttggccttgatgatgacgattatactgatcagtaagccggctactggttaattagctaagaatacgcgtatcgtggtgcaatgagctactcatactcacccttctcaggc

SEQ ID NO: 20606 - DNA, 2225 bp, Oryza sativa
  ref <308>: DATABASE ACCESSION NUMBER: AK070916
  ref <309>: DATABASE ENTRY DATE: 2001-12-06
gtgagtaccagcacctggaggtggcattcaaagaggctggcaccaagtacatcaactgggcagctaagatggccatcgcaaccaacactggtgtcccgtggatcatgtgcaagcagactaaagctcctggtgaagtgatccctacctgcaatgggaggcactgtggagatacttggccgggtccagctgacaagaagaagcccctcttgtggactgaaaactggactgctcagtacagagttttcggtgatccaccgtcccaacgttctgcggaggacattgccttctccgtggcgcgcttcttctccgttggcggcacaatggcaaactactacatgtaccatggaggaaccaactttggaaggaacggcgccgcgttcgtgatgccgagatactacgacgaggcccccctcgacgaattcggcctgtacaaggagcctaaatggggccatctcagggacctgcaccacgctctccgtcactgcaagaaggccctcctctggggcaacccctccgttcagcccctcggcaaactctacgaggctcgggtgttcgagatgaaggagaagaacgtgtgcgtggcgttcctgtcgaaccacaacaccaaggaggacgggacggtgacgttcagggggcagaagtacttcgtggcgcggcggtcgatcagcatcctcgccgactgcaagacggtggtgttcagcacgcagcacgtcaactcgcagcacaaccagcgcaccttccacttcgccgaccagacggtgcaggacaacgtgtgggagatgtacagtgaggagaagatcccccgctacagcaagacctccatccgcacacagaggccactcgagcagtacaaccagaccaaggacaagaccgactacctctggtacaccaccagcttccggctggagacggacgacctgccgtaccggaaggaggtcaagccggtgctggaggtgagcagccatggacacgccatcgtggcgtttgtcaatgacgctttcgtagggtgcgggcacgggacgaagatcaacaaggcgttcacgatggagaaggcgatggatctcaaagtgggcgtcaaccacgtcgccatcctctcctccacgctgggtctcatggacagtgggtcatacctggagcaccggatggccggggtgtacacggtgacgatccgggggctgaacacggggacgctggacctgacgacgaacgggtgggggcacgtggtggggctcgacggcgagcggcggcgggtgcactcggagcaagggatgggcgcggtggcgtggaagcccgggaaggacaaccagccgctgacgtggtaccggcggcggttcgacccgccgtcggggaccgacccggtggtgatcgacctcacccccatggggaagggcttcctcttcgtcaacggcgagggcctcggccgctactgggtctcctaccaccacgccctcggcaagccgtcgcagtacctctaccacgtcccgaggtcgctgctccgccccaagggcaacacgctcatgttcttcgaggaggaagggggcaagcccgacgccatcatgatcctgacggtgaagcgggacaacatctgcaccttcatgacggagaagaacccggcgcacgtccggtggtcgtgggagagcaaggacagccaacccaaggcggtggccggcgccggcgccggcgccggcggcctcaagccgacggcggtgctgtcgtgcccgaccaagaagaccatccagtccgtggtgttcgccagctacggcaacccgctcggcatctgcggcaactacaccgtcggcagctgccacgcgccgcgcaccaaggaggtggtcgagaaggcctgcatcggccggaagacctgctccctcgtcgtctccagcgaggtctacggcggcgacgtccactgccccggcaccaccggcacgctcgccgtccaggccaagtgctccaagaggcctcctcgttccgccgccaccgcgcaataagctagccagccgccacatctctcttcttgtctctcatcagattctcagatagttaaagctttgacctgctgctgctgccgccgctgctattgtactttgattggttccatccatcatcgatctcactcacttcactggggaattatttaggcaaacaatcaattcatgctcagctccttgtatgcaccatcgtccatggttttatatgtaggtaactgtagattgattaattgttgatgc

SEQ ID NO: 20607 - DNA, 1259 bp, Oryza sativa
  ref <308>: DATABASE ACCESSION NUMBER: AK070917
  ref <309>: DATABASE ENTRY DATE: 2001-12-06
ggtcagagaaagcagctttgagcttagctatggcaatggccgcgccgctgacgttggtggtggtggcggcggcggtggccgtcgtcttcgtcggcggcggcgtggaggggtgggtgctcaaggaggggttctacgagcagagctgcccgcgcgcggaggcgctggtgaagcactacgtggagcagcacgtccccctcgccccctccgtcgccgccaccctcatccgcacccacttccacgactgcttcgtcagggggtgcgacgcgtcggtgttgctgaacgggacggacggggcggaggcggagaaggacgcggcgccgaacctgacgctgcgggggttcgccttcatcgaccgcatcaagagcgtggtcgagagcgagtgccccggcgtcgtctcctgcgccgacatcctcgcgctcgccacccgcgacgccatctccgtcatcggcgggccgttctggcgggtggcgacggggcggcgcgacgggagggtgtcgatcaagcaggaggcgctggaccagatcccggcgccgaccatgaacttcaccgacctcctctcctccttccagagcaagggcctcgacctcgccgacctcatctggttgtcaggggcgcacacgatcggcatcgcgcactgcaactcgttcagcaagcggctgtacaacttcaccgggaaaggcggccccggcgacgcggacccgtcgctggacgcggagtacgcggcgaacctgcggcggagcaagtgcgcggcgccgtcggacaacacgacgatcgtggagatggacccgggcagcttcctcaccttcgacctgggctactaccgcggcctcctcaggcgccgcggtctcttccagtccgacgccgccctcgtcaccgacgccgccgcggaggccaacatcgccagcgtggtgtcagcccgccggaggtgttcttccaggtgttcgcgaggtccatggcgaagctgggcatggtcggcgtcaagaccggctccgagggcgagatcaggaagcactgcgccctcgtcaacgacatccactactagtattatcactagctcatcgatcttcagctcctcggtgcttgataaaatttcagtagaaatatatatacatgtaacttaattcgatcgtcatcctgtttattctctctctctatgtaattttgtttccaaattgtaactgttttattttggagcaactgtaactatttctgtatgtgcccatgaatatatttcaattatagaaaataattcacttttt

SEQ ID NO: 20608 - DNA, 4154 bp, Oryza sativa
  ref <308>: DATABASE ACCESSION NUMBER: AK070918
  ref <309>: DATABASE ENTRY DATE: 2001-12-06
gaataggcttaatattttttatcacactgatgatcctggggatgtccctgatcctgttattgtgcaagagcttatctcgatgcttgaccagttcaatcctcttgtgcaacagttccgtcttgctcgagacaagctgctttctccaagtgctcctgagattgctatcaagctcattgggtcagaccattctcagagtgaccattacagccttcccaccatctctgagttggcaacactaattatacctggtgcatcttgtgaggtatcaaagtttgatgtcattgtgcagaagcattcaggtgagttatgtcagttgtcacctattcatccagcccttatgtcattgcagtacccgcttctattcccatatggtgatgtgggttttcatactggtatcaagcttagagaggtagatgatcagccacccggtagttgcgacgaagcatcgatgcttgaattttatcggtacgagtcccactatcgaaaggatgagcccaatccattcacctgttgtggtaggctttctgatcagctcgctgcgaatgctttctcatgtatagagacatctcgactcacataccatgccctcaaccagaaaaaacttcgctctgagacacatcaaggtatatctgatgctgttgttaggggagacagtgatggaaaggatgttggcaccaaggtaattctgccatcaagtttcataggaggaaggcgatacatggttcaaaactaccatgattcaatgacaatctgccgttcttacggtcctcctcaaatattctcaactttcacctgcaattctaaatggccagagattattgaagctattcgttttgaggcagggcaaaaaccaagtgatagaagtgatatggtcacacatgtttaccatatgaagctagatgagtacatcacatctattaagaatggagaagccttcggtcccataaaagctggtgtgttacttgtcttattcatgatagctgtcctatctttacgtacatctccttcctaacacatctattgcttcccctaacacattatttgttcttttcttgttgctttgcttttcaattgtgtacactgttgagttccaaaaaagaggattgccgcattcccacacattaacatggctcacagctcaatctgaagaaccttcacctgcattcattgacaacctgatctgtgctgagataccagatataacagctgataggtttgggtttggtcttgttgatgaattcatgatacatggcccatgtggtgagcacaatccaagcagcccttgcatgaaggatggtcggtgttcaaagggctatccaaaatagttctgtgatgttactaccatagatgatgatggatatcctatttatcgacgacgcaatgatggtcgctatgtggtgaagaatggtgtttcactagataaccggtgggttgttccttataatccagctcttctgaagaaattccaagctcatatcaatgtggaatggtgcaataaaacataccttatcaagtacctttttaagtatataaataagggaagtgattcgactatgttcgttttcagccacaggacttcagaaaagacagaggctcatactgctagcgatggaggcataggtgaggttatgcaatacatcaaatccagatacctatcaacttgtgaattattctggagattatatggttttgagatccatggaaggagtccttctgttgaacgcctcattgtgcacttgccgaacatgcagtttgtgacataccatgatggagctgaccttgaagaggtcatagaagaccctgattcctctagaacaatgcttactgaatggtttgctaccaaccaacgtcacatctttgccagggatctcacctattgtgaatttcctaccaagtttagctgggatcctgagaagaaagtttggacaaagcgtaaaagaggaaccaagatagggagattaaagtacatccatccaagtactggggagccgttctaccttagaatgttgctcatgatagttcgaggatgtatgagttttgaagatattaggacatatgaaggtgtgttgtatggtacctatcgtgaagcctgtcaggcacgtggtctcattggtgatgacgctgaatgggatcacctctttgaggaggcagttatctgggctacttcataccagctcaggaaccttttcatgactgtactagcacactgtgatgtaggtgatgttagggttttgtttgataagtactggagatacatggtagatgattttgcttacaagttaaccaaagctcttggagtacaacgcacagctattccagaagttatgttgcaggataccttgctcaaagagttggatgccatgttctcaaataatggcttatcaatctcatcatacaatttgccaacaccagttgattgttcaggatccagtgcagcaaacaggcttatcttagaagagctttagctttaaccaacatagcctccatcaagaatctttgtccatgtatgccagcttgaacaatgaccagaagatgatatatgacaagatttttgacaggatagaccatcacgaaaagtgtattttttttatatctggacatggtggaacggggaagacattcttgtggaatgctattatggcaaacatgagatcaagaggtgaaattgttcttgcagttgcctcttctggggttgcagctctgctcatgcctggtggaaggactgctcattcacggtttcggatacctatagatatacatgaccggtcgatgtgtgctattcgtagagggacaatcctaggagatcttattaggaaagcatcactgattatatgggatgaggcgcctatgacacacaagctgtgctttgaggcattggatagaactctacgagatattcaatccgctgatgaaccagctaatgaatataagccttttggaggtaaacccattttacttggtggtgattttaggcaagtcttaccggtgattgagaaaggtacaagagctgatgtggtagatgcttcgctggttaggtctgcactatggaagcatgttgaagtcttacaccttaccactaacatgaggctacataatccatccctgtcgcagcaagccaagggtgaattggcagagtttgctaaataggttcttgacattggtgagggtcgtgctcccatgaacaaaagacaaggtgaggttgagaggacatggatagagatacctaaggagttgctgcttactccctgcggtgacaagattacagctataattggtgccgtgtacccggattttgaattgaactatgactacattccttacctttctcagcatgcaattgtctgtcctgtcaatacagttgttgatgagattaatgataagatgcttgctaaagtgcttggggatgcaaaggactatcttagcagcgacactatttcaaatacacttgaaaagcctgcagattttgatctattgtaccccatagaatttctaaactcaatatccataaacaatttcccgaaacatcgcatatccctcaaaattggttcagctgtagtcctgcttcgcaacattaaccaatcactcggcctttgcaatgggataagattgatggtcacccgactcggtgattatgttttcgagtccaaaatcatgactggcacaaatattggccagctggtctgtattccacggattgtcctaagtgggaacagtccaaagtggcctttcacgctccagcgaaggcagttcccaattaggctatgttatgcaatgacaataaacaaatgccaagggcaaactttggggaatgttggtgtatacctcagaaaccctgtcttcacacatggtcagctatatgtcactgttttgcgcgctacatcgaagcaaggcctcaagttgttgatagaggatgatgatggcaagccttgttccactacaggaacatcgtctacactgaaatattatcgttgctgtagattaatcttattgtcagtttgtcactgtgactgcagctaggatactttgctccttttgttcacctgtttcttctatgatcccatttctccgtgttactgtttgcttgtgtaacttaagcaagaactcatggtcatacagtgttctgtccacaatgactatccgtatttttggttttc

SEQ ID NO: 20609 - DNA, 1536 bp, Oryza sativa
  ref <308>: DATABASE ACCESSION NUMBER: AK070919
  ref <309>: DATABASE ENTRY DATE: 2001-12-06
ggatttcgcgaggtcttcgcttcgtctccgccccacacccccaaacccacagccacgacgcggccgcaatggcggagcccgagtcctccacggccgcggccggcggcagccgcctccgcaacgcctgcgggggcgtgctgtgcgccttcaccctcctcctcatcggcgtcctcgcgttctcgatccgcctcttctccgtgattaagtacgagagcgtgatccacgagttcgacccctacttcaacttccgcgtcactcagtttttgtcgaagaatgggatctacgagttctggaactggtttgatgacaggacatggtatccccttggccgtgtgattggcggcactgtgtatcctggtttgacattgacagctggaaccatttggtggttgctaaattctctaaacattccgttgtcagtggagactgtttgtgtgttcactgctccaatattctcagcaaacgcttcctgggctacttaccttttaacaaaggaagccaaaggcactggggctggattgatggcagcagctattttggcaatggttccctcatacatctcaagatccgttgcaggaagctatgataatgaagccgtagcaatatttgctttgatattcacattttatctatatgtaaagacactgaacacaggatcactcttttatgcaacgctcaatgctctctcatatttctacatggtctgttcttggggaggttacacattcatcatcaaccttattccaattcatgtactgttgtgcattgtcactggtcgttattcttcacggctttacattgcttatgctccccttgttatactgggaacacttctggcagccttagtacccgtggttggttttaatgcagtgatgacgtctgagcactttgcatcatttctggtgttcataatccttcatgtggttgctcttgtgtattacataaaaggacttctaactcccaggctgttcaaagtagctatgactcttgtcataacagttggcttggctgtttgttttgcagtaatagctatactcatcgctttggtggcatctagccccacaaaaggatggagtgggcgcagtttgagtctacttgatccaacctatgcaagcaagtacatccctattattgctagtgtcagcgaacatcaaccccctacctggccctcctatttcatggatatcaacgtgttggccttcttgattcctgctgggatcatttcatgcttcttgcctttatctgatgcaagctccttcgtggtcttgtacttggtcaccgcagtatatttttctggagtaatggtgcggcttatgcttgtccttgctcctgctgcgtgcattttatctggaatcgctctttctgaggctttcgacgtcctcacaagatccgttaaatatcagctatcaaaattatttgatgacagccctgctgcttcaggggatagtagtgcagagagttctagcgctagtactgtctccacaaattcagcaaaaaatgagactagacctgaaaaaactgaaacagccccaaagg

SEQ ID NO: 20610 - DNA, 768 bp, Oryza sativa
  ref <308>: DATABASE ACCESSION NUMBER: AK070920
  ref <309>: DATABASE ENTRY DATE: 2001-12-06
gagtgctccctctgcggcaagtccctctccggtgacatgttcatgtacaggggagacacgccgttctgcagcgaggagtgcaggcagcagcagatcgaggtggacagggcgaagcaccggcggaagacgcgtgcggcggcgcacgcggtgtcggtgcggaaggagcaccggaaccaccaccaccaccaccggcaccaccaccagcagccacagccgcggccggccatcgacgccaacccgtggggcaccgcgcgaggccccgcgttgcgcgtgtgagaccgatcgagccgcatccgcgcgtcgggcgcgcggggaggccacgtcttttttattttcgggacttctggtgcgacacgggcaggacgacggagacaaatacattttcacaacaataaaactggaagccgtttgtttcgccgaagctgttagggggatttggaggtcatcaagggcctgtccctttgccaagctgcaaaatctaagtgcccaaggagtcctgacagaaaaacaagttcttgaagttaaggttatggtccttctagatgttagcatggagtagatttctttatgatgagaacacagagttgtgtctttagtatgtcgatgcaagcttatttacttgttctttagaaacagagaggaaaaccccggttccaacatatttgaaaccgaagaggcttgctttacttgttgcttccctacttttgcttttgctgggctcaactgtaagcgtgtgaaacccaacaagttttatgaacactcttaggc

SEQ ID NO: 20611 - DNA, 1015 bp, Oryza sativa
  ref <308>: DATABASE ACCESSION NUMBER: AK070921
  ref <309>: DATABASE ENTRY DATE: 2001-12-06
gaacccgttcacacctcaccgagcgagcagctagctagctgcggcgatggcctccagagcggcggcggtcgccgtcctcctcctcgccgtggcggcggcgccgctcttcgccgcggcgagcgcgcatggccgaggctaccttggtgccaagtcctggcctcctgacggcagcctgagctcatcaagctccggcgaggctgcagcggcggacgtcgacgacggccacacggactggaagtgctactcctcctgcatgagcaagtgctgtcaccgccacgacgacgacgacgacgacaaggccaatgccaaggccaacgccaccgccggcgccgccgccgtcgggctcgacgatgactacaagtgcaagaagcagtgcctcggcaactgcttcaaggacgtgccggccgtttgctaccacaagtgcgtcgacgactggtgcgcgaagctgccaccatatagctccgcgaaggtgcagtgctacaagaagtgcggcgataaatgcttccaccacggcccgaagcctgggcccaagcccaagcccaagccgagcccaccaaaacccaagcctggaccgaagcctaagcctcccaagcctgggccgaagccgaagcctcccaagccagggccgaagccgaagccgaagcctccaaagccagggccgaagccgaagccgaagccgccgaagcccgggccgaagccgaagccagggccgccacagccctggtggcctataccattcccgaagccgccgtgtccccccggcgccgacgggtcgtcgtcggcggtcgacgacaagaacaactgatcacacatcatacctaaattatacatatgattaatttgagatcaaagaatttacagagtaaatacagccagggcgacgtctcattgctgcaaattaactattgtatagatggcatatgcacggtaattgtcaagtgatctatctgtaaacctggcatatcagcatatgcatgcctactcctatggatgaattctatacgtactttcgttc

SEQ ID NO: 20612 - DNA, 4352 bp, Oryza sativa
  ref <308>: DATABASE ACCESSION NUMBER: AK070922
  ref <309>: DATABASE ENTRY DATE: 2001-12-06
gacacagcgccgcaagaggaagcgaggcattgacaggggttgcgagggagttgctaccatgcgcagctcgagctgccgcatcgccaggactcctccccttctgactcaaagtaaatcagcaataagaatcctcttcataaccgctttcaaatgctcctatatcaagcaatatacctcgagagctctgaatcaattgccttcacctcccccatagatcaactacgcgttgctggacaaactcttcttcctggaagcagatcctctgtgggtcccactttgctatggcccacatatcagtgactcaactgcacagcagttaagtcagaggatccctttccctcttcctgtatcgcttggatccacacaagcttctgccgtttagcacaggcacatggatttatctgttagcagttataggcagctttggccttgaaacgagttgctacaggaccctaggacgtcattggatatatatacaatcttggacaaaggtagaacaattatttaattattcactataagatctgcatagaaaattattggatcgagttggacacaaggatttttcctatacggtatgtatcttttcctatttttattagtttgtatcatgccatgtttccatcatttcttcgataatgcttgtcgccagtcgatcggcacggagggagacggatcgggcgctcgccccgcgcgcgcccctggcccacgtgctacctgttggcccacccacttctttctccctttttccacaaaaagatgtttcaactagtgtacttataatgcttcactatatatagatctaatatagctagcagtgaattaaaatactcttttgcaacaaaaaaaacctacatattttagaaactctctattaagggaatttggtttatttttttccataaaaaatgtttcacctagtgtagtcacaatgtttcgctatgtatagatctaatgttgcagtgaacgaaatattccattgcaacaaaaaacccacatattttagaaaccccctattaagggaatttggtttattttttgttccaccgaaaaatgtttcacttagtgtaattacaatgtttcactatttataaatctaatgttgcagtgaactgaaacattctttcgctatttgctgaaacattgtttttatataaggtgtaacaacacccgatttaagcgagtgaaacattttcgatttacttagtgagacaattccgatatacctgatgaaacatcatgcaacatttaaaaaaatcaataataagctatttttttcgtcggaatatatccatgtgtggttttgttttgaagatttaattgcaacgaatttaatagtgcaatcggatcatgatttggataagtaatttaagagaaaaatcggtttaaagtaatttggtcagcgcccaatttcccagccccagatcggtcgcccgatccataggtgctcccacatttcttctctcatccctgtttatttttttatagattttagtattaagctctcacgcagaatgctcttggttaacatgtgatacattcttgaatgtgccaagtatttagtttacttaatcactaagctttgacattccaaaatgtcagcatgaagaagaaactttttttttaaggaaaggcaagaagattgccttatatattgatagagtaggggagaagaagaaacttgaaagtgtagtattgttcctacaaatttcctgtccaaatcgaaccatcaaatctatactaggtcatcgtattaatttgtttataaatacttcaatatcgatatcgaattaattatctcagttgattggaccaaatctatatacaagttgtcttccagtttatgacacatacaggaatatacttaaggacatagtacctgcaatgatctaattatttcaacaaatatataatttatgtaattatctttttcttggatatatgttttcaattactaggaatcatgtgatacggagaattttgttccaagattagtacaaataaaccctgccctttcatctattttcttcctaacttctccttgcaatataaatattaggcagcaatctaacattctgttgataattttctacatggtatattaattttatctctctactataaccaggtttggcaaactattataattgttgtcaatagcttgactgtttaaaaaaacatgtgaaagattactcagtaattcccgccgcaaagcgcggggtatcacctagttggatataaacaactctacccgttaccgacattttaaggcaattcaactcatgcatatatatagtttttgcaagcaaataagttttgtgaaatcataggttcaatatgcatagacgcttgccttgctgctgtgtgaactcacactcaacctcggagtctttgctgcacgtactccgaattctccgaatctaccgataagaggcaaatatgcaaatatgattcaaataaacatgcatatgcaacatgctctataaatcatggcctaattacagtaggtagagagtatgataaactggttttagaaacaagaatcatctcatttacatttgtggtttgagagatataaaaataacaagccatatacactgaatatggcatatctgtaattacgtaagaactaccctatgtcatataaaaactgacattttctagctagttttaacaagctaccattttcaagtaatggagcataactcactggttgtaacaaaatttggttcaccacatttggagttaaaatatttagttataaattttacaactttaataaaaagaggattacttaatcgttttactttaggaggtagttttgtcaaattatttcttttcagataaaagattacatatttataaggtaaccaaaagtggtttcataattttaggatatagcataaagttcctagagattatacaactcctatgtgcaaaaataagtgtattttatgaaactcacaattttagtgactttttcagtaccgcagttgtaatgttttaatttacaaacataaagactacaaatttatgaacacatagaaatttggttcactcgtaaatgagtaaagatgaattagttatggatttttgaagttttcctagttctcatatatgttttcgattattcttttggactgtacttttgcatgtcgaaccctgggatttctaaaactttcaaccaggtccagcttttctccacaagagcaggaagcagcgacagccatggctgagctcgatctcaagctcgatctcaagctcgccggcggcaaacggcggctctaatgggggcgaggtcaaaagataaaatgtagagcaaaacattgcgattccattcctcaacttttccccagccaatggtgactgcaccgacgcaggcagcagctgcaattggaagcgctcgggacgccatgcatgcgtcgatgcgtcaaggtggacggctcgatctattgcatgcatgtcaagaacatcacatgcaggatgtagaacaccacctaaggttgctactactgcaataaatcgacaaatggctcaccggttgaacgggaatcgacgacggaggcactagatcggagttggagaagacggtggttgatctccctcctcgctgcacggttctgagagattcttggggcgttttggagagaatggtgaggcgaagctggtggcgcagtagctcaaccggattcgcctcgaggcgacgggaacagcggcgcgaacccacagctgcgcgttgacgacggtgtggccgcgctccagagctaccgtggcgaggtcggcgttcccagagatcggctccaagaaacgaggtgagatcagacagagcagaggctacggcatgcaagggtgaatcgggaacggaagaaagatggcaacgacgatgacccgttgggcggcggagatggcatcatcccggcggccggcaagaagatgatggcgaggagagcaagaaggagctctcccactctggtttcttggatttagggtggactacagagtgaggagggatgggtggggaagctagagagcaagggggtgaagaaggagaagctgccacgatgttggaacgtgtcggtatttctctctatgttcaaggtgggtcccacgcgattaaatggtggaacacaagtgtgggcaagccaaaggcactgccatgtgggtccaggtcgtggtagactaggtaagggtgaggaggatggttaggaacaaagtaaaccgatgttttattcagtttacaggattttagatttttctgtctctttctttgaagttcaaattgaaagttagaatgatgctaaaaattttgatgatttttttggtaataacctatgctacccagattccatttc

SEQ ID NO: 20613 - DNA, 1653 bp, Oryza sativa
  ref <308>: DATABASE ACCESSION NUMBER: AK070923
  ref <309>: DATABASE ENTRY DATE: 2001-12-06
ggtccgcctccggtgagctgagctccggcgaggcgaggtcggagatcccaccgccgtgtcgccgccgcctccaagttctccttcctccctcgcctcttcgcgccggcgaggtcccaccttcgccttcccggatcggcgccggtgaggtccggcgacatatcgcgtccccgtgcatccatctactcggccggcgaccgcgcgccccttcgccgtcgtcttatgcgcttcccacggggccgcacgatccggacatgggcgcgtttgggcgaagacgccgcctattcgcggttcgcgcccccctcctctcccgcttcgtttctccccaatctccacctccaccttctgcgcgcgccgctgccattcacacgcatcgagtaagctcgatctcatcacctcccgagctgtagtctttgcccgcacttgaggtcgcgccggccgccggggcggcagagagagagagagagagagagaggattcagagaggtgttgtttggccgcgcacgagaggtgttcgacgatttgcccacctggtctcctccaagccagagagaggttatgcgccggtgcggccgaatttttttccctccgtctctcaagttcgtgtctcatagcggcggcaggctctccgcgacacgcttctctaccaccgggttcgacctccccgactggttcaggaaccccaaggacgatggctcatgcgccggcttggatgacgaggaggacgacatttttgtgctcccgactgaacccaacgtctcggatgagcgaagaagccagagcagcacctccaggtcgctgtcgatccgccctggctttcctgcaactgcctcccatgaggatgctgagttcgaggccgacatcgatgaggtcagcaggatccttagtgctcgtttcgcgtctcctgaggccattatgatagccatggactgctgctctgtaagggtcactggctgccttgttgacaagatcctgacgaggttcagcaatgattgggtggcggcattcgggttcttcatgtgggttggcactcagggagggtactgccattgtgccgattcatatgacttgatggtagatatactggggaagttcaagcagtttgatctgatgtggggtttgatcaatcagatggttgaggttggaggcttgatgtcgctcatgacgatgacaaaggtgatgagaaggcttgctggggcaagtcgatggaccgaggccatcgacgccttccataagatggatcggtttggagttgtgaaggatacaaaggccatgaatgtgctcctggacacactgtgcaaggagaggagcgtgaagcgcgcaagaggcgtcttccaagagctgaggggaacaatacctccagacgagaacagcttcaatactctcgtgcatggttggtgtaaggcaaggatgctgaaggaagctctagacacaatggaggagatgaagcagcatggattcagtccttcagtggtgacttataccagcctggtagaagcatactgcatggagaaagattttcagactgtttacgctctcttggacgagatgcgcaagaggcggtgtcccccaaatgttgttacatataccattttgatgcatgcactggggaaggctgggagaacgcgagaagctttggatacctttgacaagttg

SEQ ID NO: 20614 - DNA, 2877 bp, Oryza sativa
  ref <308>: DATABASE ACCESSION NUMBER: AK070924
  ref <309>: DATABASE ENTRY DATE: 2001-12-06
gactcgcctccactccactctccatccctctctcttctctctctctctccgccggcggaggcagaggcaccgccggcattctcccccgcaagccccgcctcgcctcctccccctccccgccgcgcgccgccggcgagctgcccctgaggcacacggcgtgtgcggcctcctcctcctccccttctcccccacccctgcgcggcctcctcgcgcgcacggccggcgcagcaaggtccggagacgcgacgcggccggcctcattccactcgcctccatccccggctcgaatcgaacccccaagttgaacaatgactgctcagaccaagaagaggggtggcggggagagcgggaacggtggcgctggcttgggccttgctgccttcatcgccaacggcgaggatctgggccctatcgtccgccacgcgttcgagtccgggaagcccgagtccctcctgcaaggcctcaggagcatcgtgaaaatgaaggaggttgagattgaggagctctgtagggtccactacgaggagttcatccttgcagtcgatgagctccgcggcgtgttggttgacgccgatgagcttaagggtatgctgtccggcgaaaacctgcgcctgcaagaggttgctagctccctgctgttgaagcttgatgagcttcttgagttgtattcagtgaataagaatgttgaggaagccctagggatgttgaagatctgtttgcaagtcaccagtctgtgccagatgtgcaacaaggacattgcagaagccaggcttcattctgctttgaaaagtttggagttgattgagaaggattttctgcaaaatattcctctaaagcttctaaaaaaggctgttcagaagcaaataccaattgtcaagctgtacattgagaagaaagtttgcaatgagtttaatgagtggctggtgtatatcagaaggacagcaaaggaaattggtaaggtttcgataagccaggcatccttggctcgtcagaaaaatgagggaatacattcccaacagagggaagcagaggactgcagccgtattgggtttgacgagcatgcttatgccttggatttggatctcataggtgaggaggaagtactggaattcgatcttacaccagtataccgagcaaactacattcacacatgccttggtcttggggaaaaattccgagaatactactacaataacaggcttatgcaacttaatttggacctgcaaattcccacgacacaaccgttcatggagtctcatcagcacttccttgctcagatagctgggttctttattgttgaggaccgtgtccttcgaactgcagatgggcttctttctgatagtcaggttgagacaatgtgggggacagctatttctaaggtcacatctatcttagaggaacagttctctcgcatggatgctgccaaccacctcctactcgtaaaagactatgtcactcttctgggtgcaaccatgaagaagtatggataccaaaccacatcattgcttgaaattcttgagaagaatagggacaaattctatcaacttcttctttctgattgccggaaaaagatagatggcatcttcactaaggactcatatgagcagatgatcattaagaaggaaaatgagtaccacatgaatgtttcagcatttcaacttgaacccattggtgtagttccggattttccatatgttgcaccattttcctcttcagttccagatgcttgccttatcgtgcgctcttttattgatgattctgtgaactacttgtcatatgatcctatgatggacgcctatgatgtggtgaaaagatacctagacaagctcttgattgaggtactaaatgatggccttctgaatttgatacatggtggttgtttggagattacacaaatggtgcagattgcaggaaatattgccattcttgagaagtcctgtgacatgttcctctttcatgctgcccaactttgtggtgttcctaggcgtcttcttgacaagcctcattccggtttgactgctagagctgtgctcaaagcctctcaaaatgcagcgtacaatgggttaatagccttggccaattccaagattgacgaatttatgttgcttttgactagcatcaattggacaccagaggaaactccagaacatgtgaatgactacatgaatgaggtcgtcatctatcttcacacgttagtgtcaactgcacagaatgtttttccaagggaagccctgtacaaggtggtttgtggggcattcagccacatctcggactcgataatgacagtttttcttagtgatcgggtgaaaaggttcaatgctaatgctgccgcaggtattgacattgacctgaaaaagttagaggaatttgcagatgataaattccacagcactgggttgtcagagctgagaaaagaaacaactttcagagattgcctggtcgaaattaggcagctcaccgatcttctgctcagcaaccagccagagaacttcatgaaccctgtaatcagggagaagaattttggatccttggatcataagaaggtgtctatcatctgtgacaagtttagagatgctccggaaagcttatttgggagcctttcaggccgaagtacagtgcaaagtgctcgaaagaagtccttggatgtgttgaagagaaggctgaaggattttagctgagcttagccatgttgcatcagaaaataagttagtgctcccttgaaaagactgctgccaagtggtggttagcctttttaagtttcttttaccccttgtaacctccgtagttcggcaactctatatggaatttatgtagctgtcatggtttgtataggtcaattttgactgttattatgggcagcacttgcattctctcttc

SEQ ID NO: 20615 - DNA, 922 bp, Oryza sativa
  ref <308>: DATABASE ACCESSION NUMBER: AK070925
  ref <309>: DATABASE ENTRY DATE: 2001-12-06
ggccggccgccggcggcagcagcttcccgccgccgccgccggcggtaggcgtcgccggcgtggcgtgcacgtacatgatcgagaggccggagctccggtgggcgttcatccgcaaggtgtacgcgatcgtggcgacgcagctggtggtgaccgtcgccatcgccgccgccgtctactccgtcccggccatccgccgcttcttcctcgcccgcacgccggcgtcgctcgccgccttcgtgctcgtcatcgtcgcccccctcatcgttatgctgccgacgatgtttctccgtaagaagcatccgatcaacctcatccttctagcattgttcaccatttgcatgagctgcgccattggcctgggctgcctctcttccaaagccggcattgctataatcgaagcggcatccctaacgttcgggctggtgttcggcctgacgctctacacattctgggcggccaagagaggccatgacttcagcttcctccgccccttcttggtcgcggccttcctcgtcctcgtcctctacggtctcatccagatgttggtgccaacggggaaagtggcgacgacggtgtacgggtgcgtggcggcgctggtgttctccggcttcatcatctacgacacggacaatctgatcaagaggcacgcctacgatgagtacgtcacggctgccatctcgctctaccttgacaccgtcaacatcttcattgccattttcactgcactcgacgcttcagattcatagaatatatctctagagtttgttactagtagttgttaccctgctgaaaagcagcagccagtaactataactctttatagggaaaacatatgtagttatcgtattgcattccaatgtattagccatgaatttgaggtaaatatgaaccattacagtaataataataatgtacgtggctt

SEQ ID NO: 20616 - DNA, 2732 bp, Oryza sativa
  ref <308>: DATABASE ACCESSION NUMBER: AK070926
  ref <309>: DATABASE ENTRY DATE: 2001-12-06
ggcctcctctctccccccctctctggctctctcccccgtctccccgatcccctttctctctcccttctccggcgccgctttcctcgccgccgtccctcttccccttcgggtgcgccgctccccctcccctacatcccgacctccgcctccaccgccctgccgtctctgccaccgccaccgccgtggcgactcgctcccgcccgcctaagcccactgccgccgctcccgagagtggaggcgggcggatccgcgtgctgccggcgctcccgttcctgccaggccgctcccaaggacgacggccgctggattcgtgcgtcaccgtcgctaccgaggacgggggacgacgaatccgcatcggtttcttcctgccccgcctcctcacggcgtgggtctgtcggtgggatggaggttcttgcgcggcggcgcgggccggggagcgaaaggtgaggactttgtgtgtgttctcttggtgcgtttcttgctgtgatttcttgggggagctgttcgtggtttctccacctgcggccgtggacgagattctccatctctgcttcgggggatttcttgtgggtttcttcccttcctcttcctctctctcctgtggcaaggtgtgggaggacggccatggtctggaactctggatcttctctcttactgattttcctccagcacagacgagcaccacgcggaacctgcggctcgccgtcgacggcgccggcaccaacaaccaaactcgaacgtggaggggcttttggaaagttaagaatggggattttcattttttgttttgttttgaagctttcgctaatttattggtgctgaccatctagagtgagttgatgccttgcaattggctactgagctcagcatttgctttacttgatagtgctcagtttggcaattggaatatacccatcacatgatgcaaataattctagattactagcactgctttgttctatttgattatttttttactcatcagattatgtcagtgcatgtcaaaaagaccagtcagatgatgccaagtgatcaaaagatataaatactgtcgaatgatactaacctttgtactcattttattacaacatgaacaaacccttctttcttcaaccaaattctaccatcaaagcatgggatagctagggccatctcagtgccggtgagctggggacgtggtaatttcccggagttttcaatttattactattcagtttcttgatgtatgagtgcaacaagttagtaaaacaagctacaatttataatcgggtagtcctgtccatgtataacatggttatctttgtttatttcttatcttatatgctaagatatttcttctcatttttgcagggtggaagatctttcgatttgtgaagttacaccaatttactaactttgtgatattgcactaaatttaggctgtatgtatcagttatttcttccagattgttttactcacagaatagatatgtttttcatgttatcaatgcacatccttttagctagaaatatagccttggtgtttgcatgtcaactggagaagcatgtcgactgaaattggttctatttgttccaggacaatcatgtgttcttcagttcctgggttagcattgcttaacaccagcataagcaaatcttggagcgatgaggaacttgtgcgattcttggcagagaggaaagcagcagactctttgccggagaatgtagtggtggggatgaacttttctctcattgatccatggaattcaggttagtgtccaatctatacagaaatttattatgacgtattcctggtggtataaccagtcttgcattctgaattaatggtattctccaacaagactatgtcatgtaatatctgtggtctgcttttcataattcagtcgttatagaccatgaaggcttctttgttttgtcctttttgagttgttatatatatttactttactacagtttattatacgattcggtagtatagcagcattttaattcttaaatgataactaaagaaagggaatcctacatagaattgataactatttagggttaaaaggcatggaccattatgcaaaaccagaaagaaatatcttgggctctgatgaaagtccagagttaagtgcacgaacgcatacttcagccccattgattatggcaaaaattgcctgcatgaagtgctcataaactaaagtgggatgttatatgagaaatactttggcacttcacattaccctgagcatttctttttcatttttctttgtagcctgtgcaccagttgcttgcatgttttcactagaaaattctgaattacgctatttgacgattaaattatgttcaatgtgttgctcggctaggatcctttaactttcacatcctcaccagagtttgctattatgagaggtcattgtttgccagttaaactttaagttttggagatgtcataatgcactatatgccattggttattatcaacttttgtttttagatactgtacaagcagatcatgtgctaagattttggggcttcagttcacttttagcattaaaatgtgcacataagaggagcggtagcagcagcaggaggataggagatgtaatgaggcaagagtgaacttgtgagctttcttaaaaactgtttattgcccagcaacggcgatgcgatgtacacagtcatgacagagcagatgaggtgggacttaaattttattaatcagagtatatgataatgttgtcacc

SEQ ID NO: 20617 - DNA, 3472 bp, Oryza sativa
  ref <308>: DATABASE ACCESSION NUMBER: AK070927
  ref <309>: DATABASE ENTRY DATE: 2001-12-06
ggaagataggtaatatgaggaaggaaacaaatgctggctacatggttacagatggccttgtcattgctgctgggagcagctgggcgacgaactctatggaaggttggcaaaagaatagggaccgagtgagcagcttggatgatgagacattgagccgtcaaggagtagcaagaaggtaagcactggcgaggtagtaaggatccacgcgtggaggcaggaagacaggagatggctactcattgcaggggtgagtttgggcatgtcatctggaagcacacatcgtggggaggaaaaggaaaagaatataaggtacccatgctgcacgaatgttggctcaatctgggtcggccatgcaaaagaggataaactatgtgagtattttctggtgatgaaaagtggacaaccccttatcaatattactctgctagtaaacagtgtttttatcgttaacaagtgaaggtggtaatagtggatctttagaaacagtattggtggctggtttttgagtgtagccatcatcataattgtttttataaattacctaggtagcatggtatttcaaattagttataagtggttgtcaggagatttctaacttcttcgtgcatgtcttgcttaactgagagtggaatacccacttttaacccagcttgggggcatattttctattttgtatggattgtctagtgagcatgcatggtctggacctgcatgaactggattgcacaataataactacattagataaatcatgaaaagtaatatatctcacaggccacagcagtcaatgaaaactgtaaacttcaggaccttaaggcactctgcagtagtatctgcaataggccagccattttctccatttgttaaggtccatgaaccttttgatctttcacggtaaaaactgctgtaacttggacaattcttagtgaccttcgtgaaaatgaacaataatatcaaactttagcaattacatagtgtatgcctaaattaatgtacatatggaattgaacaaacctgtgaattctttataaaatcatgagcttttctaagagttgcggcaaactctttggtaaggcctgacgagcaataggcctggactataagtgcagtttcccagcactggcaaccaccatatacctattattgaatagaaaaagcataaacaatcatcacacattatgaaaattaaagtatttataaaacaaacaacaaataatactaatagctgcatatatgtgtaagtgctttctaggacatttaccggtaaagccataccacagttacagatactgggatagtaattctttaccaatagacagcttgatgggatatttaccggtagactaagtggtatggacagacaactgcctcctatccgatgttgtggtatagtattgttgaggtggataagataaggaggtgctctggtaaaaaatataatggaggagggcattgtgctcgggccggtttttttaataggtgccagttttcgggacctatagtataggtaccggttttttctctagaaccgacacctattggtttttcctctagaactgacacctatagtgtttaaaggtatcggttctatattttttcattacattacatggaggtggaaaaaggttcatcggtgccggttttaaataaatcggcacctatgagccgacacctgtgaagggttttgtagtagtgttgtcatgccaaaatttataatattaatggaggtatacgaaaatgatatatctaagttggaatatctatgatttatgctacaaaactagatcattcatcaaagtcatattttaatttattttaaagttgtactatatccttttttaatatatgaagccgttgacttttggagtaccgtgtgaccattcaacaaagtcatacttaaagtttctttaatcacaaaatatgtcgcaacaaaataaataaaatttatatctctattttttaattggacaaatgttcaaatgcaggatcatctattagaaattggtgggagtataatgttgattttaaacaggcccaaaacgcaggcccataacaatgccatttccattcgataggcttgtttcctgcctgccatccttccctcaactcatcctcctctgttcctgtaacacatgtctctttctccctttttctgtatgttacattatataacatctcatctatgactgttataagtgtagttcttttattgctcagtgatatttgtgtttgttatggaaaaattgaactatatatgaagtaataagttaaacgataagatagttttgtattgtgcaaattcaaaaaagttgtaaatgataagttatctaatataaaaaaaatgcataaatcatacctttgacttcattccatcttctgctagccataagaaatcgtgaatccttggaagatgttgcctgaatgcataagaatttggattttctgtccagcaacatatcatatttaatacctaattataagataatataagtggaaagtaccgagaacaatgagtatttcaattgtcaagatggtttcccgtaaaaaaaagaacctccaacaggtaatagttggcatgtgttgaccatgtgcattatgatatggctagaacttggattataattcttgtcttccatgcataacttagatcggtttacttcactatatgacccatgcgattcaaccatgacacctccatgcatgttatccttttatatgaaaatacagtaataaaggtgcaagtacatatatatattcacacatatgctgattagcgttgggtacaatgcagatcgtggatactagtaggtttctgatagtacaagagcataaacacatcaatgcattggtccatgtgcatgtggccccatggaaagcctaaggaaggtcatgtgttcaactattctgaaagaaaaatagaagagtgttgagcttggaaatattgttgcatatagttcgtctagttaggaaacatagatacaccacccatgtcctagcagttgctactgcgcatgtaccacagccaccttcggctgacatcatccatcacagctacccctggctgttgttttcgtgtgtatgttgctgctcttctatttctgtaacaccccaacctccaaacctttagtagcctagctctacgcgttgagcaggcccacgctcacgtagcaccccacttacacttttgttctctactcgtgtaaacaggttaaactagaggtattatggttggagtgaactgggtatataagctggcccaaacctatctagactcttcatgtaggactactctcaaacgaacactttggtctagcgtgtctaaattggaaaaagaacacacctgggccaaaacaaactaaatggttgttcgatctgtacattgcttcttctactactaggtgattccccgtgctttgctgtgggaattactaagcaatcctcaatatattttttcaacaatcaaactaggagt

SEQ ID NO: 20618 - DNA, 917 bp, Oryza sativa
  ref <308>: DATABASE ACCESSION NUMBER: AK070928
  ref <309>: DATABASE ENTRY DATE: 2001-12-06
tcaagatcttggcaatcaaggacttcttggaggacgaagaccagtcggaggacgagctgctgagcttgctgcagagcctggcagacatggacatcacgtacaaggcgctccaggagactgacatcggacggcatgtgaatggtctgcgcaaacatccctccggtgaagtccggctacttgtcaagcagctcatcaggaagtggaaggagatagtggacgattgggtgcggttacacaattccagcggtgacgccagcaactcgatcatcaccgatggcaactccccggagaaaatccaaggcaagaaccagcaaagctctcaggtttcagagttcaagtattcccccagcccaagtaggcataacaactcaagctcagagagggttagcaatgggatcgcgtcgatagcagcgacaaaacatagagcaagccctgcgccagcgcatcataatgcaaggcagatcaacaacacccaccattctactacttcatcttctgctccagctaggatggtgaaggaacagaaggacagtcatcttgaccttgaaaggctggactctgcgaggaagagactccaggagaattaccaggaagcacaaaatgcaaaaaaacagaggacgattcaggtgatggacatcaatgaaattccgaagccgaaaaatagaaatgccttcatccgcaagggcaatgggggtgggttcccagcaaggcaccggtgacattgcattttctgggaacccagatttcaaatttgtcttttacaagttgcactaagaagaaaaggagaaaaaaaagagaggtttcttttcttcatgtgctatgtattggctagcctcaacttcagtctgatatgttccatgtacatgagagggatgcttatggtttttgcaggagaaatagaagtttaaaatgttgcc

SEQ ID NO: 20619 - DNA, 815 bp, Oryza sativa
  ref <308>: DATABASE ACCESSION NUMBER: AK070929
  ref <309>: DATABASE ENTRY DATE: 2001-12-06
ggactgttctctcgcccatcgccgccgcctccgccgcctctgccccagaactggagtagtttctgatttgggactaaaaactcttcgtgtttgtgtgatcgcttgtgattgtggcacggcaaccattcttatcatgtccagaagattaattccttcttcttgttgttgggaataaatggatagatagatttacttctgaatttgtctctgaaagaggggggcatatggcttccttatttcgacgatcttcgatcacccaccacgccacctcagctgtggcatctgcagcaggtgctcaccgtgccttctctccagcaatgggaggtggcattcgacctgatcttacaaacactgagattgacaagcttctgctccagaaatctgcattcaacaaggcaggcatattttcagcgagaggtaagatcacgcatgccaatgttgagaaagggctcgtgctgtctgaatgcctaaagattctgcgccgggagggtgaacagcagagttgggctaagctgtggtgcaagcagattgcagccgtggtgatttttggggtgctgtttaggtcgggagaaccggagaagcatgaaccaaatgctagtagttaataattaattctaagaggcttataactaagttaaaagcatgtgactgtggactgtggtgttatgctgacaagcaatttatgctctttatctttcttgggaagggcgacattttgacaagcaaaacatgatgatgctgattgtttgttttgagttggcacttctgagttctaattaagatgcgtgttgaacatgcggctactttcgtgtggt

SEQ ID NO: 20620 - DNA, 1311 bp, Oryza sativa
  ref <308>: DATABASE ACCESSION NUMBER: AK070930
  ref <309>: DATABASE ENTRY DATE: 2001-12-06
aaaaaaaaagcctctgtttcagccccaaccacaaaaaaataaaaaataaaaaaaatgagcgagaaggagacgctccaccaccaccaccaccgccgccgcctcccctccaccgcgccgtcgccgtcgccgtcgccgctcgacgacgacgacctcctccaggagatcctcctccgcctcccgccggacgcctccacgctccccaccgcctccgccgtctgcaagcgctggcgccgcctcgccttcgagccgggcttccgccgccgcttcgtcgccagccacgagccccccttcctcggcttcttcttcccctacgacttcgatccggtcttctccttcaacgccggcttccgatccaccaccgcccagcaccacctccccgcccaccggttcctccccgagagggagatcgggctgcggtgggagatcgtcaactgctgcaagggccttgccctcttcaggatcacattccgcgggggatgcaaatgcaaggaattcatggtggttgatcccatctccggcgaccgccgcctcctgcccttcccgctcgtcgacggcaagttcctctccgccacggtggttcctgccgccgccgatcgccgctcgttccgcgtggtcgccgtattcgccgagaggaacaccttcaccagcgtgttcgcctccgtttattcgtcagatgccggtgtttggagtgattatgtctcgaggttgtgtctcccatgggaggtctgggtgttgcggccgagcgttcttgccggaaatgcggttcactggtttcttgatggctataatgtgctcatgtttgatttggagagtcagaagctgggattcagtgagctaccgctggatgcgaaggatgatgaggatttccctcaccggtgccggtgtcagatcataccggcgggtgatggccggcttggcctcgcggttatagttggatccacaatgcaattgtgggagagggagattggagatggcagtgatgccacatggttgctgaggagaaccctccagctgaactttcttcccctagaagcggaggggcgtaaactgattgtgggtgttgccgaggagaatagctccatacttctttggacgcgtgttggcctgttcatggtccacctcaagtttttgcaggttaggaaggtctacggagaaatctccgtcgacaactactacccctactcaagcttctgaactgcaggtcttatattgtctttcgagttaccatgttatttttggtactagggtctattgtttttatttttacatatgattcatccttgagggctgaggcgccaatatattcagttt

SEQ ID NO: 20621 - DNA, 1757 bp, Oryza sativa
  ref <308>: DATABASE ACCESSION NUMBER: AK070931
  ref <309>: DATABASE ENTRY DATE: 2001-12-06
ggcttgtagtctccagccacacaaccgtaaaggtccacacctcttctcgcaaccacttgagccactcgcaagtctcaagccaaaatcatatcacagtcgccatggaactctcctcaacctcagcttctctcctgctcatcctcctgctcaccctcgtctacttcctctacctgcaccaggatcccaagaagaagcctcgcacccatggactcaagtcctaccccgtggtcggcacgctgccgcatttcatcaataacaaggaccgtttccttgagtggtcgaccggcgtcatgaagcgcagccccacgcacaccatgtcgttcaaggagctcggactcaccggcggcgtcatcaccgccaacccggccaacgtcgagcacattctcaaggctaactttggtaactaccccaagggcgagcttgccgtgtccttgctcgaggattttcttggccacggcatcttcaattccgacggcgaacagtggctatggcagcggaaggccgccagttacgagttcaacaagcgctcgctgaggaacttcgtggtggacaccgtccggttcgaggtcgtcgagaggctgctgccgctgctcgagtatgcggggcgccacggacggacgctggacgtgcaagacgtgcttgagcgcttcgcgttcgacaacatctgccgcgtggccttcgatgaggacccggcgtgcctcaccgaggagagcatggccgcgccccagagcgcggagttcgtgcgcgcgttcaacgacgcgcagaacgccatcttggaccggttcaactcgccggccaagtcgctgtggcgcatcaagaagctcttcaacatggagcccgagaggcggatgagggattcacttgccacgatccacggctacgcggagcggatcgtccgggagcgcagggagagaagggaggcccggctggagcgccgcgacgacttcctgtcgcgcttcgccgcgagcggcgagcacagcgacgagagcctccgcgacgtggtcaccaacttcatcctcgccggccgcgacacgacgtcttcggcgctgacctggttcttctggctactctccggccggcccgacgtggaagacaagatcgtgcgcgagatccgcgcggtgagacagtcgtcggccggcagcgagggaacgcgtggcgcgacgttcagcttggacgagctgagggacatgcagtacctccacgcggccatcaccgagtccatgcgtctgtatccgccggtacccttcgacacgcacagctgcaaggaggaggagttcctgccggacggcacgttcgcggggaaagggtggctggtgacgtactgcgcatacgccatggggcgcgtggaggacatctggggcgcggactgcgaggagttcaggccggagcggtggctggacgaggcgggcgcgttccggccggagagcacgttcaagtacccggtgttccacgcggggccgaggatgtgcctaggcaaggagatggcctacatacagatgaagtccatcgtggcgtgcgtgctcgagcagttcagcctccggtacgccggcgacgccaaggggcaccctgggctcgtggtcgcgcttacgctgcggatggagggtggcttgccgatgaaagtgacaatcagggagtaatcaaacaagcgtgatgctaggctagctggacttgtcgactccatactttatgtgtgtatcattgctctcgcttgtttggagaaataaaatagaactggtgtcgtgctccggttttttacc

SEQ ID NO: 20622 - DNA, 2240 bp, Oryza sativa
  misc_feature (1066)..(1066): "n"=any one base of a, t, c, or g
  ref <308>: DATABASE ACCESSION NUMBER: AK070932
  ref <309>: DATABASE ENTRY DATE: 2001-12-06
gagttttctgcttttctccactcctccatgtgtagtagcctgcaggcagctgctagctccaccatttgagtggctagatgaacccgaagttgctgttcttcccgctcttggctacgttgctcctcctgtgccaccacgcacacgccgtctgcgagccggcaacatgcggcgacctcaccatcaagtacccattctggctaagcggtcccgacctcaaccggtcgtcgttggccattgccgcctgtggccacccgtccttcgagttgtggtgtagccgcgatggcgtggcgtcgttgaggggctcgcaaatcctcgtcctcggcatcgactacaccaacagttcattcgttgctggacacaaaagggtcgccgacggcggcgacggcgtgtgccgcaccgacttcaacatatcgtccagtctagctctcagcccgttcacgattagcagcagcaaccgggccatctgcttcctctacagctgcaacggcacggagccaccggagatcgacggccttgtgaacgccaccatctccaactgcagtaagcctatctacgcgtacctcggcgggagctacgaccgtgacaagccaccggcgatcaaagccgggaactgcacgtactcgtacctgccggtgctgtggccggagtcgccggtgaacttgacggcggggaccaactacagcccgctcttcaagaaggggttcgtgttggagtggcagaagaatgggttcggcgactgcgacgcctgtaacgcgagcggcgggcagtgccggtacaacaacgattccgcggcggcgttcgcgtgcctctgctccgacggagagctgcgagggacgatatgcgccgcaagaaaactggcaggagaaccatattaatagttttgacagcagcagctgcaggcttgctcttgccatgtatatatgtgctaatatggcatgggaaggggaaacaactacggtatttcctttacacaaagactagcagcaccagtgaaaggaacattgaggccctcataatatcttatggatcaatagctccaacaagatacaagtattcagaagtacanagataacatcatttcttaattataagcttggagaggaggttatggtgttgtatcaaaggaaggttacaagatggtcgtctggttgcggtgaaattcttacatgactcaaaaggaaatggagaggaatttgtgaatgaggttatgagcattggcaggacctctcatattaatattgttagcttatttgggttttgtttggaggggtcaaaacgagctttctttacgagtacatgcccaatggttcactagacgattatatctattcagaaaatcccaaagaaattctagggtgggaaaaactttacggaatcgcaatcgggattgctcgtgggctagaatacttgcaccatagttgtaacacacgaatcatccatttcgatataaagcctcagaatatccttctagaccaggatttttgcccaaagattgctgattttggtttagccaaactgtgccgcaccaaggagagcaagctttcaatgacaggtgctagaggaacaattggatttatcgctcctgaagtgatctatcgatcctttggaattgtttcaacaaagtcagatgtttatagttacggaatgatgttgctagagatggtcggaggccggaagaatgctaagtcaatggttgaaaattcaagtgaaaagtaatttccagattggatttatgaccactttgctctggatgatggattacaagcttgtgaagtcacaagtgaggttgagcaaatagccaaaaagatgactttaattggtttgtggtgtgtacaagtattgcctatgcatcggccgacaataacccaggttttagatatgttcgagagaagtttggatgaactggaaatgccaccaaaacaaaatttcagtgaattactagaacatccagctcaggagattaacacagaaagtacgagttctactataaataccaaagctgcacaagctctaagtgaagtgctaagggttgaggagacaagcctcgttaattcaaaggatcctacagtgactaccaactatgcaaaaagatgatctgcagtcaaattttggcatagtatcatcacacattcatgggtcatggcattgactagtgtgtttaaggtagctgaatcgaagatatttctgaattctgtccatccccctaacttgtttcataatttaattcaacaatttgatct

SEQ ID NO: 20623 - DNA, 3521 bp, Oryza sativa
  ref <308>: DATABASE ACCESSION NUMBER: AK070933
  ref <309>: DATABASE ENTRY DATE: 2001-12-06
gcctcgtctctcctcccccctccagatcgaaccgagactccgagagagattaggcagccgccgcacgccaccaccgccgtcgcgcgaggagctaccggaagcgccgccccggaggaggaggaggaggagagagcggaggagggagagagggggatccggcgagatgggagtcccggcgttctaccggtggctggcggaccggtacccgcagacggtgtcggacgcggtggaggaggagcccgtggagctcgagcccggcgccttcgtccccgtcgacctccgccgccccaaccccaacggcctcgagttcgacaacctctacctcgacatgaacggcatcatccacccctgcttccaccccgagggccgcccggctccgaccacctacgacgaggtgttcaagtcgatttttgcctacattgaccgcctcttcggcctcgtccgcccgaggaagctcatctacatggccatcgatggcgtcgcgccaagggcgaagatgaatcagcagaggtctagacgtttccgggctgctaaggatgcggctgacgcggcagctgaggaggaaaggttgaggaaggaatttgaggctgaaggcaggactttggttgcgaaggagaagtcggaagcgattgactcaaatgtcataactcctgggacaccattcatgtttgtactctcttcggcgcttcaatactacatacagctgagattgaaccacacacctgggtggcaatctgtcaaggtaatgctttctgattcgaacgtccctggggagggagaacacaagattatgtcatacatccgcctgcagcgcaatctcccaggatttgacccaaatacacgccattgtttatatggccttgatgctgatttgatcatgctttctctggctactcatgaggtccacttctccattttaagagaggtgattaccatgccagggcaacatgaaaaatgctttctctgtggtcaagttggtcacttggctgctgaatgcagaggatctggtcaggctgataagaccgtggagctccctcctatccataagaagaagtatcagtttcttaacatctgggttctgcgtgaatacctggagaaggatttggaaattgttgatccccccttcaagataaactttgagcgtgttgtggatgattttgttttcatgtgtttctttgttgggaatgactttctgcctcacatgccaactttggagatccgcgagggtgccattaatcttctcatgaatatatatagaagggagttcacatcaatgggtggttacctcaccgatgggggtgaggttttgttggatcgagtggagcatttcattcaatctgttgctgtccatgaagagcaaattttccagaagcgtgcacgcattcagaaggctatccagaacaatgaggagaggaatagagtgcagacagagaactctgaggataatcaatatgtggacaaggtaaaattaggagaaccaggatacagggtgagatactacgctgagaagtttaaagaagaggcagaactaaaacccattgatcaagttcagagagatgttgtccagaaatatgtggaaggtctttgctgggttatgagatactactatcaaggtgtttgctcatggcagtggttttatccataccattatgcaccttttgcatcagacctgaaatgcttggctgaattggagattacatttttcttgggtcaacctttcaagccatttgatcaactaatgggaacactaccagctgctagttccaatgcgttgccaaagtactatggggatttgatgaatgatcctaattcaccgttgaagtctttctatcccaaagattttgagatagacatgaacggcaaacgttttgcatggcagggtattgcaaaattgccttttatcgatgaaaggcgtctgcttgcggagacgcagaagcttgaagaaacattgacagatgaagagagattcaggaataggacaatgtttgacatcctttacgtgcgggaaactcatccattggccgctcaaattgcatttctatatcagatgtgctctcaatcaccaaatgcttcctatataattcccattgaccctgctgctagtggtggaatgaacggatttctttgtttatctgaaaggaactgttacagcatcgtggtaacatctccagttaaggggttcaatggcatcgcccagaacagagttctgaatgcaacctaccttaaccctcagtatcacaaacacattcctgagcctccggaaggtgtcatcatacctgcaaagatattgaagcctagtgatttcaaaccctttcctattttgtggcatgaagataatagtcggcgtcagccaagagaaaggcctcaggtttctggagctctgtcaggctctgtcttaggagaggctgcacatcgcctggtgaaaaactcactgcagataaaatccggctactctgctgggctgcttgacatgccatacaggggtgccccctatggtcctggaaacagacctaggcctgctggaccattgggatatgagagaggttttgttgaaaattcatacaatggacacatgtccagaagcgttccaaattctcatcctcagttcttcggcgacgctcaagccaacagacagaatgtgaggatactggaacgaccaaactatcgaaacaacgacagtgccatccattcagggatgtcgcaactaacaatccaagatggcccaaggatgcatcaaaacaacaggatgcagaactccggattttcacctaatcagccacatcccaatcagtatgcaggattcccaccccagcgtcccatgcagaactccggttttacgccacagcgacctgcacaatattcaggatttccacaccagaggcctgtccaaataggacttcaacatcagccagcagtaaatgggattcaaccaccgttaccccccagtgcatggattggcaggccaataagtggagtcccagcaggagtacctgccaagcaggatcctaggatggccatggataggcagcccaaacaagataactcgagatcacagcatgacaagagacagcaggctactaaggtagtataccgtgtcaaaggtcaaggtcccaatggcctgagtgagtgaaaagtatccatgaaatcatcctcaaatcgcagtataaccaggaatcgcctttaagtttgtttgtacgatgttccatgtgagtgggcatgctgctactgggagaagcgacactggaagtctgcaagctcctagtgaaagcagccataggatttactttattttaccaccccatccatttacattccatcattgagttgttgtataacgtccaaaggagttggttttggttaagttatgatttaggacagggatttagacagaaacttccgtagttaggacaaaccttgagcaacaggcaaagcaccgccattgtaaatctgtaagctagagcaactcttatcaacgctgatgtgatattgttacttcttttgtgaacactccctggctaccc

SEQ ID NO: 20624 - DNA, 1578 bp, Oryza sativa
  ref <308>: DATABASE ACCESSION NUMBER: AK070934
  ref <309>: DATABASE ENTRY DATE: 2001-12-06
gttttccagtttcccttccttccttcctccgcgtcgcttcccttccttcgcgcggcgctgctccggtagggttttagccggcgatctctcccctctcgcgcgctcggcgactgagaatggtcgaggtggaggaagtcagcaacaagatgcaggtgcagatgcgcctccaccccgccgcggcggcggaggaggaggacgccgacctcccgctccccgccctcttcgacaaggcgtcccacctccactccctcgcctccagctcctccctcgaccaggaagggatccgcaagggggtcgacctgctgcggcggtgcgacgagatggtcagtaaggtcggcctcttctcctccaacgagaccaaggatgacatctccaccgccaacctcaaatacctactcgtaccgtactaccttggggaaatgactgaaagggtagcgcaggaagatcggatcccagtccttaaggcgtcgcaggatcatttgaaggaattcatttctatctgtgaagcactggagcttatatcagaggatgagcttgaaatatctaggcagaagcaacctgataccatggcaaatcgaagagcacagaaggttgcacggttcaagcgccaaaaggctgcagaaacaaagctcctagaaatcaaggagaggaaagaaaggcgtaggcggtcattgagagcagctgctttatcagctcctattgaagctggggaggaagatgcctttgaggatgatggagaggaagaaagagaggcatggttagctactatctcattggctctatgcaaggcttttgaccttcttgacatgttaaagaaggaagaagaaatgcttccggcagtaaaagaaaggaaagcgaaggatggtaatgcatttgctcgtgaaatgcttgatgaacgtacaaaaagggctgaagcatggcaccataatgctgccaaccgtgcaccatactccaaaccagctgatccaatcacttgtgcaacatttgctcaagatgtcattgaaggtagagcaagtgtttcacaagcacatgagcacaaacaccagccgctgatatttggccctgcaagtcttgttggtggaggactaaccagtgaaagagagagaatggcagcacaagtttttcagccaagttataggttgccaacgatgagcatagaagaagctggcttacgtgagatgaaaatgatggagaaatggcaagaaagaactgccaagatgattcaagaatcaaactccgcatggcacaaggatggcagtcggtcagcccaagaggacgaggacgccgaagaggagaaagcgagaggatgggatgactggaaggacgataaccctcgtggtgcaggcaacaagaagctcactccctgtggctaaattatatgctatggcaattctattgaacttacatctgaaactgaagctcgtgtaaaaatatgtggtttttactaactttccttactgcggcatttgttgattgctgagtaataatgtgttccatatgtatattataattgtgcatggtttccttctgccaatatatgggcaaccaagtaatgccagaaaagctgatttgagaagc

SEQ ID NO: 20625 - DNA, 967 bp, Oryza sativa
  ref <308>: DATABASE ACCESSION NUMBER: AK070935
  ref <309>: DATABASE ENTRY DATE: 2001-12-06
gggtgagcttccgggggcggtgcagggtgcggccgcacggctcggcgtcgtcaatgcgggcgatggtagcctggtaggtttgcactcgtctggggggatttgagagtccttgagcaagtggatccgtagctttcgttggccatcatcatctgacagtaagaatccagaggtgggtgtgacaagaagatgctgaagaaactgctatcaaagcctaagagcaagaagaaggaggctgcctcctctgcgctccccactttggatcgtctccatgagactctagaaatgctggagaagaaagagtgctttcttcagaagaaggtttctgcagaagttgaaaaggctaaggattatacaaaagctaagaacaaaagcgctgcaattcagtgtctaaagaaaaagaagctgtatgaaacacaaattgagcagctagcaaatttccaattgcgagttcatgatcagataataatgcttgagagcgcaaaggcaaccacagataccgttgatgctttgcgctctggatcatctgctgtcaaagctattcatcagtcagtgagtattgatgacattgaaaatgccattgaagaggcaaatgaacacacagaaaatatgaggcagatacaggaggcacttgcaacaccaattggcgcttctgctgatttcgacgaggatgaactagaagcagagctggaagatctggaggaggaagagctcgaccatgagctgcctgaaccacctcagagtacacgcatgggaccatcagcgagagttacaacttcatctcaaccagccaatgatttggctgaactgaccaaacttcaagcagagatggcgctttaatcacagtttggagggatttgtttgtattttgctgacatcctgtttgtgtagtgtactcggaaataacatgttgtaaattcagtttgttgtagaaaaaaacccttccttttataatttgttcttttctgtt

SEQ ID NO: 20626 - DNA, 1075 bp, Oryza sativa
  ref <308>: DATABASE ACCESSION NUMBER: AK070936
  ref <309>: DATABASE ENTRY DATE: 2001-12-06
ggagaggaaaaaggaaaggggatcggcgttgcgtcgtcgccttcagcaactctccgctcgccgccgccgatgcgcgcctgtcgctcccctccgcccgccgccggtgcgcccatcttcctgtcgctcccctccccctgctgctcgtcactcctcccatctccccgcgcttcttccctttgcccgtcgctcgctgcatcagatctggatcggaggctggtgacagaaggtgggagacgacggtggccggcgattgaaggtcgggggacggcgggaagaagaggagggatgcagcagcaagacggatccgcctaggggctcgtcgttgtggcccccgtcgagcttcgtcgcctttgagctgttcgctgctgcttcgccatgtccgtagcttcgttgctcgctgggagaatgaggagggggagaggggcagggtggtgaccccatcgcctgcccttgcaggcgcgggtgcggcgctgcacgcgcgggtgcatggcgttgcatcgcgcgggcctggctgagcagcgaagctcaaatcgagcgctcctgctcagcctggctcacggggcttttttgcatccactcggccaggctgggagctacgtgcaggcaaccaaacgaccacatagtgcatccacgcattcgagccaaggactatgcaggcaaccaaacacacctagcatccctcaccctgctgacaacaaagtcaacataagagttcagactacaggggatccagccattgatgtattcaaggatggtttacaggacttgatagtcatgtgccaacatgttagagggacttttgacaatgcagtggtagattttagatcaaaggtacctgctcagcaaatggacatagattcaaagtagaaatgaaatttccgtatgccctctgctccattgttttccatcagaactttgtgtaaccagttcattattggaacgttgattaggtgtgattcttggctataaggcgattttactagaaatctgctttgactgagttgtggaaagtcagtgctctgcttttcaatttttggaaaatcagtctatgtactaaaactagcctgacaatgtg

SEQ ID NO: 20627 - DNA, 2240 bp, Oryza sativa
  ref <308>: DATABASE ACCESSION NUMBER: AK099161
  ref <309>: DATABASE ENTRY DATE: 2002-08-28
gaataggaggagcagagaggagagagccactgcaccgcgcgtccgcccgcgctccctccctctcctctcctcgcactcgccgtccctcccaatggcctccgctgccgcccacgcggccaccgccaccgccgccgccgtcctcctcgtcgtcttcctcgccccccttgccgccgcctccgactccgaccacaagtaccaatcggaggagaaggttatgctctgggtgaacaaggttggcccgtacaacaacccacaggaaacttacaactactacagccttccgttttgccatccgtccaataaccccgtgcataaatggggagggcttggggaggttctcggtggaaatgagctgattgacagccagatcgacataaagtttggaagggatgttgacaagggtaccatttgttcaattgaacttgatcctgacaaggccaaacagttatctgatgcgattgagagttcatattggtttgaattcttcattgatgatttgcctctatggggttttgttggagaggcagacagaaatagcgataacaaatatttccttttcactcacaagaacatcgtcatcagatacaatggcaatcagattattcatgttaatcttactcaagaaagtccaaagcttattgatgcgggtaaggcattggatatgacatattctgtcaagtgggaaccaaccaatgtaacatttgctcaccgctttgatgtataccttgactaccctttctttgaacaccagatccattggttctcaatcttcaattctttcatgatggttatctttctcactgggctagtgtcaatgattttgatgcgcactctaagaaatgactatgcaaagtatgcccgcgacgatgatgatcttgaaactctggaaagagatgtcagtgaagaatctggatggaagcttgtccatggggatgttttccggcctcctcgcagtttggctcttctttcagcccttgttggtgttggcacacagttgtctgctcttattctgctagtgattttgttggcaatcatcggaatgctgtatattgggcgaggagctattgtcacaacattcattgtttgttatgcccttacttcattcatctctggatatgtcagtggtgcactttattcacggcatggggggaaaaactggatcaagggcatgattatgacagcatcactatttccgtttatgtgctttggaattggcctagtgcttaacacaatcgctatattctatcgatcattagctgccataccatttggtactatggtggttgtgttcatcctgtgggccttcatatctttccctcttgctcttttgggaactgttgttggtagaaactggagtggtgccccaaataatccatgcagagtaaagactattcctcgccctatccctgagaagaaatggtacctcacgccttctgtcattgccctcatgggaggactgcttccttttggtagcatcttcattgagatgtactttgtcttcacatcattttggaactacaaggtgtactatgtatatgggttcatgttgctagtctttttgatcctcataattgtcaccatctgtgtaacaatcgttggtacatatttcctgctgaatgcggagaactaccactggcagtggacttcattcttctctgctgcttctactgccgtctatgtttacctctactccgtatattattaccatgtgaagaccaagatgtcaggattctttcagacaagtttctacttcggctacactcttatgttctgcctaggtttaggaacactctgcggtgctgtcgggtatcttggatcgacactgtttgtgagaaggatctacaggaacataaagtgtgactaaaaattgaccccggtttagacagatggggcgaaaaactttgtatgtgtggcttgttccgtgaagtgatcagccatgttttggtggccaagaagccagggcagtttatggagtacaaacgttcttcggcgacattgctgggatgccatggtttttgttttcttgtcccttttgttctctttgatccccctctcggtgccacaattttcatgttcaactagccatatatagctgcgatcatagtttagatgttagtatataccagagttgttattcttgagcctcatatctgtgttgcttcacttaaagctgtaagatccatgacatttgttgacctttaatgatgaaaacatctccgaaagacatcattttcagattt

SEQ ID NO: 20628 - DNA, 1442 bp, Oryza sativa
  ref <308>: DATABASE ACCESSION NUMBER: AK070937
  ref <309>: DATABASE ENTRY DATE: 2001-12-06
gactcctaaaccttctttaattctttccctcgtttctgtactctcctgatgaaatcctctctgaaaaccgttgcaggagaggagtcttcttcttcactgaggcaagttcttggccggagacaagaatgccaccagtgaatagcgacggagcaggaccaagctccggcgaggatggctctgcagccgccgtgaagaagcgcaacaggcctaagtaccatcggtttacgcagcaagaacttcaagcatgcaagcctatactgataccccagactgttattcttgtactagtgtttgtgggcctaattttcattccaattggtcttgcttgcattgcagcctcaaataaggtcgttgaattggttgatcgttacgatacaaaatgcgtgccacggaacatgcttcgcaacaaagttgcttttatccaaaactcatcaatagataagacttgcacaagagtcttcaaggtccctaaagatatgaagaagccgatttacatatattatcaacttgacaagttctaccagaaccacagaaggtatgtgaagagcctcaacgatatgcagctgagaaatccgaagaaggtggccgacacgcaatactgcagccctgaagctactgcgaatggcagacctattgttccttgtggtctcatagcttggagcctgttcaacgacacatacagcttcactcgtggtcatggcaacgagacattgagagtgaacaaggatggcatttcgtggaagagtgaaaggaatcgcagatttggcaagaacgtgtatcctaaaaactttcagaatgggactttgattggtggagggcagttaaatccaagcaaacctctgagtgagcaggaagatctgatcgtctggatgagaatagcagcactgccaacattcagaaagctgtacgggagaatcgacatggatctgcaggccggtgaccgtgtagaggtgacgatgcagaacaactacaactcgtacagcttcaacggcaagaagtcgctggtgctgtccaccgccgggtggctcggagggaagaacgccttcctcggccgcgcctacgccatcgtcggcttggcctgcttcctgctggcactgctgctcgcattgctctacttcgtcttccccatgagagaggagcatctgtcgctgcactacactcctgctcgacttgtacgatgattgagcagttgggcatggaatgttatggatctttttggaccatggattttgggaatcatttcttagttgttctgtatatatacgataaatgttagacaggctatactactactatgtgtacatatgtgttatctgtaaggctgtaattgaacttgcttgtgatgtactagttcaaacttcaaacatgttcttttaggaatacatgattcagacatggttgctgaaagaattttttaatacagtgagtgctgtgcaaagtgc

SEQ ID NO: 20629 - DNA, 1533 bp, Oryza sativa
  ref <308>: DATABASE ACCESSION NUMBER: AK070938
  ref <309>: DATABASE ENTRY DATE: 2001-12-06
gttgggaacaccaggaattcagctaaactatggcttgcatctatattaggtgatgcgctgcaagttgtcttccagaatcttcttttggagtcaaatgatgagattattcgatcttctgaaagggcttggaaacttttacttcagtgccctacggaggaccttgagtctgctgcaagttcatattttagtaattgggtgcaacttgccactactccatatggcacagcattggattctgcaaaaatgtttttgccagttgcacttccacgaggaagtcgttcaagagctgctgcaaagatcaaatctgcaaggttagaacatgaaaatacgagaatgatatcttttggttctaccggagagaacacttcacaggaaaagcattctgaagcttccttgagtgtttcaaaaataattgtggggtctgattcggacaaatctgttactcatacgcgagtgctgacgtcaatggcccttggtctgtttgcctctaagttgccagtggggtcgtggcaagttgttcttggtccactagcaagcgatctcatgtctctctcaggagtccagagacaggtggcttctatggttattgtttcttggtttaaagacctcagaaaaagtgatcctgctgcggtgggtacattgctagctttcttatcctccctgaaagggtggatgttggacttactggcttgctctgacccttcatttcctacaaaagattctccgcttccatatgctgagcttgcaagaacatacaggaagatgcgcaatgaagccaataatttgttccagtcaatagaatcttgtgctcttcttaaagagtatacaagcaacttaaactttgaagctgacatgctgagtgttgatgatgctattaacttcacttcaaagcttttgttaccatctgaacctgattttagtttggacagtgataaaattgtcttgaacaatatagagtcagcaaaacaaggtctattgtctacgtcaggctacttgaaatgtgttcagaataatttgcatgtgacagtttcctctttagtggcctctgctgtagtctggatggcagggctgcctagtaagttgaacccagtcattttgcctttaatggctgctgtaaaaagggaacaggaggaaatacttcaggacaaagctgcagatgcacttgctgagctcatttttagttgtgttggccgcaaacctggcccaaacgacaaactaacaaagaacctctgcacgttaacatgcactgatgcaagtgagacacctcaagctgcagttataaactcaattcaggttattgaggaccaaaacttgctgtcgattggtaagcgttttagcaatcacaaatccaggggccagatgacttccggtggtgaatcgaagtcggagggttttataagccggcgtggatcggagttggcttttaagcatctttgtgagaaatttggagcatccttatttgaaaggcttcccaagttatgggattgccttacggagtttcttaaacccgtcaagactggagatgatcttatg

SEQ ID NO: 20630 - DNA, 3086 bp, Oryza sativa
  ref <308>: DATABASE ACCESSION NUMBER: AK070939
  ref <309>: DATABASE ENTRY DATE: 2001-12-06
gagggggagaggcctcgcgtcgcgtctcccacgtatcgtggtccgcgaaacccgagtggccggagaagccaaggcgaggcgaggcggttgccgtggcgggcgagtgacatcgtcgtcgtcgttgtcgtcgtcgtcgtcgtcgtcgcgcgccccacgaaccctatcggatcgggatcgggatcggagaggagaggagagggtatggacgaagcggcggcggcggaggcggtgcagctgatcgacggcgagggggagttcgcggccgactccgcggagcgcttcatggcggccgcgggcgtcgccggctgcggcctctcctacgccgtcgtctccatcatgggaccccagagcagcggaaagagtacgttgctgaaccaactctttggaactaattttagggagatggatgcgttcaggggaaggagtcaaactaccaaaggtatctggatagcacgatgtgttggtgttgagccgtgtactgttgtgatggatttggagggtactgatggaagagaaagaggagaggacgacactgcatttgagaagcaaagttcgttgtttgctcttgcaatttcagacatagttctaattaacatgtggtgccatgatattggccgggaacaagctgccaataagcctcttctaaaaacagtatttcaggtcatgatgcgtttgttcagtccccgaaagacaacactattatttgttatacgtgataaaaccaggactccacttgagcatctagaaccagttctgagggaggatattcaaaagatatggaactctgttgctaagccagaggcgcacaaagacacccctatcagtgaatttttcaatgtgcaagtcactgcattgcccagttttgaagaaaaagaagaacaattcagagagcaggttcaacaacttaggcagagattttcaaattcaattgcaccaggaggtcttgcaggtgatagaagaggagtggttcctgcttcaggatttttgtttagttcacaacagatttggaaagttatacgagagaataaggatcttgacctacctgctcacaaggtaatggttgctacagttcgatgtgatgaaattgcacacgaaaagttttcctgcctaacctcagatgcagaatggatggaattggagagtgatgtgcagtcaggtccagtacctggttttggaaaaaaacttggctatattgtggacgtccacatgcaagagtatgacaaagaagccatctatttcgatgaagctgttaggacagcaaaacgacaactgctgaaatccagagtactgaatcttgtccaacccgcattccagaaaatgttggctcacctgcgtacgagggctcttgagaaatataaaactgaacttaatcttactttggagagtggaaaaggttttgcagcagctgttcgagacactactgaatccaatctcaacgaatttgatcaagggtgtgcagatgctgtaatcgagcaggcagactgggactactctaaaatactagagaaggttcggcgcgatgttgaagaccacacactttcaattcgtgaaggcaagctatcagaattgacaaatcatgctaaggagaaactaagaaaagcactagttgaacctgtagagtctcttttcgatgctgcaggcccttcaacctgggcatcaataagaaacctttttaaacgagaaacggaggctatcctgccagagtttcagaaaaaccttgctgggtttgaaatggaaagtgcaacgtcagaaggaatggtatcaaaattaagggattatgccagaagtatcgtagaaaataaagctaaagaagaagctggcaaagttttgattcatatgaaggagaggtttacaacggttttcagtcatgacaaggattcaattccgagggtctggacagggaaggaagatgtccgtgcaatagcaaaggatgctcgatctgctgctctcaaacttctttctgtattggctgccattcgctgggatgagaaaccggataagatcgaaaaaatcctcacttccacactcctagatggttctgttacaccgaagtcgaagggtgcaagtgcttctagtgatccacttgcttcaactacttgggaagaagtttctccaaagtataccctcatcactccttctcaatgcaagtcactgtggaagcagttcaaagcagaaactgagttcgccattacacaagcggtttccacgcagcaagctcacaagcgcggcaatggtaggctgcctcctccttgggccatggtggcaattgcagttcttgggtttaatgagatcatgacgcttcttaggaatcccatatatctattcttgctatttgtgggttatttgctggtcaaagctttagcagtgcagctagatatcaacagagaattccaaaatggcgtggttcctgggatcatctctattacagcaaaactaatccccacactacagaacattctaaacaaagttgcaacagagcaacaacaacagcaagggcatcaccaagatgctgctgcagaagctccacagcaacagcagcaaccacagccgcagccacctcctctactcctgagccccagaagcccaatgagcgaactgcggaggccgctgcacatgccattcagcccggtgcgcaaggcggtatcgccttcgccatcctcatcgtcttccaccgttacatcgcccaggaacgctggtgaagaccagaagcccaggcaaatggtacagcctgacaacgaatccaacaatgcttactctatagtttgatgatcttgggtgttcagggtcagctggtggtttatactgtccaactggaaattggaaggtatgagcatttcgttgtcctcatttgaatgcataggtacactgattgcagcaatgatccatcgtcagtagggtatcaagacagaataattcaaaatattttgtctcgcaaaattttgtaaggagggtggttaatctgtagaatggacagaacaattgctactgaacaccatttatcagcatgtatataggaaagattcaactgcaatgcctaggatatggtcaatcaaaaagaaaaaaaatatatatatacttctaatgcc

SEQ ID NO: 20631 - DNA, 2522 bp, Oryza sativa
  ref <308>: DATABASE ACCESSION NUMBER: AK070940
  ref <309>: DATABASE ENTRY DATE: 2001-12-06
gactttcttgcaaccatccatcctcgccgtctccaattccctcgtctcctccgcccgatggcctcccacatccacgccgcggcggcgggggacctccccctcaccgggatgcacgacctccgcctgcgcccgcggcttctccgccgggtgctcgccgagtgcctcccgctcccggatccggccgcggacctccagcccacgcgcagccccgccgacctcgcccgcgcgctctccgccgtccgcgagcagggactcctcgccgtcgagggcgcggcggacccggggctgctcgaggagtggagcgccgccgtggacgcctgggtcgaccgcctcgtcgcgctcctcgcgagcgacagggaacacagttgttgggtgggcacttcttttcttggtttgacatttgaagagtgcagtgaggaccgctttgcaaactcatactctttctggtttgagaagattatgaaaaaaattaaggtcccatctagcaacaaaatggtaagcatagccacttgtactgctatggctagtctgtttatgagattggcgaagttttcaaatttaaaggacgaggcaacattgttagcccaaaaagttgtccaaccattgctgcggctgttggacaaggatggttctgttgcggagaaagcaactgacttacttggtttaattatgaaactcttcccatcatcagtatatcggcacttcaacaaagttgaatccatcattgcagcaaagattatgagtggtcaatgcaatctacaacattcaaagaaacttgcgagcactttagcactattgccttgtgtcagagtatcacataatagtttgtcactgatgatccagaagatattggttgtggtcaacaatttgttaaatggctatactggatttgagttgatgccactaatttcacctggaagtaaacctccaccactgtcaggaggccagacaacctatggagattggaactttcattcagcaaagaaattttgcacatttgcagttcctacaatttcagcacttatacactgctgctccatgatgttaactacttcttatccaattcagtgcctgcggtggtaacttttatacaacgagtgctgctgacagatgtaacatttcataaatcatcactagtacaacaagacaccccttcatgtcatctttctttttctgagattctagaactgcattcatctttcttggattttcttggtgccattattaaaggaatgcgcagttcactattaccacatgctggtagtgttgtaacgctcataactgagtacttcaaaggagcaaagctgcctgcagtaagaagaaaactctacactattgtgcgattattgatgagctcgatgggtgttgggatgggtatgcacttgcttcaggtggtagttagcaacatttctgctgatctggatgataattctggcaacagcctattcgttatgagttcagctccaataggaggaataaatcagtcttcattagaaagatcttccagcaacaatcaggcattgcatgggaaaagctcaattgctgggagccctgaacctacatgcattagaaaatcaatgtcttcactgtgtgtcaaaatagcagcactggaaacatttgaagtacttctgactctgtttgagtgcacaggtgaaatggataggtgcggattggtttcaattaggtattttcgagttcagaatgattgtaaatggactaagcactttgaggtggtgaatgccatcttcgctccagattctagaacacgcacaaccttgccatctcttccttcgagcgccgacagtatatacgtagacttagtccctcctcgaagatgtaagtatattttcactagtcactagtcccaaggctagttgacacccctcactccgcgttgctcctcaaagccgtaagccacgacttcccctgttgcttctgaccagtctgttagtcggatgcctgcagtcgggctagccattgctccggccttccattcctcagcccccacgatcacagatgcatcagtgctaatcaccggtgtcgcctggtcattggtgttgctggcagcagttcgagaataagcatctcggagccagagctggatgaggccaagaaatacagcgctgaactccaaagcaataatgaggcaatcaagacctttcttctcggtaaaggaagaaggtgtggcaaatggaggagatccaagctgtagcctcctgttgtggttgctagggaacttcaagagaaatttgacaataagccatccaatccgcatgccttctctaatacaccactaggagtgctaatttttttatttcataccactttctttctcatcattttctctttttctttctctttttatgttttatcctccttttttgggactgttttacccctggccccacttgtcaggtaaaacagagagagggagggttttacctgttgctctgcggttaggagccagggtgcttgctgcccttgcctcttctcgccagagaaagaggtcaggagccaggacc

SEQ ID NO: 20632 - DNA, 1122 bp, Oryza sativa
  ref <308>: DATABASE ACCESSION NUMBER: AK070941
  ref <309>: DATABASE ENTRY DATE: 2001-12-06
ttgggattcatcagatcagagccttccttctcgtcatcttctctcgcaaagattcatccggaggaggagatactcctcgcctggggagtggggatgatagacctatccacgccacagcggcggcggtggcggccgcgggtaggcgggtcgagcacttcacaagctgaaagaaaggttgcaaccaagagaaaggagtttcctctccaacgagatgattcttccccatgtgacaaaacaacgaaactagatattccttcccttccagaggatgtcaacacacccatggtgcctaataaatttctctacctcaggtacttggagatggtgtttattggaccgagaaaggaatcacccccctgctatgattttttttctcttgttttttttcttgacgcttccccagccttggaaacttttgtcttacatttggactctgtcgggactaagaatgatcgcattcttgaagattcctcggaattgaggaagcttcctaaatgcaactacagtaacctgaagaatgtaaagatcactggactgatgtcatcaaagaccctagttgagttgataagtcacattcttgacaacacgccttcactcgagttccttacgctggacactagaatatatggtttcaaatacgaaattaggagattcatatcctgggactgtggcattatgatgactacggacgatcggatggaatctgagttagacagagagttgctcatgtctgattcagatctaatagaagcatatagggctccacaagttattagaagatatatcgaagggaaagtcccttcaactgttaatttcgaggttattgagccttgcaggaaacgagttattgtggaaacatcaagaggccctaggctatagtatgcataatgtcacttgttatcatatactcaacttcaaactgttcaactgtggtgtatgctattttctctcttgtgatggcatgtacttaacttatgtcctagcttttgtttaggagcttacatatattaggcagagtaaaattctatatctatcatttccatcaatgtgtaaagctgatttctttgttgtattggtaaaaagttatgaattttgaatgaataaacttttaattgaacttgc

SEQ ID NO: 20633 - DNA, 451 bp, Oryza sativa
  ref <308>: DATABASE ACCESSION NUMBER: AK070942
  ref <309>: DATABASE ENTRY DATE: 2001-12-06
gagacgccacgcgagacgaggagagaggagaagagattccgtagcgtaggcgagaggcggcggcggaggcggaggagaggaggagcggcggcggcggcggcgatggcgaggagcgacagctgcttggcgcgcgtcggcgccggggtcgccatcggcggcgcggtcggcggggccgtcggtgctgtctatgggacttatgaggctatcagatacaaggtccctggcttgctgaagatcagatacattggacagaccaccgttggtagtgctgcaatatttggacttttcctgggagccgggagcttgatacactgtggaaaatcatattagttagcattctaagttttgaactctacccttgtccgttgggcctcaaaggatcgaccaagtgaacatttatttgatctttatgtaaaagattactaatacctggtggcttgggttggaaagg

SEQ ID NO: 20634 - DNA, 990 bp, Oryza sativa
  ref <308>: DATABASE ACCESSION NUMBER: AK070943
  ref <309>: DATABASE ENTRY DATE: 2001-12-06
gagagtcccatttgccccctttctccctgtcgagcaccgcttggccgccgtgcggcgaaaccctagcgattgtagcggccggaatcagaggcggcggaagccatggcggacgacgactacaacgacatggacatggggtatgaggatgagccaccagaacctgagattgaggaaggggctgaagaggaacctgagaataacgaggatggccctgatgaggttgtaggggcagaggctgaagataaggaacaagaaaaaactcagcgcccacgcaaaacgtcaaagtatatgacaaagtatgagcgtgcccgcatcctgggtacacgtgcattacagataagcatgaatgctccagttatggttgagcttgagggagaaactgatcctcttgagattgccatgaaagagctgagagcacgcaagatcccattcacaattaggcggtacttacctgacggaagctatgaggactggggcgttgacgagcttattgtggaggactcctggaaacgccaggttggaggcggctaagctgtgactgaggctactcaaaacgaacagcaatgtgctgcaagttgactttgcccttgtagtaatatggtctgtgcaactccattatgactggatgctgtatcagtgaactggcgtgatgatggcatgccatgttgccttgacatgtatgccttctttccgcagtgtaactgtgactgaaatttgcatggttgcatcagtttgcttggaccatttgcagactttgtcctgtgaatgttcaaggcttaatgcttggtttttttttttcttggcctaatttggtagtcgtctagcagacatgagcgacatttttgcagtacgtagacatcagacaaacgggcggatgcctggaattgtgctggaactgaacttaaattccggttgattcgtgttctgggtccatttccacttttccagtataagtatcaaactctgaactgaaggctatatagataaatc

SEQ ID NO: 20635 - DNA, 2331 bp, Oryza sativa
  ref <308>: DATABASE ACCESSION NUMBER: AK070944
  ref <309>: DATABASE ENTRY DATE: 2001-12-06
ggtcatctgcttcgtcgccgatctcgtctccgccgcccgcgagcgaatcgcccccaaatcgggagggcggctgctctcgcctgcagatttgcgccgtcgttgcggcgaattgatgaggtagaagtgtccaactactcgcccctggttcgcgatgctgcggaaggtggccgtcgccttcctcgcttgcgccgccctctacctcgccttcgccgcctactcccgccgcgaggtatgatgggctttctcttacagttggggacggatttgttcgattcggttgatcagtgacctaccgcgcggcaattcttggcttcgtaggtagtggcaacggagtggaattagactggatctttctgttccactgttgatttgttctacatgatgcagttgggttttagctgctcgcacctacagttctgcaatgtgatgtctgcaattagtatgctcgtgttgcgctgctcgagatgcttcagtagctagacgatattgtttactagtaggattgtagagaacaccatccccataaatcgtttagggggagacttttttctcaccgggccagaagggaaagacttaaagcaaggaatacatatatatgcgagttgctggcatctgactgcacaatgatttctgttttgctgacaacagtagccttattgtacaatgagttgaacctcatgactatggccatcactccttgtctcaagattagaacatggtgtttagattctgaaaaatatatagacgtggggcgctcgtttcattttgtggacgatctggagataggttctggcctcggttatggtggtagtgactagtgagacgatgattcaatgttacagaatatttattcttctttctcaccttgtacagagccttggagaggttcgattacctgcagttactaacagggtatacttggatgtggaaattgatgggcaacatataggtatatcactatatcatcatgacaatctgtcttggatgttccaatggaaagaataaaacttgttgcttgcaccgttactatacatgtcactcagcttaagccctggttaacctaattcttgtgtgctcccctcattacaggtagaattgtcattggcctttatggagatgttgtgccaaaaacagttggtaatcttacgcccattcttttcttcatcatatttatttacaaacttgagattaatcctttggagacagtggcatagcagattgtggaattcttatgttttgtttgtgtggacaataaatctccccttgaagatactttgattatcatttgtagcatatagtttgtcccatttgtttgctactgtaatataaattggcaataatagcttgttgattttttatttctcattttgcagcaaattttagggctctttgtacaggtatttcttcttcctagatctattcctgttacagctgaaattcaaccttctgttcacatgattatccatattgcactctgttcactattgcaggagaagagggcattgggcacaagggtaaatctcttcactataaaggatcaagatttcatcgtattatcccaggcttcatgattcagggtggggacatagttagaggtgatggaaaaggaagtgagtctatatatgggggcaccttcccagatgagaatttcatagtaaaacatacacatccaggtgttattgccatggcaaattctggacctgattccaatggatcgcagttttacattaccacaatcaagacaagctggttggatggggagcatgttgtgtttggcagggtgattcagggaatggattatgtgtacgccattgaagggggtgctggaacttacaatggcaagcctaggaagaaagttgtaatcaccgactctggtgagataccgaaggagaaatgggctgaagaagtgtaggctgttttgtactttggtttgccctgtactttttgggcagcaggtgcagttttacattaccacaaatcaggcaaggcgtctaaaatgttgtacattgtagttagttcatactcaatcgaatcccacttgctgacactgattactcagtgaattctgcactgtgatgaagatgaacacacatattctcagtttctcatgatggtttagcaaggtagaactgtcttttgtaatgcttcatttttttaaggcaatctgcaatgctttgtttggtattgcagtggtttataactatccctgtaaatttctatttttgatgaaaatagttagtgctgttatttttgggaactaattacaatgcacaatactggttggcctactcggatcaatttatgaaaatatgcacgtgtatgttgttgtcg

SEQ ID NO: 20636 - DNA, 1472 bp, Oryza sativa
  ref <308>: DATABASE ACCESSION NUMBER: AK070945
  ref <309>: DATABASE ENTRY DATE: 2001-12-06
gattgctacctcatccatgtacaaatgtttgtatatgaactagttacctaatgacctgagaccgaatcaaaatgttccattcaagatagctacatgtgtggcattgccttgttccacctgcagccaaactgtgtaatataagcaagcttgctatagggggactaggcactctaggcttacctaatccaccccttcaggcttcagctgttcagtgcagacacagagaatgaattgggtggagtttctgaagcccgtagtcgcaatgctggtgtttgacacgctcttcgcgctgatgacagcattggtcaagaaggctttggctgatgggttaaaccacgttgtctttatcaccctacgccagtttgtagcggcagtcctgctcgctccgattgcttatttcaaagaaaggaatacaagaccaagatttacaacagagatctttgcctacatgttcatgagcgcattgcttgggggattatgtgctcagtatctgttctttctggggttgagctacactacagcaacactgactgcaacattctccaacatgactccggttttcacctttttaattgctatccctctccaactggaaacagttgatgtgaggagcaaggcggggctggcaaaagtcataggaacgctcatgtctgttggtggcgcgacgctattgggcctgtacaagggagctgccttgactcacacaacatcgtcagtccaagagcacggtgcaaagggtattacctccaacagcagcagcttcagcaaggagcgatggatgctaggctcggtcttgctggttttaaactgcatcagcttctcgttatggatgcttctgcaggggaagctcaccaagaaataccctgcagtcttctccagcactgcattcatgacctcgttcagctcaatgcaagcaggagttgttgcactcacaacacaaaggcgcctttcggtgtggttgattcgaggaaacatacagatcattgctgttgtttttgcaggagtgggggtatcagggatagggtatgtgctgatgacctggtgcatcgagaagaagggcccagttttcactgcaggcttcatgcctctcatccagatcatggctgcactcattgatctcttcttccttcatgagcagattttccttggaagtgcgataggtgctgctcttgtgattggaggcctctatcttctcctctggggtaagagcaaggaagcatcagctactgctttattggcaaaagcagtggaacaagacggggagaaaaaggaaaatttggaagcataaaatgggcaattgtagtagttagtctttgtggtgtaaaagatcatcctaaataactcattgtagtttttttttcttttttggcagtgctctcgtatgcacatgtgcagtgatttgcaccaagcacttctcttctagattttgtacaacctaaaccgaaatggtaaataatcgtgatttgccactg

SEQ ID NO: 20637 - DNA, 2149 bp, Oryza sativa
  ref <308>: DATABASE ACCESSION NUMBER: AK070946
  ref <309>: DATABASE ENTRY DATE: 2001-12-06
gagggttattcgagtgatcgtgcccacatatctcccccttcttcctcggctgtgtgctctgcaagtgtagctgctgctagctagagcagagcagcaatggagttggggcggttggtgacggtggtgatggcggcggcggtgagctcggcgctggtgatggtggcgaggtgcgacccgcaggtgccgtgctacttcatcttcggcgactcgctcgtcgacaacggcaacaacaactacatcgtttcgctggcgcgcgccaactacccgccctacggcatcgacttcgccggcggcccgtccggccggttcaccaacggcctcaccaccgtcgacgtcatcggtaagacaccaacgttgtgctatctgctgctgctgctgcagcggcagctacgtgtaaagtgtatagtcatgcagattttagctagctgatctccaggggtttatggccgtcatggtgatgcacgtgctgagctcgttgaacgagcgatcgatcagctgatgtggaatagaaaattctgagcagatgttagttaggagaatggggagatggtagcttgttgctgtggtaagcttgcccgtgtacgtacgcagcagagacgatttgcaatgcatatgccagtacagttcggtgatcgttgcacggaatttaatgggagccaggtgtacaaagatccattccatagtctgatagtcgtcgttaaagtatgcctacatgtggaagttgcatggcgtgtacgtgccagagcacataattaattactagtacttccggaactttgcatgatctcaaatcagctactccgtgtattagtacgtgcattaattaggtagatgttcgaatgattctctaattttgtggactgattttgcgaattaatgccgcagctcaactcctgggcttcgacaacttcatcccgccgtacgccgccaccagcggtgatcagatcctcaacggcgccaacttcgcctccgccgccgccggaatccgtgccgagaccggccagcagctgggtggccggatcccgttcgccgggcaggtgcagaactaccagacggcggtgcagacgctgatcagcatcctgggggaccaggacacggcgtcggaccgcctgagcaagtgcatcttcagcgtcgggatgggcagcaacgactacctcaacaactacttcatgccggcgttctacaacaccggcagccagtacactcccgagcagttcgccgactcgctcatcgccgactaccgccggtacgtccaggtgctgtacaactacggcgcgcggaaggtggtgatgatcggcgtggggcaggtcgggtgcagccccaacgagctcgcccggtacagcgccgacggcgccacctgcgtggcccgcatcgactccgccatccagatcttcaaccggcgtctcgtcggcctcgtcgacgagatgaacaccctcccgggggcgcacttcaccttcatcaacgcgtacaacatcttcagcgacatcctcgccaacgcggcgtcgtacgggttcacggagaccaccgcggggtgctgcggcgtcgggaggaacaacgggcaggtgacgtgcctgccgtacgaggcgccgtgcagcaacagggaccagcacatcttctgggacgcgttccacccgtcggaggcggccaacatcatcgtcggccggcgatcctaccgcgccgagtcgcccaacgacgcctacccgatggacatcgccacgctcgcctccgtctgagatcgatcggatcggtagctgctcgcggctcagtatatacatacatacatacgcacgcagcctcaagattcccagcgcccacaagctaaagggtgtaactctctctttttttcccctttttttgaggtggttatattacttcggtttgtaccgggtaggcaataattgttgtcataaggattggtgtcttcctagtcgttttcaacctactgcgtgcctggaatcttgatgggtgagagaggagagaacaggcattcggttcttcggtttatagatgtgttcagtgctggagagagcacagataaatatgttcagacaagacatattttagattcggagatttttcatacaactgtacaccgaatagatgtattcctcattctttgtatgcatggcaacctttttctcaagtatcc

SEQ ID NO: 20638 - DNA, 2532 bp, Oryza sativa
  ref <308>: DATABASE ACCESSION NUMBER: AK070947
  ref <309>: DATABASE ENTRY DATE: 2001-12-06
tcaacccgaacggcgcgcactcccgtgccacacgcccacaacgcacgccctcctcgagacctcgtcggcggtcggcctccggcgacaggagtgggagccgagcggcagccgcgccacccgccgccgccggctgagaagcagcctcgctgtggtggagaagggagggagaccggcgaaggaggaaccgtcaaggcggtcgacggcggcgccggcgcagaaccacgtcggcgaggtcgccctcctctcggcttcgagaaaccgagcgccgatgtgctcggcctcgcggtcgcaccattcccctcgccgtcggcccacaccagtgtcgtcatcatcgccttcttccggacgagaccaccgcagccatgtcctcccgcccccgcctctcctccatcttcgccgcctccaccacggcgtcgaccaccaccaccaccgtcgcggcatcgccagcgcgcccgctccctcctgcgtacgccgcgttccaggagcgcctgaggtcgggaacgctcgggcccgacgacgcacgccacctgttcgacgaattgctactgcgccgcgacgaccctgcccctgcccccgcccccgcgcgcgccatcagcgacatcctcgccgcgctcgcccgagcgccgccttccgccgcctgcagtgatggccccgccctggccgtcgagctgttcaaacggatggaccgatgggcatgcccccatgcggctgctgatgctcccaccatctacacctacaacatcctcatcgactgctaccgccgaatgcaccgtccagagctagcgcttgctgtcttcggccgcttgctcaggacgggcctgggtccggatgtgtgttcgtacaacacgctcatcgacggtttctctaaggagggcgaggtggacaaagcttacgagttgttctataagatgatagaacagtccgtttcgcctgatgtggtcacttataactcgctgatcgatgggctctgcaagacaaaggaaatggtgaagtctgagcgtgttctggagcagatggttgatgccggtattcgacctaataacaagacatacaatagcctgatatatggatattccactgcgggaatgtggaaggagtcggttagagtgttcaaagaaatgtcaagctccggtctcataccatgtgttgttaattgcaactccttcattcatgctctctgcaggcacaatagaatcaaagaagcaaaagatatttttgattcaatggttctgaagggccccaaacctaacattatctcctactctaccctgcttcatgggtatgctgctgaaggttgctttgccaacatgaatagcctcgttaatttgatggtatctaaagaattggcaggttggatgatgctctgcacaaattcaaccacatggttgatattggtgtaccaccgagtgaggctgtttaccgctgtctgatccagggttgttgtaatcatggtgagttggtaaaagccaaggaattgatttctgaaatgatgaacaaggatattcctcctcctggtgtcaagtatttcagttcaataataaacaacctgttcaaagagggaagggtagcagaagggaaagatatcatggacttgatggtacaaacggggcaaaggcctaatgttgttacttttaattcattgatggagggatattgcttagttggtaatatggaggaggcatttgcattacttgatgctatggcatcaattggcattgaaccgaattgttacatatatggtacgcttgttgatggctattgtaaaaatggaaggattgatgatgcattgactgtattcagagacatgttgcacaagggagtcaagcctacaagtgttttatataacatcattctccatgggttatttcaggccaggaggacaactgctgcaaagaaaatgttccatgagatgattgaaagtggaacgaccgtgagcattcagacatacggtgttgtgcttggtggactttgtagaaacaattgcaccgatgaagcaaatatgctgttggagaaattatttgctatgaatgtaaaatttgatatcattactttcaatattgtgattagtgcaatgctcaaagttggcagaaggcaagaggctaaggaattgtttgctgctatctcaacttatgggttggtgcctactgtacatacctacaacttgatgatatcaaatcttataaaagaagagtcatacgaagaggctgacaatctctttatatcagtggagaagagtggccgtgctcctgactctcgtcttcttaatcatatcgtcaggatgttactcaagaaagctgaggttgccaaagctagtaattatctgtctataattgacgagaataacctcactcttgaagcttcaactatttctttactggcttctctcttctcaagggaaggtaaatgtcgggagcatataaaattgctccctgcaaagtatcagtttctttagttagcttggcactgctaatacattgttgtatctgaaattacattaaacatatggcactcttgagtttattgtgctcctac

SEQ ID NO: 20639 - DNA, 1166 bp, Oryza sativa
  ref <308>: DATABASE ACCESSION NUMBER: AK099162
  ref <309>: DATABASE ENTRY DATE: 2002-08-28
gttagataaccctagcctcccccttcctcttcctctcctccttctctcgatctctataaaagacctcggatttcgaattcctccgccccgcgcgcgcgcgccacctcccccacgcccgtcgcgcccttttttttgggggtgggattcgcctggtcaagtgccatcgtcggatcatggcggcggaggcggcagcggcgctggaggggagcgagcccgtggacctggccaagcacccctccggcatcatccccacgctccaaaacatcgtatcgacggtcaatttggattgcaaattagacctcaaagctatagctttgcaagctcgcaatgcagaatataatccaaagcgttttgctgcggttatcatgagaataagagaaccaaaaactacagctctgatatttgcatcgggtaaaatggtctgtactggggcaaagagtgaacaacaatccaagcttgcagcaagaaagtacgctcgtattatccagaagcttggctttcctgctaaattcaaggatttcaagattcagaacattgttggctcttgtgatgttaaatttccaatcaggctggagggacttgcatattctcatggtgttttctcaagttatgagccagaactctttcctggtctgatatatcggatgaagcaaccaaagattgttcttctgatttttgtttcaggcaagattgttttgaccggagcaaaggtgagggatgagacgtataccgcctttgagaacatataccctgtgctaacggagttcagaaaagtccagcagtgaaaacttatggaatacacaagtacaagcttccttgagattttgctgcctagtgactgctaatcttaactgtacatatggtctggaggagcgtatagcatcttgtaatttatgtgagcccctcgatgcacgagtgttgtagacttgttgtagtaggcttgtagcttgggtgactgagagacttgagtatcgcgttcagtcgaacgaggtggagacgtggagttatcgtactttagcccgtgctgatttttttcccttcacaaatagatctgtagcgaaacattttattacagaaatgggcggctaacttttaacaaacagaacatatgtactgtggatgcgttgcgttttacagtagaatgtcatggactgtttggatggtgg

SEQ ID NO: 20640 - DNA, 1732 bp, Oryza sativa
  ref <308>: DATABASE ACCESSION NUMBER: AK070948
  ref <309>: DATABASE ENTRY DATE: 2001-12-06
ggcaatcacagcctgagcaagtcctcgtagcaaagccatggactgccaccgaaacgaatcccagagagaactggaaatgggcacaaagcctcacttcgtggtcatcccatggctggccaccagccacatggtacccatcgtcgacatcgcctgcctcctcgccgcgcacggcgccgcggtcaccgtcatcacgacgccggccaacgcgcagctcgtccagagccgcgtagaccgtgccggcgaccagggcgcttccaggatcacggtcaccacgatccctttcccggccgccgaggccgggctaccggaggggtgcgagagggtggaccacgtcccctcgccggacatggtgccgagcttcttcgacgccgccatgcagttcggcgacgcagtggcgcagcactgccggcgcctcacggggccgcgccggctgagctgcctcatcgccgggatatctcacacgtgggcgcacgtcctggcgcgcgagctcggcgctccgtgcttcatcttccacggtttctgcgcgttctccctgctctgctgcgagtacctgcacgcgcacaggccgcacgaggcggtctcctcgccggacgagctctttgacgtccctgtcctgccgcctttcgagtgcaggctcacgaggcggcagctgccgctgcagttcctgccgtcctgccccgtggagtacaggatgagagaattccgggagttcgagctggccgcggacggcatcgtggtgaacagcttcgaagagctcgagcgtgactccgccgctcgcctcgccgcggccacaggcaagaaggtgttcgctgtcggccccgtctcgctgtgctgttcccctgctctcgacgacccgcgcgccgcctcgcacgatgacgcgaagcggtgcatggcgtggctggacgccaagaaggccaggtccgtgctgtacgtgagcttcggcagcgccgggcgcatgccacccgcgcagctcatgcagctcggcgtggcgctcgtgtcgtgcccatggcccgtcctctgggtcatcaagggcgccggctcgctccctggcgacgtcaaggagtggctatgtgagaacaccgacgccgacggcgtggcggacagccagtgcctcgcggtgcgtgggtgggcgccgcaggtagccatcctgtcgcaccgggccgtcggcggcttcgtgacgcactgcgggtggggctcgacgctggagagcgtcgccgcaggcgtgcccatggcggcgtggccgttcaccgcggagcagttcgtgaacgagaagctgatcgtggacgtgcttgggatcggcgtgtccatcggcgtgacgaagcccaccggcggcatgctaaccgccggtggcgggggcggcgaggagacggcagaggtcggaacggagcaggtgaagagggccttgaacagtctcatggacggaggagtcgaaggagaagagagggcgaagaaagttcacgagctcaaggccaaggctcacgctgctttggagaaggaggggtcatcctacatgaatctggagaagttgatcttatctgcggtttgaaatttgatcggtttgcgttatcatatcatctcattttctgaataaattcctgtatttgatgattgaactattgatgtactcgggatattggtttcttgttgaaccgtggtattgtgcgtttccatgcgcaaaggattggaaaagggaagataaattctatacttatagtgatcacatattttttgc

SEQ ID NO: 20641 - DNA, 1566 bp, Oryza sativa
  ref <308>: DATABASE ACCESSION NUMBER: AK070949
  ref <309>: DATABASE ENTRY DATE: 2001-12-06
gaccacaccagccaccgcctagacatcctcgccgcctccttgccaaaaatccccaaatcctcgtcttctcggcgccgccgccgcgctgtcttcctcccaccatgccgcagcgctgtcttcctcctgcgatgctcggctggcgccgtcttcctcccgcggcgcccggctgtcaccgccgcgccatcttcctcccgcgacgcccgaccgtcaccgccatcgccgccttttgcggattgattccttcggcccgtcgccgccggacctcggcgactgtggtggctacgaagcatggcgccaccaccgctatcctgatctacctctctgtccccttacccaggttctcaagttaattcgtgaatcatcctccctgattccttttctcatccccaaatcctcccctggttcgccgccctagccggcgccgctgcgttcttgcggagcgagggaaatcacggcgctggcttcgccgccctcgctggtgccgccaggttcttgtcgagcgagcgaaggaccagcgccgcgacagatctagccggcgctggctgctttctcacggagccatcgggcaagcgccacaaccggccgccgccctcctcttccgaagccggccaccgctgctttcaggcggagccaacggcttgtgccgcctcctcgcagagctggtcggcactgccgcttctcggggaagcacaggccagcgccgttgccgccgtcttttcgtcgcgtcagttctcaatgagaggtcttcatgcaggtcccatgatctcgtcagctgctcctgatgaattctcttagggacatccaagttgattcttctatagttatattgacaatattgcgcagtgaaccactgcaggatattaaaaacatcgttcattgactatgggctgccatccatacatttccaaccaccacacttttaggacagatggttgacaacttctcaaataaagaacagatagttaagcatggatgcctatcatgacctttcgtgcacagaagtgcaatatcatccaagactgcctgttgcagaggatctgaattcgttgcaatggggttcctatatttctttcttactttcgtgctcaatgcccaatagttggtatgtcttttgcaagttactattgggtagtaacaggctgcatattactaaaccttggagtaaattttgcgagagtaaacttggccagtgatgaaatactaatgggacatgcaaaatataaagttatgccaccacaaggtttgctctaaattttgcctatgactttgtctttttgaatacttgctgtaattggacctacatgaaaaactcttaaccatagaattgttctacaaattctcatgtatagtgatatccttcttttctatgttgtcattctgcaaatttttcagctttcagcatgtttttggcatgagttgaccatcctgtggctttcagggcttgcagtaccactatggcaagcaaataacaacttggatgttgagcataggttgtaactgttgtagttgtaccgtatactttttatacctaaatacttagttgatttatttggatcttcgtgaacc

SEQ ID NO: 20642 - DNA, 805 bp, Oryza sativa
  ref <308>: DATABASE ACCESSION NUMBER: AK070950
  ref <309>: DATABASE ENTRY DATE: 2001-12-06
gaatcatacgagtttggttgccatttgacaccaccacgtataggaattgaagtgatcgagaaaagctgagaccacgtcgtcgtcgtcgtggtggttgtgcttctccaccaccaccaatccgaaagatccaaagaatcaaattaagagcttagctagcgatctcgatcgatcgatcgagcagccgccatggccgccaccaactcatgatacgaccagaatcgccgccgatcgacgacgaccaagaaacgtagtgcggtgtggtgtttgatcttgctgcggcctcgccggccggcggcgatgatggtgatgggctacttgctggcgcccaagaagggcgggaggaggaaggacgagttcggcttcgcccaggccggcggcctccgcgtgccctgcggcgaggacgacttcgaggatctcctccgccgcctccgccgcaagaacggcggcgccgccgccgccaaggctaagaaagccatcagctagccacgcgtacgtatacggtatatataccgtatatatatatacacgtacgtatttacactaattttatggattatatagtacctaaaatactggattgcttcaggtgcaagtgcaaaatataatgtagagacgagagaaaaaaaattcagaattagcatgaatatgcatgggtagctagcatagttgcatcatgctgcaagcagatgcatggcgtgttcttggtgacttttgctttcaatccatggatttctggagaagcaattggcttagacagtagctttgatgtgcatgcaagttaatctatggagtagtacatttgacg

SEQ ID NO: 20643 - DNA, 2364 bp, Oryza sativa
  ref <308>: DATABASE ACCESSION NUMBER: AK070951
  ref <309>: DATABASE ENTRY DATE: 2001-12-06
gggtagggcatccacatctcgcgcggcgctcgcctcacatgcacatgccgctccccttcccccaattagcgatcccacccccaccgcccgccggtttctccgccgccgccgccggaggagcacggccggaatcccccccaagccgaggaggtgctcctcctcctcctgtctcgccgccattgctgatcgtcggcggggatcatcatagatggacgacctgaaggcgatcttggcgcggccgatccagttggcggagcaggtgatcaagtgggcggaggaggcgcagacgtgccggcaggagtgcctcgacctcaaggccaaggtggagcgcctcgcctccctcctccgccaggccgcccgcgccgacctctacgagcgccccgcccgccgcatcctcgacgacaccggcaaggccctcgacaaggccgccgccctcctcgaccgctgccgcggccacggcctcatccgccgcgtcttcaccatcatccccgcgggctccttcaagaagacctccaaccagctcgacaactccctcggcgacctctcctggatcctccgcgtctccaactactccaacgccgacgacctcgacgacgaccacatcggactcccccccatcgcccagaacgagcccatcctcttcctcatctgggagcagatcgccgtcctctacaccggcaacccggaggcgcgcgccgacgccgccgccagcatcgtctccctcgcccgcgacaacgaccgctacggcaggctcatcatcgaggaggacggcgtccccccgctgctccgcctcatcaaggagggctcctccgagggccaggagaccgccgccctcgccatcggcctcctcggccgcgaccccgagtgcgtcgagctcatggtcctcgccggcgtctgcaccgccttcgccaagatcctcaaggacgcacccatgaaggtgcaagggatggtcgcctgggccgtctccgagctcgccaccaaccaccccaaatgccaggacgccttcctccagagcaacgtcatccgcctcctcgtctcccacctcgccttcgagaccgtccaggagcactccaagtacgccgtcgcctccaagatgtccatacacaccgtcctcatggacaagaagaacaacggctccacctcctcctcgcaccaccacgacgcgctagacgccgtcgaccacgccgccgccaccaccaccaccaccaccgccatggcggccaagcccaccggaggcggcgccgccagctcgagcggcgcaggcgcaggatcagcaggaaccgggacgacctcgagcagcagcgtcagcgtcggcggcaccgtcgccgggacgaagcagcacaacgcgtcgctgtccgggacgagcaccaaggcgcgggagttcgaggacccggagacgaaagcctacctcaaggccaacgccgccaaggcgctgtggcagctcgccatgggcaacgcggccgtgtgcaagaacatcaccgagtccagggcgctgctctgcctctccgtcctcctcgagaaaggcgtcgacgacgtgcggtacaactcggccatggcgctcatggagatctgcctggtcgccgagcagaacgccgacctccggcgatcggcattcaagccgacatcccccgccgcccgcgccgtcgtcgaccagctcctccgcgtcgtccacaaggccgactacgacgagctcctcatcccatgcatcatttcgctcggctgcctttccagaaccttccgggcgaccgagacccggatcatcgggccattggtgaacctcctcgacgagagggaagccgacgtcagccgggaggcggccgccgcgctcaccaagttcgcctgcacggagaactacctccatgtcgaccactccaaggcgatcatccaccatggcggcgccaagcacctcgtccagctcgtctacttcgccgagcaggccgtccagatcgccgcgctcctcctcgtgtgctacattgcgcacaacgtccccgacaacgaggagctcgcgcaagcggagatcctcaccttgctcgagtgggcatcaaagcaagcggccatggtgcaagatccattgatcgagaacttgttgctggaggccaagattagaatggagctctaccaatccagaggggcaaaaggttactactgagatgcacggttttgatgcagaaagaggcacatgtaggatgatactaccaagatgatggaccggcttcttcttcttcgtcgtcgtcttcgttgcatcaaccagctgactactgtatatatattcaggtgttttttggttgacttgaattgaattgttgatgcaatcagttggattccatgtttggttggaagagattgattttgtcccgggcatcg

SEQ ID NO: 20644 - DNA, 2002 bp, Oryza sativa
  ref <308>: DATABASE ACCESSION NUMBER: AK070952
  ref <309>: DATABASE ENTRY DATE: 2001-12-06
gctccgtgtttgcgttgcgtctcctcctcccgcacggctcgctccctgcccactcctcctcctctcctctcctcctcctgctgccgtccacgcgacaccaccgagcgtcgccttcgttcttcctccgccttgcccttccccgtacgtcctgctcttgcggagggaggtgtttcgctccggttcctcgccgtagcagcagcagcgaggtgatacctttagtctggcaaacataaaatatggttaagataatggataatcagtcatcgattgaagaactggatgaaccattagggagagttccaatactttcatatggttctgggcatatgctaaatgacatcacttcttcatgttggtttacttatttgctggttttcttgacagatattgggcttagtccaagtgatgctgctgttgtcatgctttctggtcaattggcagatggcttcgcaacaatcttcgttggagaactgattgatcgctttggacattttaaactgtggcatgcaggaggatccattttagtagcaatttccttctcatctgtttttggtagctgtttgccttgcaaacttacgggaactatttcatctacaatggagactgttggatatagcacattcgctgctattttcaatgttggctgggcagttactcaggtctctcatatgtcaatggtgaactgcatgacatcaaacccaacaagtcgggttgcattagtaagctgccgtaatgccttcacaatgatcgcaaatcttagcctgtatggcattgctttgttgatatttagtctacgtcagtcagtgagcgtgatagttcagtatcgatggatagcatatgtgtccattgcccttggatcttgtttcgtcgttgtgttcttgattggaacggaagagccagggttaaatcagcattgccagaataagagactttccaggatttcatggacccactggttcaagaaagtattgtactaccaagttgctctagtatacatgtttactagattggttaccaatgtttcacaggcacttcttgctttctacgtcataaatgatttggaaatgccacaatcatccaaagcattggtacctgctattatctatgtctgcagcttgatagtatctgtcatattacaggaaactagatggtcaagttggcgtttaaaaaattacttttctgctggggccatgctttggatattgtctggtgttggaattgttgttctaccaagtggaatgcacaacttcatgtatgcactatcaatcacaataggagttgccaatgctcttatgacagtaacaagtatcagcatggaaggaattttagtaggtgaagatctaaatggttgtgcttttgtgtatggctcattaagttttgttgacaaagtgtcatgcggactagctctgtatattcttgagtcctatcaaggaagtaccaataccagacagaacctagagttggcatttggttattcagttacaagacttggtttggggttagtcccagctgcctgttcactgctctcagccataatagcttatacgatggacctacctgacactcggcgaagacctttagttgaacctcttctcgcataactctgctggtagcacttccattgcaactgtatatatgtccaacggccaatgactccactgctggaggctggagctattaacaacagtacagttatacgactcgaaaggaaagaaactcggacattgtcaattcattttgacttggtctgaaattctgaattaagttatagatgacacagtgaaaggtactcagcaacgagttgagtatgtaccaaaagtagcatgggagtacaatcctgtgtaagctaatccaaaatccccttacaaatgtagcctagccgcattgttcacaagaatacatagcttgtatgctaattttatatttattcgctttggatgtaattgaattaccatttagctatttttactaaaataatgaattggtctttttattgcttcgc

SEQ ID NO: 20645 - DNA, 660 bp, Oryza sativa
  ref <308>: DATABASE ACCESSION NUMBER: AK070953
  ref <309>: DATABASE ENTRY DATE: 2001-12-06
gtgggatcggatcggaccgcgtcttaccagattggcgatggcggcggcggatggcaccaccggagaggaggtgaagaagacgatcgatctcgtcagcaaggacggcgagcggttcgaggtggcgagggacgcggcgctgctgtgcaagacgcttcggtggatgatcaagggcggctacggccggatcccgctccccaacgtcgcctccccgatcctcgccagggtcgtcgactacctcgcccggcatgccgccgccgccgccgccatggacgacgacggcctcgacaggttcgaccgcgacttcctcgccggcgtcgaccaggacacgctgttcgacctcctcctcgccgccaactacctccaggccgacggcctcctcgacctcgcctgcaagaaggtcgccgccatgatgaccggcaagtcgccggagcagatgcgggagatcttccacatcgtcaacgatctcacgccggaggaggagaaggagatccgggaggacatcgcttgggcgctcaactagctatgctcatctacaacatgtaatatactttgttttgattttcttgcgcacctcgcacatatggatgtatccctctttaatctttctcaaacatgattagcaagaagtataacaaatataataccaattaagttttttgg

SEQ ID NO: 20646 - DNA, 2878 bp, Oryza sativa
  ref <308>: DATABASE ACCESSION NUMBER: AK070954
  ref <309>: DATABASE ENTRY DATE: 2001-12-06
gacgcgctggagggttgacttcgtgcctgttttgttgtttgatgcgaatttgtgggtttcttagtgcaaagctcttcccgtagctcaatgcaattttttggtcaccttgcctttgctgattcttatgaagttgtttggttatttgagcaccgcgcttgccgttttatgccaattgatgactatgtgatcggtgccactataaatggctagaatctcttcttccctgtccgtatcaaattcttcgattgtcgtttgttgccttctcttaagcttgttgttactctctctttttttggccttgttttgctgtatttttctctgaattttctggcttgcggattggcagtgtccttgccatgtcctggttactattactgtttctccccgtactattcgacgaagatgctgcttgttcggaatgatatcctgtaactgttacgtaccttgttacggtcattgagtttgcatatgcattcatgttgactttgtagcctagagtcattgaagtttgttgagagagattgtgcgtcctggttgtgagatattcgataaattgtgatatttgtgctgctaatttcgacctcaagttgctgcgcaaattgcagttaactgattaactcattgcctaagctttattatagaacagttttttctgttggactactgatttggcctttgttacagatttgttcaaaagtggtgagaattgacctgttaatttccactgccgattattctacatggaagtttgctgattgtgactgcattgttctattacaatactccagttggactagcatgtgaacccctcatattgtccaactgaccacatgtggatgtcgacctgagttgattttgtccctgttatggcttgttggccgttgcctaagaacttacagtttcagagaatgctagctttgttctgaagaatttgtcagctttctttgtatcctagtggtccatcctttcccctctgttctgagaatatcatacctgtgctggccagattgagcatttttaattgtggagtttagtaatagatattcaatttaatatggtatatgattagttgaagtaggtagccatgttgggccaggaagcttagccattattgagtcatgtaactagcaagagtatataatattatgttattggcactaatgaagttacaactaatcatggaggaacaaatatggacataacaaaactagaggaacattagtgatgttgtaacttataagtaccatgcaagaataacagtggcattattagtggaaccaatgaggtgattaatggggtaataatacatgcatctttcagaaaaaaaatgatatttgaattcagtttgtcatttgataacttaagttactggtagaattggcatgcaattattgttactagatatattttccgtcagctgaaatacatgctctttttgtcttgtgtggtcttgattcttctagtatttatgcatcttcaactgtttctttaggaaagatgatggtgtgaaggtggtctctgtggagaatttgaagaatccttatgaaaaacaagggaacttcaacatgcgattcaagttgactcttaacaagctgtatgcatggagcctagtttcctatgaccgaggctctttgtgcttcagccctcaatggacgtttttaagaacatgctacatgagctagctgttgggcgtgataacccagatggtgcagatcagggcttccttgctagctatttcccagacttgcttgaccgaccaatgttccatccaccagttaatggtaccaaacttgaaggaacatatcgtcttccgttaggctatcaaatggacgcatcttactattatttgaaactccgctggagcattccatgtgggccgaacagcgtgattacatttcctagcgctccatggtttaagccatggtattggtggtcttggccagttttacctctgggactttcttggcatgaacaacgccgtgaaaacttggggtattcatcggagctaccggttgtattaatccaggccctattttacattggagtcattgcagtcacccgacttgcgcggcctagtttgtcaaagatgtgctacaacagaagaatggagaaaagtactatagttttgctcacaacactcagagtagtggcagcatggtccatacttgcagcttacaccatacccttcttcctgatcccacggacggtgcatccgctactaggttggccactatatttgcttggtgctttctccttttcttcaatcgtgatcaatgtattcctcctccacccccttgcggtcctcacaacatggttggggatcatcggtgctctcttcgtgatggcattcccatggtatttaaacggtgttgtaagggccttggcagtgttcgcctatgcattttgctgcgctcccttgatctggggatctttggttaagacaatgagctccttgcagatcctgattgaaagggatgcattcagacttggtgaacctaaccagacagccgagttcacgaagctttattgaggtgtgtattgcagatacatgtcattgcatttcatcagctaattccgattcgcattggctattctgatggccaattcagttgtacaagtaaaaccgcagatgaaactacagttgcacctttaacaccacctgaaacctttggagcccgtgatattcttcgtaattgcgtaggtgacatacagggcaaagggagagaacatagtttgatgtttgtgtgtggggggtgttggttgtggaagtggaactgcagaggaacattatagagtaatttttttgttacttcatttactgctcctctaaaagagccaacacattcttggctttcttgtaattgatatcatcagttcc

SEQ ID NO: 20647 - DNA, 1696 bp, Oryza sativa
  ref <308>: DATABASE ACCESSION NUMBER: AK070955
  ref <309>: DATABASE ENTRY DATE: 2001-12-06
actacaccactcacgcctcctcccctctctctcagtccacccctccccatttccaccactccgccctcgccgccgaccgccgccgccgccgccttcgccgtcgtctcgcagcgcgacccacggccacgcgggggggacgcgctcgtcgtctctctctctgtcctcttgtggttcccgccgacgcacgagcaggagctagggtttccggcgccggggcgccgggggttatgagcagcagccgccgccccgcaggatctagggttccgacgactccgctcacggatggagggtggtagaggcgcgggcgacctccactcggcaaacacccatggattatgatgattctgattttcagagccagaatttccagttagctggtgaagacaacaataaattcccagcaggtctgcggcaatttccactgcccaaacttgacatcgacgaccaactacaaagccacctcagatttgataacctaattgattcagagggactttttagcggacaaggtcacggcaacagttggattgaggttttgtccactggaagtagtgttgttgattttagttctagtgctgctgaatcttgctctataaataggacaaataatgtatggtctgaggcaacatccactgaatctgtggaaatgttattgaagtcagtgggtgaaaatgagatgaccggtaacatggatgagaacgcacatcatcagattagtggaatggacagtaaaactgatccatccaacatgccgtccaaaacaagtgattctcccacaggcaacattatagtaccagctgagaatgataagtctcagagcactcgttcggaaatggcagaagatccttcaaggattcagcctcagcttgagcatatcagacctttctcagtggatgacaaagctgaacaagcagtaggttcaactttatcagacagaaaatctaactatacgctggaatctgtttctgagaggtgcatagtgagtgggaggtcttcttctccaaagaaaacatcagaaagctgtccagatgttggcagctattttgaggtggtccatgatgacgattctttggacaacctcaacatacagtcagatggagtaggttctagaaagttgaataatgaacccttctcagacttggcaccattacagaacatttatactaccagctcatatcactttgagcaggacaatcaagaatcaggagttggtgttaccactcaaggttcagaaatatgccacacgaatgaaaataaagatggacttcatgatttgcaaaatttgtcatgtacaagccagcatttgggttcttcaaacttaactagtgaagttagcaatgaaactttattgtcgggaagttctgatggattactggaggccatcacaaatccagtaaagatgctgcacaggagtgatgacactagtaagagagccagtgctacactgcaatcatctttcttacaagtcgagcatgcatcagaaggcacaaaaggttctattgacaggagcagtgagcccgccatgaagaaatttggtgctagtgaagaacccaattctgctaaatctcaaggtgagccagatttgaaaaattctagtcctcatcttgtcattcctttgccaaccataagtggtgagtttattcagtctccaaaaggaaaacagcttgctcatgttgctggagtttctgaagaaacc

SEQ ID NO: 20648 - DNA, 927 bp, Oryza sativa
  ref <308>: DATABASE ACCESSION NUMBER: AK070956
  ref <309>: DATABASE ENTRY DATE: 2001-12-06
gacatcgctcagagaaacacacacacaaggcacacaggattgagggagaagaagataaggagagagagagagagagggggtgggagggaggggtagcaaagcaacttagctagctttgccagccatggcgaggagctctccttgccttgccgtcgctgtgctcctccttggagtggtggtggcggcgattggagcctttgctgatgaaggggcggcgagcggttggggactagggcatggcgcccgtttcctcagcaggcgaggccgtgctgcgtatgagaagtcgtcggagccagaggcaaagcctgcgtcgcagcaggagccgaagtcggattcttactcgcaggcaaagcctgggccaaaagatgaggtctgccctgtcctctcctcatcgaccggcgccggaagggaaggagcaaagtgaagatgatctaccgcaagtggtcgctgctctcctccaccatcctcatctggggcggcgccgccaccgccggcctcgccggggtcttcctcttcaacgccaaggagaagttccagaagtatctttccggtgaaggccagaggctcaggcagcaggacagagcggcgatgggcaagaactagcgaaagacctcaggcaatttcgatggcgcaacaggtgtatttgacaaattttccccctccaatggctttggctctttgtactctctaaactaactccacaataaatcgtgaggctcgtggctgaaacatggaaatgagctttagctctagtttctggctgctgtgcagcccttgtataaaatgatttgacgatttcgctttagcctctgatagcccttggtttatcaaagcatttttacttcgttttgatcaacttgtgtgacatgtcgatgtccaacttgtgttttgggtgctctgaatgaataaaggttgtttcatttgacg

SEQ ID NO: 20649 - DNA, 610 bp, Oryza sativa
  ref <308>: DATABASE ACCESSION NUMBER: AK070957
  ref <309>: DATABASE ENTRY DATE: 2001-12-06
gagtccactcgcggccccccccaagatccacccgcgcaagtcacagatcgcgccggccatggccatcggcggcgacgcggcgagcatggtggccgtcggcctcgtgtggggcaccaccaacgccctgatgcgccggggcgcgcttgtctgggaccaccgcctgcgctcccttcccgccacctcctcctccgtcaccggcgtgctgcggcggtgggcggagctcctcctgacgtggcagtactcggcgccgttcgccgtcaacctcgcggcatccgccgccttcttcagcctccttggcgccgccccgatctccgttgccgtgcccgtcacgaacgccaccaccttcgccgccaccgctgtcgccgccgccctcctcggcgagggcacgcgcgcagcgcccgcagcgctcggcacggcgctcatcgtcctcggcgtctgggtctgcatctcctagcacttcaggttgtgaaaagggaccctttcttgggaatttctgtactttctttttgtttctcttaaaatgatggaatagtatgtactcatgtttgatgaaattttctgtgcaaagcttttggaaatgatgaatgaattatggtcgaatttattcagc

SEQ ID NO: 20650 - DNA, 1407 bp, Oryza sativa
  ref <308>: DATABASE ACCESSION NUMBER: AK070958
  ref <309>: DATABASE ENTRY DATE: 2001-12-06
gataatgtgcatcagccataactaccagcacacacaacgactacccttctttaaaaggaaacctcacagagcccaaggcttctccatgccgttgccctaagttgtcttctccaatctccactccccacccatcgatcaactcacagctcgatccagccccctccagatcttcagatcggtggatcgattgatcaacatggggagggggaagattgagataaagagaatcgagaacaagacgagccgtcaggtgaccttctgcaagcgcaggaatgggctgctgaagaaggcctacgagctcgccatactctgcgacgctgagatcgcactcatcgtcttctccagccgaggacgcctctatgagttctccaatgtaaacagcacaaggtcaacaatcgagaggtacaagaaagcctctgccagcacttcaggatccgctccagtgatagacgtcaattctcatcaatactttcagcaagaagcagcaaaaatgcgccaccagatacagaccttgcagaatgcaaacaggcacctcatcggtgagtccattggcaatatgaccgcaaaggagctcaagagccttgaaaatcggcttgaaaagggcatcagccgaattcgatcaaagaagcatgagctgctgttctcggagatcgaatacatgcagaaaagggaagcagatcttcagaacgagaacatgttcctgagagccaaggtggcagaggccgagcgagctgaacatgatgatcagcaggcggcggaggacgacgagatggcgccggcgccggcggtcggcggcgggtcatcgtcggggacagagctggaggcgctgccggcgacgttcgacacaagggaatactaccagccggcgccgccggtgagcatgctggccgccgcggcggcggcggcggcggcgcagtactcgtcggaccaccaccagactgctctccacctcggctacttcaaggtcgactccggcaaaggcggcctcctctagatcgatcgccatggatgcaaatattgcatgcattcgatcgaattatactgtattccgtaagagcgacgacgatgaagatgacaataattattgtggtattgtacgtatagtacgctggtagacctacgtatacgtatacgtatgtatgatgaagaataaggtggtgtttggttggaggggctaaagtggggctaaactttagttcctctcacaaaaatataagttcctattatagagacttatatttttgtgagagagactaaatttagtcctagttcccaaacacccctaatatacatttgtggtgtgcatgcatggtgtgtgggtactatatgatcagagtgtgctgcatatgcgtattccgtttgctagctctgacatgcatttgtctaaatatatatttttatttatgc

SEQ ID NO: 20651 - DNA, 888 bp, Oryza sativa
  ref <308>: DATABASE ACCESSION NUMBER: AK070959
  ref <309>: DATABASE ENTRY DATE: 2001-12-06
gagtttgacatgagcagaggtactgcttccatggatgcaatcagcctagatgagtgggagctcctgcctgacaacaagagttcctacttcatggaggagttcaccagtgaccatggcactgttgttgatgatgagaccaagaatatatttctgcctatccatctatcagaagaggtctatgtgggtgatcctgtcatcaagttcaaggacatcgatgtcgtgaagattgaatcgtaccgagaagagttcgtgcctaaggtgactgagatatttgatgcagaagaggaggcagagatgatcaagagtcccgtcagtgcagaggaagttgatgtcgacgatgatgatgaggtgatggctatggttgcacctgatcaatgtgttgaagaggaagaaggtgcccagaaagacaaggaacacaatggtttcagtgtggggaagctgagagtgaatggtgttggggcactctgctcatttggggttgcggctgccaccttgtgcatctttctgcttggtggcaggcagcagcagctgcacaagacgcagaatcagaagaccccgttccagatgtatgctgataatgagagaattcagcaggttgtgcagcaagcctcgagactgaatcaagctgtgtcaacagtaatgggaggtgcatccacaagggcaagcatatcatttggtggctactacgatggattttaatgtgttagaaaccttgatagaatatttcttttcatagtcaagtattagatccaggtgttctctatgatagccatctatattctcatattctttatattggtttggtccaagtgttcttcatgtacaatatcattcaaccaacctcctgtatattttcagatctactagatgtgcatattttggttgatc

SEQ ID NO: 20652 - DNA, 1485 bp, Oryza sativa
  ref <308>: DATABASE ACCESSION NUMBER: AK070960
  ref <309>: DATABASE ENTRY DATE: 2001-12-06
ggctaatttctactcggggaagaagaagagccctctccaaaggatctcctcgcccggccggcggcgatggcggccgcggcgccgatgccggttgccggagcggggtggtgggatctcgtgaacggctcgacggcgtggcaggacgggatcttcctctccctcgccgctctctacggcctcgtcgccgcatcctccttcgtaagcatctcgccgcagtgctcatctcctcctcctcctcctcctgagtcctcctgactgatactatactctagttatgcttatgcgaaagcactgggggaaagattctttcagaattttgtgtcaagatggattaaggggtaaaaggaataacaatacacgtactccaactgggttggtgacttgagttcatggcaggagaataaagacttgatttttggtgcttgtttgatgggaataccgcagatttgcgatatcaccgtcagcgagtttaattgggaataaagacggttttgtattagctttgtgctttgagcataccagtgttttgcatctgaaacttgtaaaagctgataatgaggacgaatattttacagaactttagatcaatcaatatgaaaaacctgcgatttgaaatagagatagctggacaaggacttgtgattatctgccatgcttatctttctgatatccggaaatcctgctggatgcctggatagacagtacaaaggacaataatgtgtatttatgccttggtatctgaataatgagtagttactacattagtgtgggaagtatgaactgcagatccagttcctatgcttacagatatggtgcacatgtgaatgctcgctgttaaatgattaaatttacttgaggaagacaaggcatacttaattacttatcatgtgatatgcagatccaagttgttaggatacagtacagagttcctgaatatggatggacaacacaaaaggtctttcaattacttaatttcattgtgaatggaggtatttgttcaatttcacttgtagtacaagttacatgctcaactccctttgtgcttttgagtttaatgtgatttcaatctgcagcgaggtgttctatctttgcagtccgccgccaagtccaacaagtgaaccctgaggtctggacatctttgctattttctgtcttgtaattgttatgtttcacccaattggccagagttatattcttcattcatttttattccagatctttcagcatgttattcttgatcttccggggcttgcattcttcacaacgtatgcaatgttggcacttttctgggctgagatatcttatcaagcacgtggtctagagactgaagggcttagatcaggtttctacactattaatggtgtaatatatgtgatacaggtaaagcaagttatctctaaaagtctgtattgattagtgattgctatttatcagattttgtataattccgttagcattgcaataatcaatagtacaccctattgc

SEQ ID NO: 20653 - DNA, 912 bp, Oryza sativa
  ref <308>: DATABASE ACCESSION NUMBER: AK070961
  ref <309>: DATABASE ENTRY DATE: 2001-12-06
ggctccttgcgccgccaacgccaagacgagtggcggctgaacaggggaggggcggcgatctctatctggcgagcagagcaggggagaggatcatgtcgaagaagaggggtctttctttggaggagaagagggagcagatgctacaaatattttatgacagtcaagacttctatctgcttaaagagcttgagaagttgggtcccaaaaagggtgtcatcagtcagtcagtgaaggatgttgtgcaaagcctggtggatgatgatcttgtcttgaaagataaaatagggacttcagtgtacttttggagtcttcccagctgtgctggaaatcagctgaggactacttacagcaaactggaatctgatctttcaagctctaaaaagcgcttcatagagcttgttgagcagagagagaatttgaaaagaggcagagaggactctgatgagagagaagctgctttggaggagctgaaggctgtagagcaacaccacaagaagttaaaggaggaactgactgcttatgctgatagtgatccagcagcactagaggcaatgaatgatgctattgaggttgctcatgcggcagctaacagatggacagacaatatcttcactctgcaacagtggtgttcgaccactttcccacaagcaaaagaacaactcgaacacatgtacagggaggtggggataactgaagatttcgaatatctgcagtaatgcataacatcctggttgccctgttacaaaaccgtatgtaacccaactcagcaaatctagagtagttcacctggaatctgtagaagtttattcatacccatgttagcaatcttacagtaaatgatcccaatatgctccatattttctgctttgtaagtaaggtacctatggaatgctgtcagaaaaacagttctct

SEQ ID NO: 20654 - DNA, 1853 bp, Oryza sativa
  ref <308>: DATABASE ACCESSION NUMBER: AK070962
  ref <309>: DATABASE ENTRY DATE: 2001-12-06
gcgggtcacacacacatactccccatggcagctgcaggggaagtggtgatgcttggtggcattctcctccctctcctcctggttgtcgccgtctccggtgagccgccgccgatcagccggaggagcttccccgaggggttcatcttcgggacggcctcgtcgtcgtatcagtatgagggtggcgccagagaggggggcagaggaccaagcatctgggacacattcacacaccagcacccagataagattgctgacaaaagcaatggggacgtggctgcagactcctaccatctatacaaggaagatgtgcgcatcatgaaggatatgggagtggatgcatataggttctccatctcatggacaagaattcttccaaatggaagtctgagcggtggaatcaacagagaaggcatcagctactacaacaatttgatcaatgaactattactgaaaggggtgcaaccatttgttacccttttccactgggactcgccacaggcattagaagataaatataatggatttcttagccctaatatcataaatgactataaggagtacgctgaaacctgcttcaaagagtttggtgacagagtgaaacattggatcaccttcaatgagcctttgagcttctgtgttgcgggatatgcatcaggtggcatgtttgcaccaggccgctgttcgccttgggagggaaattgcagtgctggcgattcaggaagggagccttacaccgcatgccatcatcaactacttgctcatgcggaaactgttcggttgtacaaagagaaatatcaggtcttacaaaaggggaagattggaataactttggtctcgaactggtttgttcccttctcccgctccaaatccaacatcgatgctgcaaggcgtgctttagacttcatgcttggatggtttatggatcccctaattagaggcgagtaccccctaagcatgagagaattggttcggaatcgcttgcctcagttcactaaagaacaatctgagttgatcaagggttcattcgattttattggacttaattactacacttcaaattatgctggtagccttcctccatcaaatggcctcaataacagctatagtactgatgctcgagctaatcttactgctgttcgaaacggcattcccataggtcctcaggctgcttcgccttggctttacatctatcctcaagggttccgtgaattggtgctttatgttaaggaaaactatggcaatcctaccatctacatcaccgaaaatggtgttgatgaattcaacaataagaccttaccactccaggaagccttgaaggatgacactagaatagattactaccacaagcacctcctttcactgctaagtgcaataagggacggagcaaatgtgaagggatactttgcatggtcgctgcttgataacttcgagtggtcgaacggctatactgttcgctttgggataaactttgtggattacaatgacggagcgaagagataccccaaaatgtctgcccattggttcaaggagttcctccagaagtgatgaaaataaaagcgtgtgaagagttgcacacattgctcttcccattttgaacagcaaagagcatatatgttacaacagatggaggtattgcaagtttgcaactaaataaatctctgtcttcactctctgcgtatagctagctaagcgatggatagagagttacatcttctcttacgcatatttcaaaaaatttaagaggttgtagtaacttcttcatcatattttggagatgcgatcatagcacagtggcagaggttgctggcatgcaccgtccacgcaggttcgattctccttgagcacggctcacc

SEQ ID NO: 20655 - DNA, 1216 bp, Oryza sativa
  ref <308>: DATABASE ACCESSION NUMBER: AK070963
  ref <309>: DATABASE ENTRY DATE: 2001-12-06
ggtggcgtccacgcgcccaccccacgcgcgtcaccgtcgctcgcccaaactgcgggcgcgtcgcacgccgccctcccatcgttttctcccattctttccccctcctcctcgtgcaaccacccaaccactgcagccagccacgagccgaggaagccgaggccgaggaggaagacgacgaagacaagtagcgcaaggaaccctcgaaccgggaggccgccgcggctccgatctgggagggggaggtcgagatggtgcccagggacagggtgaatgccgctgccgctggtggcggcggcgaggggaggctggtccagagcggtatagtgaacaagaagtgtgataagaaggctccaaagagaatccataaatcagagagggagaaacttaagcgggacaagcagaatgacctctttaatgagctgggaaacttgctagaacctgacaggcagaacaatgggaaggcatgtgtactgggtgaaactacacgaatactaaaagatttactttcacaagtggaatctctccggaaggagaatagttcactgaagaatgaatctcattatgttgcattggagagaaatgaactgcacgacgataacagcatgcttcgtactgaaatcttggagcttcaaaacgagcttaggacgcggatggaaggcaatcctgtttggagtcatgtaaacaccagaccagctctcagggtaccttatccgacaaccggagtgttcccagtacagcacctgccacatttaccagtcaccacgacggcagcatttcctcagcagctaccggttatcatcgagcagcactatgccgccacgccaagagaacttcagctcttccctgagtctgcgaccagcgaagacagcgaaccgtcacaagaacacgggatttctgaccatgtaacacggcctcagccaaggtacccaacaccaacggccactttgccagtaaacctgtttccagtgtttccaggaagacaagatcaacaatgtagcagtggtacttctggcactaacgaggaagaccgtataggtagatcttaggtacactacataacgagaggtccacacaatgatttgagaattcctttagtttcaacgtttaactttgcaagtttagcaaatgtgaaacagagatctgcgactgtgctcatgggtagcacctaatctgtatatctgaatctcagttttaagtggtcaaataggtgacattc

SEQ ID NO: 20656 - DNA, 855 bp, Oryza sativa
  ref <308>: DATABASE ACCESSION NUMBER: AK070964
  ref <309>: DATABASE ENTRY DATE: 2001-12-06
gagatctttccgctcctcctcctcgtcgtcgtcttcctcctctttcctcctcctccccgtctctccctctccgcttctctctcccaccaaccccccgcccccacccatggcgctcgcatccggcacgtcctgcgccctccccggcgccgcgcgcccccacctcgccgtgtccccctctccgcccgcctcctcgatccgtttctgcagaggcggctcccgcggaggcagggccgtcgtctccctccgcgcctccgtgcctccagcagcagcggcagcaacaacatctggtagcattgcacctgcaatttcattgactgaaaaggctttgaagcatctgaataaaatgagggctgaacggaatgaagatctctgtttgagaattggagttaggcaaggtggatgttctggcatgtcttacaccatggagtttgaagatcgatccaatgccagccctgatgattcagttgtagaatatgatggctttgcaatagtctgcgacccgaagagccttcttttcatgtttggaatggagctggactacagtgacgcccttatcggtggtggattcgccttccagaacccaaatgcaacaaagacatgtgggtgtggcaaatctttcgccaccggaaaagaaacagagagcacagcaacagcctgcaacaactaagctagaaacatataggtggaaatgccatatatatagctcacccttgacaaaatgttctatggatataccacagatgaatactcgaaactcagaagtgtaacgattttcattacagtttgtgtgtatcactgtatccaattggacaaattactgctcgatagaattcaaagatagttaccatgaactcc

SEQ ID NO: 20657 - DNA, 1414 bp, Oryza sativa
  ref <308>: DATABASE ACCESSION NUMBER: AK070965
  ref <309>: DATABASE ENTRY DATE: 2001-12-06
gccttccacaccgcaccactccacgccttcctcctcttctctcgcagtccactcgctggtctctccaattcttggcttctttgctctgctggattagcagcagctgctctgcttcttgctctgcccttgtctttgggctttcagggcggtgtgctgaggccgagcggtttgggcggtctcaagaatcgcttgtgcgtgcgggggagttgtcgtgggaggtggggatggagaggtacgaggtgatcaaggacatagggtcggggaacttcggcgtggccaagcttgtccgggatgtgcggaccaaggagctgtttgccgtcaagttcatcgagagggggcagaagatcgacgagaatgtccaaagggagattatgaaccacaggtcactgaggcatccgaacattgttagattcaaggaggttgtgctaactcccacacatttggccatagttatggaatatgctgctggaggtgagctattcgaaaggatttgcagtgctgggaggtttagcgaggatgaggcaaggttcttcttccagcagttgatttcaggagttagctactgtcattccatgcaaatatgtcatagagatttgaaactagaaaatactctcttggatgggagcatagcacctcggctcaagatatgtgattttggttactcaaagtcctctttgttgcactctcaaccgaaatctactgtcggtactccagcttatatcgctcctgaggtccttgctagaaaagaatatgatggaaaggttgctgacgtttggtcatgtggagtaactctatatgtgatgcttgttggtgcgtacccctttgaggaccctgacgaaccaagaaacttccgcaagacaattactcggatactaagcgtacaatacatggttcctgattatgttcgagtttcgatggaatgcagacatcttctgtcccggattttcgtggcaaacccagagcaacgaattaccattcctgagatcaagaaccacccatggttcctcaagaacctgccgatcgagatgactgacgagtaccagatgagcgtccagatgaacgacatcaacaccccgtcacagggcctggaggagatcatggccatcatacaggaggcgcggaagccgggtgatggctccaaattctccgggcagatcccgggcctagggagcatggagctcgacgacgttgacaccgacgacatcgacgtcgaggacagcggcgacttcgtgtgcgcattgtgacgaggccgtgaacttgctttctcttcttggagtgtgctgctccttttgttgtgctgctgttcatttctgagagctccattctgttgttgtgtcagtgtttgtaaacgaggtgctgtggataatctgaactcttttatatgttggtgttcttagctgaattctttgcgtcc

SEQ ID NO: 20658 - DNA, 1410 bp, Oryza sativa
  ref <308>: DATABASE ACCESSION NUMBER: AK070966
  ref <309>: DATABASE ENTRY DATE: 2001-12-06
gatatatcatcatcaccatctttatctccctctctctctctccctctctgcatatatatagctacttcgatctctttgtagcaaccatcagttagctagctagcttgaggtagctagcgcttgtatttatcagaagcttagagataattttcagaagcttagagagctatcttagctacaaggaattaccggccaatcgacggcgagatcgatcgattgatcatgggagggtttgagaggagaggagttcggcagtacaaccggtccgaggtgccacggatgcggtggacggaggagatgcaccggcagttcgtcgaggccgtcgagtgcctcggcggccaggacgaagcaacaccgaagcgaattcttcagttgatgggcgtgaagggagttagcatctctcatatcaagagccatcttcagatgtacagatcaggctctagcaacagcaatcatcctgtcagcctccagaagttgacatcagctactgttaacaacattagcaaacgtgagtttgtgaatagtgaagatcgctgcatttacgcgtcaggggatagaaacactgcatcttcagacaagaatacttacaccatactccgctgcggccgctcatcaatgccatcaatagaagaaatattcagaaactgggaacaaaccagagggcgtcttcttccatggaactccaacgtgattacaacagaacaggcaacgactagagcaagtcgtcagactactaactacagtaagcctctgaagcagctgacagactgcgacctgacgctgtcgatcgggcagctgtgggacgacgccgccggcagcgacgccgacggctccagcacgatcagcgaggaggtcgccgcgccgtcgagggacgaagcgttcgtctcttcggccgatgaccacttcgccgccgccgccgcgaagaaggagagcaatgctgaccactgatctgaacctggacctgaccatttcatcttcttggctgtcctgatcatatgatcattcagttgatgggcctgtgtatagctgcattatatttgtgcatatatgtagtagtatgtgtacaaaaataacgcggagagagagagcgtcaggctagtagtatttgcaggttacctgatgagatgatcttagagagtgtagtaatattctggagatttctttaggattattttcttatggtcagacacagcattttattaggtttttcagtagcgcatgcacgcgtttatctgtatagttttctttctattattaattgttcgttcgatcagagaccggggacttcatacgaagacgggtgagaaattttgacagtttttgcttctcttgggtagacttctctgttgaatttctcacctttcatcatctgggcagttcccctatttctgatcgaattgtttgcgcacc

SEQ ID NO: 20659 - DNA, 3799 bp, Oryza sativa
  ref <308>: DATABASE ACCESSION NUMBER: AK070967
  ref <309>: DATABASE ENTRY DATE: 2001-12-06
cggccgcagaaaaggagagaagagaaaaaaaactttgggcgagaggagaggaggaggaggaggaggaagaaggcgcaggtgagatctccgatccttctagaagcttctggaatcgcgcggtccaggtagaattatacacttgagggggctgatgcgtggtggtgcgccgccggagtggtaggtggcggtcggggggagtgggagcttctagaagggcgtgtcgtacgtgtgcgagtgggttgggagtcctctggatttatcggttcgtcgatctcgcgggaggtgagggcgccgatggttctagatcgctgtagatgatttgtcgatgcattgaattgggctttggtgcgcttggtctgcgcgcatgggggtttttgtggattgattttgataagagttgctgaatttagctagtttttgcggttgatttcgttgggctccaagttgccaaatgctgcttacgcatcgctctaggtggtttttcgttggatcaaactggtattttggtggttagattcggggcgtgtgagtggtcaccatttttggactaacgaggtctccccaattcagtaatttatgttcttactgcttagtgttactgttacgttcgattgacttcttcatggaaggactgtacaagctcgatcaatatcgttcggatgtggcttgagtgtgaaaactaatgccttgtgtcttttttagcttagtagtagatgtctctggatgcatgcgttggtggataatagtttgatggggtcatctccgcgttggatagcaattaaggttactgttttttttttggctattcttctgtcagttctgttgattacaacagtttttagctattttgcttgagtcatcgtctgttgacagtgatgacagtaatgtggttctcttgcaacgatgatgaacttataatgggcactctttttctttctcaaagattgttccatgataaaggaaagtacatacttttagctatgccatgcttaaagtcaccagtatttttccatttatcggataccccatgtaacaatgctacaattagttgtcgtgatctatgtttttgggctgaaatgtaagctggaaaccccagtgtgactctttaaaacctgctttcagaaaagcagggccatctggcttatcatctaaaagaaacaatgctacaattagtagcttttgcccatagttggatctcccataagacaatgctttttgctctggtactttttgcattcaaaagtatcaaatggacagacattcagtttatttcgtcttgaatgcatcttgaccgacaagggatgatcagagatggccagcttggcgactgtagtttctgtctgtaggcaactgatttgtttttgcgtcttctcaagtgcaatcctggtgtgtcaacttatttgtgttctgatgtgaacttctaagattaatttgcaggtttccgtctccatttttagctggcagaaaaatgggaaagagtttatttctgtgtgacttggggcttacttttacatgtccaattctctttcttgcattctcttttggtatgtttgacttgcagcttataggatggatattttctttaacttgcaatagactgatagtatgattctgataatcacgtgcagtcttcatggccatatataaatgttcaatatcttgattcttccataccatatgggatttccaatttgtctgatgtattcaccatttatcaacttgaactatgtaataagaactttagagcatatattttgcaccgaatgcaatccaccattcatctagttggataattcaacaggttctatgccaaaccagacttaaaaatgttatggtcctgttttttcttcaatatcattggggataagttgagttccacataaatgtagttgttaggtttctttgaatctttgtttctagcaaaaccatcagctgtttctaggaatctaagactgccttgcacaattctatatgataggaataggaagaatatctccagcaagactttcatctgcttatcatcagtatgtccatcgaagagagaacattaagtttgataaacaagaccactgcgttaaatccaaatgcacaagaatttgtaccttcatccctcagatctatcaatgatgtttcaaatagatcagacacatccaggatttctgtatcaggatcctccaaagacactattgcagatcaacaagatcctgttataccaagtaaccctgatgaagaagcacatcggtactggcaagaacagcttccagatgatattacccctgatttcaaagttctgggacaagatgagatgcctggacctgataatatttcactcactggcttgtcaataaatgatagcattggtgcttcactattttctccaaaccagacatcgaatttgcaacaccgtgcttctccttttattagggacactctgagcacacgatcaaagatcgagtttcctagcccaacttatgtagaagaacagtcaagagctactattatgagtccaactgcaagcgctatgagtccaactgcggctccgtgggtaaaaacagtaagaaatggtgtgcaatacaatgcaaacagaagggatgccagccattacaatggagattctagcattggagctccagtgcaaaaccttactgatgcatacttcggaagcaggcgcagctttagctcaactatggatatcatgagtcagctggagaataaagttgatggacgattcaatcagaatctgaggtcactgtcgtttggacattcaagtcctccatcaccagcatcatatggtcaaaatggtcttgcaaactataacaaagaagcttttggtctggcaaacaatacatatagatcccactcagctgtactcgcagatgatatactttccccttcagctggtcgggaacatatttctctggatgctcctagggggaggtacaatacaactaatttgcctgtttctggtcttggttcaagcagaggctctcagttcatggcaagctcattcaatggcaatcatgacatagtctcaaacaacaccctgcaaaatatagctggagttcaaacaggacctgcttggcttgaagctgatactgcagcaaacatgtttttggaatcaaaggatgaagctcatgattttgcaagcctacggcatgcgcttctggaacaggataggcaggttcttttaactggtgccaatcctttagcaaaggaactaaacatcaaggagctttacaatttgcaaagcagactagctcaggaaaaggctagagatgtatatcgccaaagatttcaaatgccagaatttcaaggcctggttcaggagcaaaataccccaactgacctgtgtggtcttcacgtaagcgaggcgatacacgccctgaactatgagctcaacaaccggcggaagattgctcgatccacaggccgtcgtctccaggtgatcataatatcaagcacacgtactccggcgaggctgaccgccgccgtcgagcagtacctcctggagcacggcattcagtatacgcaggcacagccgggcctcttccgtgtcctgttacagtgaagtaacaggatggtaggctcatcatgtttgtgtacacctttgaaagaagaagaaaaaaaagaggaggaacaaaaaagaattgacccctgtactactgtatatggcagagatgagtagtactagcagaatagaaatttgaaatagctgttgtaatattcgtatagcaaggctttttttttttgtcagcaaaaaacgttgtaaaatttgcggaattaggcgatatgttctttc

SEQ ID NO: 20660 - DNA, 695 bp, Oryza sativa
  ref <308>: DATABASE ACCESSION NUMBER: AK070968
  ref <309>: DATABASE ENTRY DATE: 2001-12-06
ggtcggtctagtcccccagctcatcctggccgtccgatcaataatactgagcccagctgcccaagacctcgaatcgcgcccttctcttgtcttgtgaatctgtgagaaccccgcatccatggcggcggcggcggcggcctcctcgggctggctccggcgagcggcggggacagtcccgcgcattccatgcggactcgtgaccgcactcgtcccgacccctcctccacccgctgctgcggtggtgtccgaggcccccgcgctcgcgctcccttcccacgccgccgtcgccatggagctcatggctgttcccaagaagaaggtttcaaagtataagaagggcctgaggaatgggccaaaagccctgaagcctgttcctgtaattgtccgctgcaagtgctgcggtcgggtgaagctgccacacttctactgttgcagcggcgaaagagggaaccctggatctgagagctcgtaatatagccttcaagactctgaagtcgagagttcatagcggatgcagagagggggaaaaacaccaggaccccattccagtaaaatcagtcaagactccactacctgtctcctgaaatcaaagccatttcttcatctatgtgagtcctgaatcagtgtttaacttttgactgcttttgtcattgggtaataataagcgctggaagtcttagctgatatcatggttg

SEQ ID NO: 20661 - DNA, 2221 bp, Oryza sativa
  misc_feature (1073)..(1073): "n"=any one base of a, t, c, or g
  ref <308>: DATABASE ACCESSION NUMBER: AK070969
  ref <309>: DATABASE ENTRY DATE: 2001-12-06
aaaaaggaaacgctgcgaaaaacaaataacgcgtacgcccgccggacctaacccacgccgcgccggccgccggacgccactgctccgcccgcctgaactcaccgccgccgccctcccccacgccgccatctccacggacctccccacaccaccgaagccacgccgccgcgccgcccgcctcacctcaccgctgagccgcacttccccccgccgcctcctcaactcctcgccgccggccggtaccctactccgcctgcaaccgccgccatcggagccatggatccttcgtcgccctgaatttcacctgcatccgcccgcttgtgacgtgtttgattttttttgtccccggtgatttgattcaaattcaatccgatcctttgttggttttgtttttttttgtgttctatatgttgtttcccgtggtcgtcctttcgccgtgttcggttgttgctggagcggatttgattggaagttcccaagtcgaggtctcaaggaagaggtcagtttcccgtctacagtccggtcgtttgatttagtcacttgggttcggtgattgatttcagatttgagtggttgattacaaccttcaatcgatggatggatgatcatcggtttctatcagtccttacacgaggtgattcgataccctgggttgattgttatttgtaaccgctgatctggcttgtggtatgtgtttgtgctcctctagatgatgcaggaaggagagtgcctgttgagatgaaccgaattgatggaggtttgattattatggtccaggttcatggttgctttgattattagttatattcatgatgaatcggggtggtggaggtttgcttgttatggttcatggttcttttgattagttcatgatggttttgaaattattctgacacgaaagtttgtggtgccgtgacaaccctcactggatttcctttggtcagatcctcaaaatgtgcacatttctaagtggttccgagatagatgtacgagagattgtcagatggaatagcaatgctctgtttggattctgaccccccccccccgggcgcgcgatttgatttatgcctganaagtctgatttgggccgttggttgttcttcagaattgttggagttgcatctcatgatagcacatgcaaagatggatttgcaacccaaacctgcctcggtctacgagctcaagacaggctttatccctatgcactcagtctttaattcatgttttctgtacttaggctaccttcttccaaaataatattcttgctctctgtaggtctttgtcggtgacatgggaccggaggtatcatgactagaggcttgggcagccgctgtcacccacgtggcctgaccccctcgggggggtcgggcccgagggtgacgaggccacccctccctctgtctccccgaggggtcgggccgctcccgttttggccccgagggctggggtgccccgaccccctatgattttggcgccacgtgtatgggttaggtgagcacagcggggctcacctaaccgcatttattgcgggttggacgagcgcgccacgccgcatttaatgcagcgcagcgcacgcttatccggtccgtgaccggtcgcagtgtgtgaccagtcacagaccagtcagatcgcgggttaggtggcaacaggcggcctgtcacacgcctcgccctgtcccgtcggaatgatgagagcctccaggaactcgtctctaagccggagccggcgtgctaactcctggagttaacacgtcagtccccgccagattcatgccaggcttcatcgcaaccattgcaaggaagtcattgtatgaagaagggcagacgtgcggcatgctaaactgacgcgtggtggacaagaatgaccgatcagtgactggtctgacgccggtcacgtcatcggtagacaaccgtgctcccacgttgcatctgcttccggcggagtggaggtaggtatgacccatcccatcggagggtcattgggacagcggccattgcaaatctccacacattaatgaaggaatgacagggatatcccctgtgtcaggcgagtgacggcgctgggcctcactcaaggacaagctgtgatttagcttccaggggaaggcgcaagccaagttttggtcaagatagggtgggtccccacccaaaagaagagtaggtagaagtggtgcatgtggtatccccttgagatatagaaggaggaccttgcccaccaaagc

SEQ ID NO: 20662 - DNA, 1474 bp, Oryza sativa
  ref <308>: DATABASE ACCESSION NUMBER: AK099163
  ref <309>: DATABASE ENTRY DATE: 2002-08-28
gttcgtgagttcgccggctcgctcgtcgccgatcccatcctccccgcgagcgatccggggcgccgtcgctcgtcctgctgctgcttccgccgaatcctgtttggggggttcaatcggatccccatgtcccatgttagatccgcatccgccgctgccgatgcggcgtcggattggcagaaggtgagggcggagtggttcgccaggttcaaggaggagtacgagaggaaggtcgcggagcatcccgacgtcgactggtccgacgagctggccgtcgacgcccgccactatcgcgagagctgggaacgcatctatgcaagagcctacggccccttcgacaaatccacgtctatcccacctatgcgatatacggctgagcctgtgccattcgatgcatctgaacaatatacgctgcagatcttctgtgtaaaaatcaaagaattaaggcggggcttacagtggccgatccatgtgtttggtctcattgctgcacgggacacaattgatcacaatcgcaatatggtcttcgaccgcactagggatgactgccaaaccctcacccaagaggatccatatctactactgacaggccctacccgtgctgttgtggtgtgtgatcctgtctaccttgaggctgtgctaagagtcaagggctctactgaatcagaggatgaagatttaagctttttcactgtaccgctcaccgatgtcaaccgccctagggaaacatgcctgattactagagagtacaccagcaagcttagcacgctggagctgacgtttggctatgtcgttcgctccgtggaggccacgatcaaggcgcgtatcgttgatgggtcatggccagaagaagatggttcttcagctcggtttactgcctgtacctccagcctgaaacacaatggagttttgttgcttgattctggagataagaggaggaagatgcgtgttgatgccgatggcgtggtagggctctcgcggcgtgtggtttctgttgagtttgagggggagctggaagtttctgtggtgacatttgatggtagtaatatttgtagtaagatggaagctgagataaggttcgtgcctgaggaggtcggtgaaagctgtgttgagcttgatgttggcttttgtaaaatggagatcactgttgcctggtcatgtctttctttatcatgtcgatgatttgggggtagtactttacctgttgtggttgttaaggcttcgctatacgcggtaaggcgcatccatgggctcaacatgaccaaaaagagggtgaaacgaggatatttcctcatctgctcgagttcaattccgactcctcgtgggatgtggatcccctaaagttgatgctaaaaccacccgacgtagttgaaaaatgtcaaccatccctttgtttctaccagctgagattaatttctcctaatcagtgttgatttagtgagaaaatatttttattttcaacaatgagataagtaac

SEQ ID NO: 20663 - DNA, 1003 bp, Oryza sativa
  ref <308>: DATABASE ACCESSION NUMBER: AK070970
  ref <309>: DATABASE ENTRY DATE: 2001-12-06
ggcgagaagagggcaagccaccgacagccacagcctcgccgagcgggcgagacgcgagaagatcaatgcgaggatggagcttctcaaggagctggtccccggatgcagtaaggtatcaggaacagcactggtactggatgagatcatcaatcatgtccaatctcttcaaaggcaagttgagtacttgtcaatgaggctcgcagctgtaaatccgagggtcgactttggtgggctagacaacttcttgactacggagtgtggaaggataacaggcttgaactacaagaatggaatggatttggagcaggtcacctggccagacatgggcgtccatggagcaaggaatctcatgcaactacaacagcagttctggcatggtgatttagcacacccgctccagccgccttcacagtgggaaaagcggacggataccaatccccctgtctttagcaattcaagttcctccctcttcggctatgatctagcaagctctggagcgccggcccagacaggcaacaagctaaagacggagctgtgagcctgtgaccaacggtggtggtagtgatagcaagcaggtcagcagagcaagccaaacaaacatacgtgagctgtggacaatggcggctggatgtcaggagagctagctagctagctaggcgtgagctgtggactgacggctgctgctgctgctgctgctgctgtggatggttggcaacgtcttgtgcagtgcagcagtgcggtgcatgggactttcattgattttggaggccggattctgagacgatgtacatatggaatgcaagatatagagagatactgttgttgctgttgttggagactcttggagctggaggtgatggatatggaggttttactgctgctatctttttttgtagagatgagcgagagatactgtggattcttttcttgctgatgtattcttggtgtatgcctgactacgatggtttaatgtcaaggttatatgagcagcatttatttggtg

SEQ ID NO: 20664 - DNA, 1709 bp, Oryza sativa
  ref <308>: DATABASE ACCESSION NUMBER: AK099164
  ref <309>: DATABASE ENTRY DATE: 2002-08-28
gacaaacactcgagctcacacctgctcgatcaaaatcctccaacaactcgatccattcgcagtagctgcgagctctgagcggcggcgaggtgtccgacatggcgtcggggcagaaggtggtgaagccgatggaggtgtcggtggaggccgggaacgccggggaggcggcgtggctggacgacgacgggcgggcgcggcggacgggcacgttctggacggcgagcgcgcacatcatcaccgccgtcatcggctccggcgtgctgtcgctggcgtgggcgatcgcgcagctgggctgggtggccggtcccgccgtgatgctcctcttcgccttcgtcatctactacacctccaccctcctcgccgagtgctaccgcaccggcgacccggccaccggcaagcgaaactacacctacatggacgccgtgcgcgccaacctcggcggcgccaaggtcaccttctgcggcgtcatccagtacgccaacctcgtcggcgtcgccatcggctacaccatcgcgtcgtccatcagcatgcgcgccatcaggagggccggctgcttccaccacaacggccatggtgacccgtgccgcagctccagcaacccttacatgatcctcttcggcgtcgtgcagatcgtcttctcgcagatcccggacttcgaccagatttggtggctgtccatcgtcgcggccgtcatgtccttcacctactccggcatcggcctctccctcggcatcgtccagacaatctccaatggcgggatccagggcagcctcaccggaatcagcatcggcgtcggcgtcagctcaacgcagaaggtgtggcgcagcctgcaggcattcggcgacatcgccttcgcatactccttctccaacatcctcatcgagatccaagacacgatcaaggcgccgccgccgtcggaggcgaaggtgatgaagagcgcgacgaggctgagcgtggcgacgaccacggtgttctacatgctgtgcgggtgcatgggctacgcggcgttcggcgacgcggcgcccgacaacctcctcacgggcttcggcttctacgagcccttctggctgctcgacgtcgccaacgtcgccatcgtcgtgcacctcgtcggcgcctaccaggtgttcgtccagccaatcttcgccttcgtcgagcgctgggcctcccgccggtggccggacagcgcgttcatcgccaaggagctccgcgtggggcccttcgcgctcagcctcttccgcctgacgtggcgctcggcgttcgtctgcctcaccacagtcgtcgccatgctcctccccttcttcggcaacgtggtgggtctcctcggcgccgtctccttctggccgctcaccgtctacttccccgtcgagatgtacatcgcgcagcgcggcgtgccacgtggcagcgcgaggtgggtctcgctcaagacgctcagcgcgtgctgcctcgtcgtctccatcgccgccgctgcgggctccattgctgacgtcatcgacgctctcaaggtgtacagaccgttcagcggatgattggaacgtgaggggcacgtgtgctcgttaaattatttcttactatctctgtaccaaaatatagcaaactagtataaataggacgaaattcgggtagttctcaggtacgaattcatcgtactaggaaatatctcacattgtattaagttgctatattttgggtcagcattagtacaatattac

SEQ ID NO: 20665 - DNA, 2396 bp, Oryza sativa
  ref <308>: DATABASE ACCESSION NUMBER: AK070971
  ref <309>: DATABASE ENTRY DATE: 2001-12-06
ggcacggcacggcgatcctcacggcctaaccgtcgctccatcctcgcccacctctcctccttccccaaaccctagaatctcgccgcgcgggcgcagctccgcccttcgctcgccgtcatttcccggcttccccgcgcaggggctagctagctagctagctagggttccggcgcacgacgacgatggccgcggacgatctctcatccccggcgcggaagcgcggccgcgacgaggaggaggaggaggaggaggaggtcatcgacggggaggccgcccagaagcgcgcgcgcggggaggatccggagggcggggcgctgctggggctcgccaactacgaggaggacgaggaggacgaggaggcggcggctgctgcggggaggcgccgcgcgaatggccgacacgaggaagaggaggaggaggacgacgacgacgacgaggttgacaacgacgtgaggagggctccggagcggaggccgaggcaagtggagctgcgccgggactgcccttacctcgacaccgtgaaccgccaggtccttgattttgattttgagaagttctgctcaatctccttatcaaacttgaacgtgtatgcatgtttggtttgtggaaagtattaccaaggaagaggcttgaaatcacatgcatatactcacagccttgaagcaggccaccatgtgttcattaaccttcaaactgagaaagcttactgtcttcctgatggatatgagataaatgatccatcattggaagatattcgacatgttctcaacccaaggtttacaacagagcaggttcgtaatcttgataggaacaagcagtggtctagagctcttgatggctccaattatctacctggaatggttggtctaaacaacatcaaggagacagattttgtgaatgtcacaatacagtcattaatgagaattactcctttaagaaatttctttctcatccctgaaaattatcggcatagcaaatccccattggttcatcgatttggagaactaactcgcaaaatctggcatgcaaggaacttcaagggccaggttagtccacatgagtttctgcaagcagttatgaaggccagtgataagaggttccagattggtgttcagtctgatccagtggaatttatgtcatggctcttgaacacaatgcactcgaaactaaaaagtaggaagagaaacagaagcatcatacatgattgctttcagggagaacttgaagtagttaaggaatttcacaagaagcatattgtggaaaagaaagaggacggcgatgaacagaatggtgatgcaggttcagatattgttactgaaacatctagggtcccatttttgatgcttggccttgacctaccacctccacctcttttcaaggacgccatggagaaaaatatcattccacaggtaccactctttaatatattgaagaagtttgatggcgagacagttacagaggtagtgcgaccctccattgctcgtatgaggtatcgagtcatcagacttccaaagtatctgatccttcacatgcgacggtttaccaaaaataacttctttgtagagaagaatcctactctagtgaatttccccgtgaagaacttggaattgaaagattacatcccattacctaagccaaaagattccgagaagctacgctcaaagtatgatctcatagccaacgttgtccatgatggcaagccaggcgagggatgttacagagtatttgtacagcggaaatcagaagaggcttggtatgaaatgcaagatcttcatgttaccgagactcttcctcagatggtagctctttcagaagcctacatgcaaatatacgagcagcacgaatgagtgatgattggtgatcatcatgtagcaccttgcataccgacctttcttttgttgcttctctcagattttatcattagaagctaatcgtcatgtctggagcttttttttttagagaactatggttgttcctttacccttgttccatacagttaattgaaaagcacagggtgagaatgctgtgttagaactgttagattatcacaccggagggactataggagctagcagcagtaaaatataaaattcatgggcattttatttcccagagctttgattgaccggttgtttaaagcagaagacacttcggtttccaagtattttcccttatttatccatggaagggtgaaaatgtacaaggggtgttccgtgcaatgggaggcctgttctgtgcgacgagtggagggagaattgctttaagtggtactgtagaaaagaactggtttctttgacagcaatggaaatattatgcacacaaagtatacttaggtatacttttaatgaggttttagtgaagttgaggacacttgcaataaaatttaatgaattgac

SEQ ID NO: 20666 - DNA, 1019 bp, Oryza sativa
  ref <308>: DATABASE ACCESSION NUMBER: AK070972
  ref <309>: DATABASE ENTRY DATE: 2001-12-06
gactttcaattcgttgctctcctccccggccggtaggcagcaacaagctgtaagcacaagtatcgaaatggttagcggtgatgtaggagtagtagtgtactacctgctgctagtattagtggtggtgcaggggtgcaaaggcagcagcgcggtgcagggtgaaggtcggtggtacaacgagagcgaggccatcggtggtgcggcggcgtgggggaacgcgaaggcgacgtggtacgggcagccgaacggcgccggggcggcggacaacggcggggcgtgcgggttcaagaaggtgaaccagtacccgttcatggggatgacgtcgtgcgggaaccagccgctgtacaagggcggcaagggctgcggctcctgctaccgcgtcagatgcaatcgaaaccccgcctgctccggcaacgcccagaccgtcgccatcaccgacatgaactacttccccctctcccagtaccacttcgacctcagcggcatcgccttcggccgcctcgccaagcccggccgcgccgacgacctccgccgcgcggggatcatcgacgtgcagttcgcgcgcgtgccgtgcgagttcccgggcctcaaggtgggattccacgtggaggaagggtccagccccgtgtacctggcggtgctggtggagtacgagaacggcgacggagacgtggcgcaggtggacctcaaggaggccggcgccggaggaggaaggtggacgccgatgcgggagtcgtgggggtcggtgtggaggctggactccaaccaccgcctgcgggcgccattctccatccgcatccggagcgactccggcaagacgttggtggcacccgacgtcatccccctcaactggacgcccaacaccttctaccgttccttcgtccagtactcctcctagctagctactcctatacccattaattcttccctaactattccttcttgttattatattctacccttatatatatatatatatatgttattaattccgatatcatcatatataattaagtacc

SEQ ID NO: 20667 - DNA, 1295 bp, Oryza sativa
  ref <308>: DATABASE ACCESSION NUMBER: AK070973
  ref <309>: DATABASE ENTRY DATE: 2001-12-06
gagagccgcctcgcctcgcctcgctcccgctgccctcaaatccccgatctccccgacccgcatccacagttccacacccacctcgtgctcgtcgcaccgccaccctctcgagcctcgccgccgcgtgattcgccggccgcgacggccaccaagatctccgccgaccgccgccgtcacccgacaaggaacttgaacagcccaggtcatattccagatggggaaagataaacaatgcgaaactgtggacgcggtcgggatggtgccaatggaggaagagaagaagtccaaggaggagatacatctcaagattaagagcaaggacaagtcttcaggtgatgaggatgagaagaaggagattgagatagaagtcaaagccaagattgtggacaaggaagaggtgaagcttgattcagatgatggcgcaaagtccgcggtaaaaagtaaggactcaaagaaagacaaggaaaataaaaaatcagacaagaaggacgatgaacatgacgatgaggatgaagagggaaagaagaaagaaaaggagatgaaagaaaagaagaaagacaagagtgataagaaggaagaaggcaagaagaaaaaggatggtgatgaggaggaaggtaagaagaaagaaaagaagaaagacaaggatggcgatgagaaagaaggcaagaaagagaagaagaaagacaaggacggtgatgaggaggaagaaggtaagaagaaagagaagaagaagaaagacaagggtgacaaggagaagacgaatgatcccgcgaagcttaaggcgaaactggagaagattgacaccaagatacaagaccttcaagctaagaaggaagacatcctgaggcagctgaaggagcagctgaaagaggagctggaaggaggcaagtccaagaatgccattgaagagaagcctgcacagacattggaaaagggcatcgagcacaacaagcccattgaggagaagcccgctgagacagtggaagggagcagggagtgcaagaacaatgaaaaagaagaaactcatgttgctgcagcctgatctttttgaaactctaaatgatgttcagagttgtggttttttgcttgtaacaagaattgtgatctggatctctgtgtgcagcaaagtatagatatatcacatacttttgagtgtaagaatatggggggtgtatccttgtccagaaaaatagccctgtactgtatacggctggctgagaataaaaggatctttactacagaatgctttgtgttttcactcctgaaaatatattcttcagagagtttccgtggtc

SEQ ID NO: 20668 - DNA, 2386 bp, Oryza sativa
  ref <308>: DATABASE ACCESSION NUMBER: AK070974
  ref <309>: DATABASE ENTRY DATE: 2001-12-06
gagccaaccaccggcggcggcggcgactacctcgcgcacggcggacggcggcgagcggcgatctgcctccgccgcgctcgtgcctcgtcccgccgtgtaaccaaggctcgtctacttgaagcgaaccctcacctcccatcctgtgaaacctgaagtttctagccaaggtttttgagctcagtagtattattgggaggaagggtacactattttgcattcttgaagttcactgaccatcatttgagaatggactcacgatcaccgaaaattccacggagaagtcctgatgattccaaggataaggactccgacaggaacaggggaagagatgaaaagaatgattgggactcatcaagaacatatggttctgagactgattgcaaggaggaaaggtgtgataccaataagaggaagggttctgccatgggggaggatgttggtgatgatagcagatcagtggatagaagtcatgaaactgaagtgcatgtgtttaatgataagcaggataaagctgtagagataaaaaacattttgcatgatggagttggacagagtgactatggtcaacgccaactaggcttggacaatgaaagaagaaatggtacagtagataaatcaagagtggatgcccacatagatgacaaattgggcagcgggagggacagaaactggactggcaaaacacaggagcctgaaggatctgtggactatttgaggagttgtaaatcgcaagattctaaagaggcaagtgactcggaatggaagaatgcacaggaaagacaggatggtgggggtttccatgggcgagttggttaccggcgagattttaggggtagatctgaaagtactagaggttcttcaacctatggaagtcggtatgacacttctgattcgatagagattcgaccaaataatagtcttgattttggacgagagggctctgtttctggaagatatgacgtgggagtgggagctcatcgagatgtaacatatggaacaaacggtgataaagtcaccaattctgaaccagatcaaagtggcagtgccagcatgatttctcaatttcctcaacatggtcataaaggtgatagaccctccagaggaggaaggggtagaccaaatggcagggattctcaaagagttggagtcacattaccaattatgccccctccttttggtcctcttggtctgccaccgggaccaatgcaacatattgggccaaatattccccactctccaggccatcctcttctacctggtgtttttgtgccgccatttcctgggggccctcttttgtggcctggggctcgaggtgttgatgtgaatatgctttctgttccacccaaccttcccatccctcctccagttgctggtgaacatagtttcactccaggtatgggagctggacctaatattcacttaaaccaatttggctccggaataggtgctccaacaaatatgtctggattgagtttccatcaattgggcactcaaagccgtgaaatggtacatggcaaacctcccgttggtggtggttggacaccaaatagaaacagtggaccaaccagaaaagctccttcaagaggtgaacagaatgattactcacagaactttgtggacactggcatgcggcctcaaaatttcattagagaattggatcttacaagcgtagcagaggactatccaaaactgagagaactcatacagaggaaagatgaaattgttgccaagtctgcttcaccaccaatgtattataagtgtgatctgcggcaacatgttctttctccagaattttttggtacgaagtttgatgttattcttgtggatcccccatgggaggaatatgttcaccgggcaccaggaatcacagatcacatagagtactggaacggtgaggagattatgaatttaaagattgaggctatagcagacactccatcgtttgtcttcctctgggtcggtgatggtgtaggtcttgaacagggccgtcagtgtttaaagaagtggggatttcgaagatgtgaggatgtttgctgggtgaaaaccaacaagaaaagtgcaacacccagtctgcggcatgactctcatacaatactgcaacactcaaaggagcattgcttgatgggtataaaaggaacagtgcgacgtagcactgatggacatgtcatccatgcgaatattgacacagatataataatagccgatgaaccaaccgatggtattgtttcatatgttctattcaaagatgcttcttgttcttcatatatgcttgtgtactagattgctttgtggaagaaggacttttagtctatgccgttgtttgttgagaatgtcagtatgtcacatttggtgcctttatgaataattatgttcttgtcgcttcatt

SEQ ID NO: 20669 - DNA, 2625 bp, Oryza sativa
  ref <308>: DATABASE ACCESSION NUMBER: AK070975
  ref <309>: DATABASE ENTRY DATE: 2001-12-06
gatacccacacaagcacaagccattgagcacttgataggtagtttttctcgagaaattgttcccatctaggctatctatagcagctcaaaattaagaggaaattatgttttatggatagtacgccgcccacaggtcgaaaaagaaagcgtgcgtccggaaagcaagctattcttacaacaggtgtgagttcacactctactgggggcacaatacgtgaaaggcagcaacgttggagatccataataaaagcaaagaaaggaaattgttcatctgagttaaaaaaaaacacagtctctaaacagcaagttccagttgccattgcagatgagatttcctactacggacctcctgcccacgtgtgtcgatattgtggtgcccagttttggtatcaggagcgtgtgaagaggtcttattcaagtgaccagggtcatattcgctttcatctgtgttgtaggggtgggcaaaaaccagaagatagacctgatatagtaagtagagttttcaaattgaaggtgaacgaacttgtttctgtgttgaagaagggtacttattttgggaaggcacgggcagttctatacaccattgagttccagaagcgtggtctacctcacgtccatattttggtttggcttcaagcttccgatggagtacagtctgctatcacaaattaattccaccaggcataattggcgtataaaggtcagagttgctaggtcatggcatctatctggaacttccaaaagaagagattttactgctttggaacttatcttggtcgatgaagagggggtaggcattacagcttgtgtgggagaaaatgaaatacagaagttttcaacgtctatagtggagggacatgcctacttcttacggaatttccgtgttagtagacagacaaaaaagctcaatgctgtgcctagcacatatgccatctttttttacaccatggactattgttgaagagatccctacagagatatctggcagtcttccactctacatttttaatttcgtggactttgaggatttggatgaaagggcaaggcatccaaatggtttagtagatgttattggacaactcacggttgtgcaccctctagtacaaagcaacggtttgaatgggccatctgttaggcggaatgtggaattacgagaccttagcgatcggctcttggagatcactttatgggctgagcatgcaacttcttttgaagatgagttccttattgaaactattggtaaagatgaaccagtcataattgtttttgctggccttaatatgaaactattctcaggtgctccaagttgccggagcagtgctgccacaaaatggtacattaacattgatattccggagattaatgcctttcgtacaagcctgcaaggaagaggttgcgaggttcttctcgtacctagtgatggtgctgcactaggagcggctaacgaggcagatgctaataggaagtctatatccgagcttttatccttgaatcctcatgacaacaacgatgtacgcttcacttgtgacgcacgtataaaggaaattgatgtctcaagtggttggtggtataaggcttgcagtatttgtagaaagggtgtgaagccaactcttcaaggatttgaatgtgttaactgtgacaacacagagccaataatcacacccagctataagttaaatgttgtgattgaggacaacactgaccgtgcaaaaatattcatgtttggtggtatggcggagcaagttgtgcgacgaacagctgccgatctagttgaagaaagctcagccaatcagctcttactgccgtcacccctccgtgctctcattggccgtaggtttgttttccaaatagttataagtgagcagacctttcggactggacaattgtgctttcaagtaaggaaagtgtttaatccacccccaatcgatgggcaaaacaatggtgttcatgccactcttggaaatagtcttagccatgcaaccttagctagaacgtcaggtgctcaaaagaaatgtgatcctacccctttaatggaggcatcggggagtagctccaacaaagcatccaccttgcagacatatggtgtaactgaactcccaacagatcctaaaggaagcgccactccaccacctccttttgctcatggggctatcacaaaaacatcaccacagaaggggaatgagatttctgaagaacatggaactccggttgggaaacgatctaggtctactcgcaaggaactattctccacgaaaaaagtgaaggcaagtgatgattgagctcacagtttgctgatatgcacccgtcaataacctactacaacatcttcggcacagcatccagttattgtctactcatattgccgagtattgctccttatgtacatattggaataaatgtccttctatattgttgtaatatacttaagagcttgtttgcagtctatattagggtatatttgtatgttgtttggtaatgcagtatggactagggagttcgcctactagaccttcaagtatgtgtagattaataaaatgtgccatagtggtctaccggcgcccttggtacaatcagaagtgaactggtttatgtttagtgtcatgtaataaaaaataccttttcatc

SEQ ID NO: 20670 - DNA, 3174 bp, Oryza sativa
  ref <308>: DATABASE ACCESSION NUMBER: AK070976
  ref <309>: DATABASE ENTRY DATE: 2001-12-06
ggttgtcttcctctgcgagagcagcagcggcggaggcggaggcggcggccatggcgggagcgggcggatgggacccgctcgtcggctccgagatccacggtttcctcacttacccagacttgaactatgagaagctggtggcggaggcggcggcgcggtggttccggcctaatgagatctacgcgatattggcgaaccacgcgaggttcaagatccacgcacaaccggtcgacaagcccgtgagtggaactgttgttctatatgatcgtaaagtagtcaggaacttccgtaaggatggccataattggaaaaaaaagaaggatggcaggacggtccaagaagctcatgaaaaattaaagattggtaacgaagaaagggttcatgtctattatgctcgaggtgaagatgatccaaatttctttcgaagatgctactggctacttgacaaagatttggagcgcatagttcttgtgcattatcggcaaacagctgaggaaaatgcaatggctcctccgaacccagaacctgaagttgcagatgttcctacagtgaatttgatccattacacctctcctctgacctctgcagattcaacctctggtcatactgagctatctttgccagaggaaattaattcacatggtggcatatcagcttctagtgagactggcaatcatgattccagcctggaggagttttgggctaatcttttagagtcatctataaaaaacgacccaaaagttgttacttctgcctgcggtggttcctttgtgtccagtcagcagattaataatgggccgaagaattctggaaacattgtcaataccagtatggcaagtaatgctatcccagcacttaatgtggtgtcagaaacttatgctacaaatcatggcctcaatcaagtaaatgcaaatcattttggagctctgaagcatcaaggagatcagactcaatctcttttggcgtctgatgtagattctcaatcagatcaatttataagttcttcggtgaaatctccaatggatggtaacacatctattcctaatgaggtgcctgctaggcagaacagtcttggactgtggaagtacttggatgatgacagtcctggtttaggagataatccaagttcagttccacagagcttctgtccagtgaccaatgaaagactattagaaatcaatgagatctccccagaatgggcttactctacagagactaccaaggtcgtggtgattgggaatttctatgagcaatacaagcatttggctgggtctgctatgtttggtgtctttggtgagcaatgtgttgccggagatattgttcaaactggtgtttaccgtttcatggttggaccacatacacctggaaaagtggatttttatttgactttggatgggaaaacgccaatcagtgagatttgcagtttcacgtatcatgttatgcatggtagttccttggaggctaggctgccgccatctgaggatgattacaaaaggacaaatcttaagatgcagatgagactagctcgcttgttgtttgccacaaacaagaaaaagatagcaccaaagttgcttgtagaaggcaccaaagttgccaatctcatgtcagcattaccagagaaggaatggatggatttgtggaatattcttagtgacccagaaggcacatatgttcctgttactgaaagcttgcttgaactagtgttgcgaaataggttgcaagagtggcttgttgaaatggtaatggaaggtcataagtctactggtcgcgatgatctaggacaaggagctatccatctgtgttctttcctaggttatacttgggctattcgattgttttctttgtcggggttctccttggatttccgtgattcttctggttggactgctttacactgggctgcataccacgggagggaaaggatggttgccactcttttatctgctggagcaaatccaagtttagttacagaccctactcccgaatcccctgctggactcactgctgctgatcttgcagcaagacaaggttacgatggcttggcagcatatcttgctgagaaaggattgactgcacattttgaggccatgtcactgtccaaggatactgagcaatcaccatcaaagactaggctaacaaaactacaaagcgagaagtttgagcaccttagtgaacaagaactttgcttaaaagaatctctagcagcctatcgcaatgctgctgatgctgccagtaatatccaagctgcactcagggagagaactcttaagcttcaaacaaaagcaattcaattggctaatcctgagattgaaacatctgagatagttgctgctatgaagattcaacatgcatttcggaactacaacagaaagaaagcaatgagagctgctgcacgaatacagagtcatttccgtacatggaagatgaggaggaacttcattaacatgcgaagacaagttatcaggatacaagctgcgtaccgaggtcatcaagtgagaaggcagtaccgcaaggtaatatggtctgttggaattgttgagaaagcaattttgcgatggagaaagaagagaaaaggccttcgtgggatcgcatctggaatgccagtagttatgactgtggatgccgaagcagaaccagcaagtactgcagaagaagacttcttccaggccggccggcaacaagccgaggacaggttcaatagatctgtggttcgcgttcaagccctgttccgttcttacaaggcacaacaggagtaccggaggatgaagattgctcatgaggaggccaagattgagttcagtgaagggcagctaggagcagcatgcaggagttgaaatggtttttagggacagctagtttctctaattcttgtcttgtacattattggaaatgctagaacaacctgcagtttgccgacgctgtacattttaggaccatctgaatgatctgatacagcttttgctgaccccttatggctgatgaatttgatgttagccctgtagtaactgtggtggtttgcgtttggctggctttaagctggacataaacagcgtgtgcttcaatgtacatgtagatgcaatgcaagtacatatcatgttgtaaatgctaataagattagcaataatcagcaaagccctgagccaatgacaaggagtgtggtttttctctgttttt

SEQ ID NO: 20671 - DNA, 1898 bp, Oryza sativa
  ref <308>: DATABASE ACCESSION NUMBER: AK070977
  ref <309>: DATABASE ENTRY DATE: 2001-12-06
gagtgctctcgagtctcgacgctcgcctctgatcccctcccccttcgatcgagccgtcgatctcgccgccgccgccgccgccgccgccgcctccgatgtcctcgccggagcagccggtcgaccctacctcgctctatacggagaatattttgccacccgacgagctcctggaggagatcctcctccgcgtcggctcgcccgccgacctcgcgcgggtctccaccgcctgcgccgccttccgccgcatcgtcaccagccgctccttcctccgctgattccgctccttccaccacccgcctcccctgctggggctactctgcgacgacttctacccggccgaccccgccgccgccgcccgagccctcgcccatgccgccgacttcaccttctcgttcctccctacccctgaccactggtggcgctggatgcccctggactggcgggacggccgagtcctcgccgccctcgtccccatgaccaagatcatcacccacgaaggcgacgaaggggagttcgttccgttccccaggagggacgacgtcacggacctcgccgtctgcgaccccatatccaggcgttacgtcatcatccccgcgatccccggcgacctaataacctccggtgagcagcgagattgcctgttcgatttcaacgccttcctcgctcccgccaccgaagaggagatggcggattcgtcgttcagggtggtggctacagcgcagtgcaaaagcaagttgtttgtgttcgtcttctcttcacgctccgaagaatggcgtaagctttcaattcgacagtgggagcatcttcgccgcggatgtgaactcgtcggtgctggttcaggcagatttcttcttggccccgcgctactatgcacattgccgcttgtactgggtgctgaaggagatggacaagttgctcgttcttgacacttgtgagatggtgttcttcaccattgacctcgagagggatgaacacatgtcaaacattgccattctggaggaggcagaggaagatatggttggagttttctctctcaggacagacttaggcttcactacaagaactcagctctgttatacaattaggcaagtcgaagctgatgctgccaatgggccaccattgaattttgacaaaataatccccttgcccttgcccatggagtatatgtttcgcatcatagatgcagctgacggatacttgctcttggaagggaggctactggactggttcgaatgctctttgaaggagggcaggccagatacattatatttctcactggagcccaaaacattggttctcaagaggatttgcgtgttggaacgtccaattaccgctgcaaagatatataccggttttccgccatccttatcaccgtcaagtctatgaatatggtaagcttattagaattgcattgctatttgtgttttactggccttggggatcagctattatgatgtggattctatgttgaggaacataaattctgtgtgattgtttttcaaaatgatttggccattatgtgggtttcttgttttgatggaatctctcggtaattgtaatactacataattctgtatacaggctttttggcatgatgatagggacatcgaaaggggacagagcagcactggttatcaatattgctctcattgctcaggaacgccgttgactacatcaagctacaactgatagtggtggcatctatgtaatttttcaacagtaatctagtttgtttctgtagtattgttccacttttaagttttagcccttatgatgatgcattcttggctatttggttgcaagtcaggaggctctttctgatgtaagctgtattatacttgactagtggctagtggagctttgcaggtttgtccaatagaatctggtaaaaatttctg

SEQ ID NO: 20672 - DNA, 586 bp, Oryza sativa
  ref <308>: DATABASE ACCESSION NUMBER: AK070978
  ref <309>: DATABASE ENTRY DATE: 2001-12-06
gtgcatcatcatcatcagctcgatagaaaaagaaagaaattaaaaagaaaatcacggcgcgtgagcttgcagagacagcaatggtgagagttggtgccgccgcggcggtgctcgtgctggcggcggcggcggcggccatggccgccgagccgcccaccgatgacggcgcggtccgggtggcggcggggctgacgaagtgcgtgtccgggtgcggtagcaaggtgacctcctgcttgctcggctgctacggcggcggcggcggcgccgccgccgccgcgacggcgatgccgttctgcgtcatcggctgcaccagcgacgtcttgtcctgcgccaccggctgctccacctcgctctgattaagtactaatgaagtaattaaccgcgctaattaataataaatcgcacctacgtatgccacatgtggactcgcttgactaattaaatactgccatgcgaatgcgattagtggattatgaaaagaggaaatgtaagaactcatggctctctctgtgccatgcctgtactgcattgaaatgaatctgcatgcagccatgaactgatatacaaatacgaccatgttacctgt

SEQ ID NO: 20673 - DNA, 2482 bp, Oryza sativa
  ref <308>: DATABASE ACCESSION NUMBER: AK070979
  ref <309>: DATABASE ENTRY DATE: 2001-12-06
gtattattcctgagacgttgcttcttgcttgtgcttggctctcctctctggaagctcaagactttgtgtgcttgtctcttatcttttttccaactgcataccggccaagagaagagagccaggagaaatgccaaactggaagttactactcctactactatagagtggattggaattggattcctctctttacagatcaagatttcaatctttgagggaagacgatgcttctttacatggtaatacctgtcttgaggtggtatggaatcatcaatcatgtgtgctttcacaatcctaaagatttgagctttctggacaaactagctgtctagccccatctccacactccataggtaaaattccgaatcatttcccctcctaacagtgtttttcccgtaatcaccgtattgttcttacttacctttaacattctgcacaagaaacaagaggttcgagctcttccaaaaatttagatcgggacagaaatggagccatgggccattagagtggcctacttcatagtgttctcctttcttgtcactgcaagatttgggtcctgtgctccccacagtgaagaagggagagctcttccgggttatagagagagtgagcaagaccaatcaattggctctttgtcaaattggggagaagggaagctcattggcagagtgttcaacttattactcaaagagaacatgtttgccagtgaaacaccatctgaatcgaaagagcatagctcaatttcagagtctgtacctcatgacagtgcaggatttgaaccatgcagaaaatgtttagcaaaaactgttcacaatgccacaccaaggcgacttctgcaagccagggagctggcttctaatcaaacacaaacacaccccaaaagccaatcatctccagttcaatcatcagcatcacacctggtacctcgttgggctatttacgcattgcctgttgctggagtccttttcattgcagcagtagctactgccatatatgtattcttctcccgtagaaagaaggataatactgtcatgccatgggctacagggctgagtggacagctaaagaaggcatttgtaacaggtgtgccttctcttgagaggacagaactggaggcggcatgcgagggtttcatcaatgtgatcggcactttacctgaatgcacattgtataagggaactctgtcaagtggagttgaaatagctgttctgtccacttcagttaactcttcacaacaatggtcagctcagtctgaggagcaattcaggaacaagatctcggtgctgtccagagtgaaccataagaacttcatgaacctgattggttactgcgcatgcgaggagccattcaccaggatgatggtgttcgagtatgctccatgtggttccctctttgagcatttgcatagtaagcctcctaataataatttcttgtatgtgttcgatcttgattaatctgaagaacaaacaaactgtaactggcaattgttgtatgtgtaaatttggttttgcagtcagagaagcagaacatctggactggaaaacacggctacgaatcataatgggagtagcctactgcctggagcacatgagccagctagatcctcctcctcttctcccaacaaatttgagctcatcatccatctatctcaccgaggacaacgcagccaagatcgccgacatcgaattctggaaggatgacatcaacaagcaggacgaccaagaaagcgtggtgtacaagttcggggtactggttctggaggtgatctccgggcggcggccattctccgaggacgaccggctcctggtgctgtgggcgtccagctacctggacggcaagaggccactcagcgccatggctgaccggacgctggtgaggtcgtcgtctgccgcgccggagaaagatgtggcggcgctgtgcgacgtggtgcggcagtgcgtgaggaggccggaggcggggaagagagcgataagcatgggcgaggtggcgaggctggtgaggggcatcgccgggttgtcgccggagcaggcggcgccgagggagaagcccctgtggtgggcggagcttgagatcgcctcctccgaaaccgcctgaaattcagttgaggccccaaaatcagttagtttcagagtacatatgcgtttgaaagcctgaaactgaaattcagtgtgttttctcttctttctggtatcatacaccctccgtcaaataaaaaaccaacatagtacacatcataatacaacgaaactaaacatatttggatatgacatattatagtataacgaatctggaatatctctgtctagatttattgtactagaatacgtcacatctagtgctagatttatttttttggacggagggtgtagtaggaaattaggaatactctgcaacatattttcattttttttttctttgcagaaatgagtttgcaggtttgtaaaggtgagaaaaaaaggaaataaatactagcatttaaccg

SEQ ID NO: 20674 - DNA, 1417 bp, Oryza sativa
  ref <308>: DATABASE ACCESSION NUMBER: AK070980
  ref <309>: DATABASE ENTRY DATE: 2001-12-06
gagcttcagcatacacatgcatgcacacccgctgtgaacgaaggagcgagcgagcgacgatgggttcttgcacattgtcctccggcggcgtctgcgtcgtcgtcgtcctcctgtgtttggctgcttgctgcctaacgtgcgcgcgcggcgctgtcccggcgatctacgtgctcggagactcgcaggcagacgtagggaacaacaactacctgctgcactcgctgctcaaggccaacttccctcacaatggcatcgactacccggggggaaagcccaccggcaggttcagcaatggctacaacttcgtcgatttaatcgctatcagtctcggggtgcccagccctcctccatacctctctataagcagcaaaccaatgaacagctccgtatatctgaagggtgtcaattttgcttcaggaggagcaggggtgtctaatctcacaaacctggcccagtgcatcagcttcgacgagcagatagagggggactaccacagagtccacgaggcgctggggaagcagctgggcattcctggggccaaggcccaccttgccaaatcgctcttcgtcgtcgccatcggcggcaacgacatcatcaacgacctcctgctgagtcccgtcagcgagctcctacgctcccgagatgagatcgtcagcaatctggaaaataccctcaaacgccagctgcagaccttgtacgaccttgggatgcgacggttgttcttcgtggggatagcaccgctgggatgttgcccgttgatacgggagctgaaccccaccaaggaatgtgatgctcaggccaactacatggcaactcggttaaacgatgcggcggtcgtgctcctccgcgacatgagcgagacgcatccggacttcacctactccttcttcgacacatacaccgcggtgctccagtccattcgttacccagaggcacatggctataaggaggttaaagcagcgtgctgtggcctaggagataacaacgccatgttcctatgctcgccggcgagcgtgtactgcgacaaccggacgagctacatgttctgggacgtcgtccatcccacgcaggccgcggttgagaagcttatgaagattgcgtttgatggatctgcgccgttggtttccccgaaaaatatcaagcagctcactgagagttaggcattatataaagccaagagtacgtgtctactggtactactatactatactactattatcaccactggagaaattttgaatcattaatttaggagttatatttagtgccagtaactaacgtggtaaagtaaacaagggatttgctagatttgaggtgactgatattaatttgtaaatttacagtctcctaaaattacacattttgcaaagtttaaaattgcatagctatacaatgtgaaactttacttattttaact

SEQ ID NO: 20675 - DNA, 1188 bp, Oryza sativa
  ref <308>: DATABASE ACCESSION NUMBER: AK070981
  ref <309>: DATABASE ENTRY DATE: 2001-12-06
gaggtagccaaaccacaccaccataaagctagcttgcaaaggggatagagtagtagagagagagagagaggagaggaggaggaagaagatggggagggggaaggtggagctgaagcggatcgagaacaagatcagccggcaggtgacgttcgccaagcgcaggaacggcctgctcaagaaggcctacgagctctccctcctctgcgacgccgaggtcgccctcatcatcttctccggccgcggccgcctcttcgagttctccagctcatcatgcatgtacaaaaccttggagaggtaccgcagctgcaactacaactcacaggatgcagcagctccagaaaacgaaattaattaccaagaatacctgaagctgaaaacaagagttgaatttcttcaaaccacacagagaaatattcttggtgaggatttgggcccactaagcatgaaggagctggagcagcttgagaaccagatagaagtatccctcaaacaagtcaggtcaagaaagaaccaagcactgcttgatcagctgtttgatctgaagagcaaggagcaacagctgcaagatctcaacaaagacttgaggaaaaagttacaggaaaccagtgcagagaatgtgctccatatgtcctggcaagatggtggtgggcacagcggttctagcactgttcttgctgatcagcctcatcaccatcagggtcttctccaccctcacccagatcagggtgaccattccctgcagattgggtatcatcaccctcatgctcaccatcaccaggcctacatggaccatctgagcaatgaagcagcagacatggttgctcatcaccccaatgaacacatcccatccggctggatatgatgtgtgtgttcagttcaggcttcaggcttcagagaagccaatgcaaacagtgtcctgtaatccagtaattacagggcatatgtaatgtaatgtaatgtaatccctgatctatattttgctaagtacgtgcgtgctctcttacgaccttctcccccgaacagttaatcaggggaataataatttcgtttgatgcacgtactgtatgtctgtatctgtcactgtatcgtaggaccgtccatgtataacaatttccgttttggatgtggtaacaagttaattggcacttaaatttatatttgtgatgatctgggagagtacctaatctc

SEQ ID NO: 20676 - DNA, 1531 bp, Oryza sativa
  ref <308>: DATABASE ACCESSION NUMBER: AK070982
  ref <309>: DATABASE ENTRY DATE: 2001-12-06
gacacaatcgccaacctatacagatatatgtgctagctacttccaagttcctacctatcaatttctctcctcctcttcttcttctctgcatcaatctgcagcttaattcttagctatgtacatatagctagctaccacttccaaaatactccacagagatcaatcacatatagatatagctagattgctatagacagagagatcatcaaagaaatttagcaggtgatagccacatggggttgagggacatcgagctgacgctgcctccggggttccggttctacccgagcgacgaggagcttgtctgccactaccttcataacaaggtggtgaaccagcatcgcttcgccggagttggaggagccgccgccgccggcggcggcaccatggtcgaggtggacctccacacccacgagccgtgggagctaccagatgtggcgaagctgagcacgaacgagtggtacttcttcagcttccgcgaccgcaagtacgcgacggggctccgcacgaaccgcgccaccaagtccggctactggaaggccaccggcaaggaccgcgtcatccacaaccccaagctgcacgccgccgcccaccgccgcgcctccatcgtcggcatgcgcaagacccttgtcttctaccgcggccgcgcccccaacggcgtcaaaaccaactgggtcatgcacgaatttcgcatggaaaaccctcacacccctcccaaggaggattgggtgttgtgcagagtgttctacaagaagaaggcggagacggagacggagtcgtcgtacagcatggagaacgagcaggaggcggtgatcgccatggcacggagcgccgcggccatcaaggcgggtggatgctactccaactcctcctcgtctcacgacccagccgccgccggccatcactcgcccccgccattcccggcgtcgctcgccgcctgcagcagcagccaccactacagcagccacccaccgccgcctcccgatcaccaccaccaccaccacatgcccgtcaccggcggcggcggcggctccctcaacgagttcatccccaccaccagcatggcgctgtacagcagcatcttcgacttcagccagcatctcgacggcggcgccgtggcggcgtcggcgtcggcggcgggatcgagggtcgacggcggcgagcagtgcggtctgatggagctagggctcgaggagcactacaactacaacggcctgatgccgatgtgacgatccaccataggtgtcggtgctgctagtgctagcttagctagcttacacacacccccagctgctagctagctgcagttctgcagcgcagctagctagcgtttattattaataacctcttttcacctcgattgtttgatctgatttgtttcgtggtgatcgattccatcgatcagcttgtgcagatttcgttgattgtgcatgcaaacatgcgcacctgtgtatagggtatagtggtacgtcgtatagcgctgttgcattgtttggaggtaaattatatatcttagcctttaatttgattg

SEQ ID NO: 20677 - DNA, 1014 bp, Oryza sativa
  ref <308>: DATABASE ACCESSION NUMBER: AK070983
  ref <309>: DATABASE ENTRY DATE: 2001-12-06
ggggaattaaatggtaggaatcatgtcctgttaggtttcgtgggatggggtgatcctccattccccgtccccgtccccgtcccctacagagacccgcatagggttcaagtttaattttcggtccaagtttaatttgtttacttatcttatgtgattaatcttgtgtttttatcatatgtattagtgggtataagttgctatattaatataaagtgtgaatatatgtgttgcattgcatatagaatttcacatctatatattgttttaagcagggatgtagaccctacggggattaattcccgcggagataggaacaagttttccccattgtatttcgcgggagcagggatggggatgcattcctcgacggggaattcctatttgccatatctagccggaataaagaaatccggtgctctcatatcatgttaattttagtgaattggggattttcaacagtgcattgatttagccctaaatagcatatatattatgtacacaagagaagggaaagtattctaatacccttgacatctactagacttaacagtaaatttgcttggtactgctagaaacaaagaaactacatacctttccaatattgatatacggaacctgagaatcaattctacctacaaagtccacaatattatcatagttagaacattcttctagtccatattgatgagatggcggtaaatttattttctccaagttggcaatgcatgactgtggcagaccatagatgctctccagggaatcatgttcactaactgtgctctcttcctctaaatacttcgaattgtaaaacaatgggtcagtgatagtcaactcgtccaagtgggtgcttaggagttctgtccattggcgaagttgatctcgtgagccttcgatatgcagttttgatttcaatctagggatcgacttctgcatagcatgttcgtgtggagggatcgcagtaccttgtcctgaatgtgagcatccttcagtatactgatcatatggacgtgatgg

SEQ ID NO: 20678 - DNA, 1378 bp, Oryza sativa
  ref <308>: DATABASE ACCESSION NUMBER: AK070984
  ref <309>: DATABASE ENTRY DATE: 2001-12-06
gggcgtgcgagacggcgtcgcgtcgctcgccacgacggacatgcagcacctgcacggcgacgtgctcgagtcggcggtggagcgcgtgccggcgcccgatctcgccgccgcggcgctggtgtcacgggagtggctccgcgcggtgcgcgccgcgctgcgacggcgcatgctgcggctgccgtggctcgtcgtccacgtgatccatctccggggccagcggcgcctcgccgcggcttacgacccgcgctccggggcgtggctcgccgtgcccacggcgccaccggcgcgccacggcgcgacgtcgccgccgcagccgcactcgcacgtccgcctgatgcggggcgcgagcggggaccgcgtctgcgcgctctcgctctccgggctcgccgtggcgcgggacgctctcgggatggacgacgacgcgctcgtcgtcgcgctcaaggcccccggcgtgtggcgcgtcgatccggtgctcgccgcggtgggtgaccgcgtggtcgccatgggcggcgcgtgccggctggcgctgggtgacggggaggacacctcggccgtcgaggtccacgagcgcggcggctggacgcactgcggcgcggtgccgaccgcgctccgggagtccgcggcggcggcagcgacgtggctctcgacggcggcgacggatcagagagtgtacgtcgcggacagagccacggggacggcgagctggttcgacccggcgaagcagcagtgggacccacctcccgcctccgccctgacgccaccgtctccacatggggcctcgccgccggccgcgccggcgccgagaagatcatcctgttcggagtgaagcatgcagacagccgagtcgtcatccgatcatgggaggtggacggcgacagcctctccctgtcccatggcgcggcggcggcgcacgacacgatgccgagcgagatgtccgagaggctgttcccgcacggcgacgacggcgaggaggagacgtcgtcgccgtcgatcggggtgtgcggcaacaccgccggtgggtacgtgtacaatgcggccgtgccggcgacgggcgccgtcctctacgagctccggcggggcggggtggagggcggcggcgtggagcggtgggcgtgggttgcgtgcgcgccggtggtggccgaagcggaggcgttgggacgcgtcatcctcgcgtgttcgccggtggggctgcacgagcttacggacgaacggcttgcacactgaactaataatggctatcgtgacatgttgtcgatagccagttgagcttgtaataagcatatagggctgttacactctgaaaaataagtttggatactcccaccggttttataataattctcgttgttttggacaataataacacggcatattcact

SEQ ID NO: 20679 - DNA, 1988 bp, Oryza sativa
  ref <308>: DATABASE ACCESSION NUMBER: AK070985
  ref <309>: DATABASE ENTRY DATE: 2001-12-06
ggttttagccccctcccgcattcccccgcgaccacaccacctctccccgcctcctccttctctttcctcagtgccggccaccctccagccgcgtcggcacgccgcccggccgtgccgtcgcctccccttccccggcctgccctcggtttcgccggaatgccgtcgcccgcgccggtctcaccctccgcctcgccggagttccttcggccaccccttcggccgtgcccgtgcgccggtcgacgtcgccgtcttctccgacatcgcagcggcaaggtcgccctcggcctcgcctcccctccacccgaaccccaccggtgttcgttatcgtcgtctccgttcgtcctcgtcgacgactcctccggtcggtcgttcctcctcgccggctcgtcgtctcgctgtgccgccaccatcgtcgtcatcgcagcggcatgttccacgctgtcctcgcatccgtgcagctactgccggctgcccttgtcgcctcctcgccggccccggtcgtcgtcgtcgtccacctcctcctctcgtcgttcccggtcgtcatggcgttcgtccctccgtcaagccgttcgcgttcgccgcccgtggttcgtcaagtgagctgctgcagccccatcgtcgtcttcatccttagctccacgtcgtcaagcctcgtgccagccgcgtctcgcattcgtccaaggatcgccgccgaagtcgtcccctcgccgttcgtctccgttgttcccggccgtctccgccgcgcccgttcgtcgttgtcgttcccacgcctcgtcgcgtggtggtaagggtccgtcctctcgctgcccccgtcctcgtcctttcggtgtcgcccgtgcccgttgtgcggttgtcggccccggtacccgtgtacaggtgtcggtaatcgttcgcttgtgcgtgtggtgaccgtgttagtgtgcccgctcggtagccgcgttgtttccacgtgtgcagcccgcgtggtgtctagtggagtccgtttgtaagccactcgcctcggttgacacacggggtccgcttccgtcgacccgtggaccgtctctatgtactcggtctaccgcggtcctttaggttgacatgtggggtccgcgtgtcaacagcgcagtcttcctgtcttttccaggctagggcttccacatgttttatagttgtaaaacctaattataataatccataaatctgcatgtaacagcattaaacttcggatgatcatatcttggtctcacccctatgtgtgtggcgcacccggtctagatcctgttgctaggggttgttcacggctaggatgggtaaagggttatgtcacattttttatgatgggttccaattgcaatggaatgcagagtaaaggcgtgttttgtgggtaaagatgtacacctctgataagagtaaatctattcgaatagccgcgccctcggatatgggcaagcctaacaatgtacccaagttagtggtttaattcttaaaatttgcttaacaactaaaatatggaatggttgccctaggttggcttgggacgagctgggacctaggtcgggttgccagttcggtccgaatcatcgtaggccttgggttaaggcaggttcgtgagggttcacggccttgattaataacactgtgtagctctaggatcgtctttatgaaatggctttgggcaactaagtgacttttaaatgctgtttactgcaaaacttaacccctatattattaccccttgtacccccttgcattaatcatgcatttccccgtgtggcttgctgagtactgtggttgtacttattcttgctcaatctttccccccttcagtaagagaagctttggagaaaaagtcttaggtggagtcctggcttataccccagttgagcgcctgtgaagatggagccgtaggcccgctagtccgctgctgtttatttttttattgtcaggcctgaagtgcctttgtaataatgtaaatattatcgatataataaagatgtgtcttttgt

SEQ ID NO: 20680 - DNA, 933 bp, Oryza sativa
  ref <308>: DATABASE ACCESSION NUMBER: AK070986
  ref <309>: DATABASE ENTRY DATE: 2001-12-06
tgtcgtcatcaacgattgctagatagccaaagctcttttgttgtttcggtgctcttcggcttcgtcgtcggcgagggagggtttggtttgggaagttgggggggatggatcggtcgatggagacggtggaggaggaggtggaggagtacagctggagggaggtgctgctgccgcggctcgtcccggtggtgtcggacgcggcgccggagctggagcgggagacgggggagcgccgccggggcagggagctcctcgtcgccgtcgacttcgggcccaactccaagcacgccttcgactgggcgctcgtgcacttcgcccgcatggccgacacgctccacctcgtccacgccgtctccagtgtcaataatgatctagtatatgagaaaagtcaggaactcatggaggatttagccattgaggcattgaagacatcactggtccggaccaaggcaaggattgttgaaggggatgctggaaaggttatttgccgagaggcagagcggctaaagcctgcagcagtcattctgggcactcgtggaagaggtctaattcagagtgtgttgcagggaagtgtcagtgaatattgcttccacaactgtaaagcagccccagttatcattgttccaggcaaagaagctggtgaacagtctgtgctttaaagggcggaagaatgaagataggttgcagatgatggtgcgtcggtatggtgttgtgctttcaattattgtaattttatacgtagtgttgtgaattgttagcatatttgtactggattggtattgtttggtagtgtaatgaaggatgatggattgtttagaagttggtggagtagcaaggcaaatataaacacacaaatgtacttgtattgccattgatgacattagtacagtttctatgaataaagaatcttcagccacaaatattgatgtggtt

SEQ ID NO: 20681 - DNA, 1018 bp, Oryza sativa
  ref <308>: DATABASE ACCESSION NUMBER: AK070987
  ref <309>: DATABASE ENTRY DATE: 2001-12-06
gctttcgtctcgcggtgagtttttggtagtttagtttgatacaccacttcgtttgataccctcggcgaccgcgcggcggccagcgggcgcatccatggcggcggcgggatccataggcgtgtacagggcggtgttcgcggcgctgggcgctctcatgctgggcaccctggtgtacacctgcgtcaccgacggctcgccgtttcgcctcgagctgctcaccccgtggttggtggcaacactgattgatttttatgtcaatgtgactgcgatttcgacttgggttatctacaaggaagtaaattggattagttctttcttttgggtagttctgttgtactgttttggcagtattgctacatgtgcttatgttgttgtgaagctttttgaaataaaaacttccggaccttcacaagatccacttgatcttttattcctcaggcaaggagatctatccgaaagaaagtcctcttttgtcataattgggagaattattttcagcattttgggggcaatgatggctgcagtcgtaatttatactgtcatcactgatggactacctttcaggaaggacttgttgaccccgtggatggcggcaaccttaattgacttctatataaatgtcttcgcaatatcggtatgggttgctcacaaggagtcaaactggatatctactgccatctggatatgcttgttaatatgctttggaagcatcacgacatgtggctacattgtcatacaacttttccaagtgtcgtaccgagacccaatctatcatgtgctattgaactctcataacaagagcctcaacgcagagcagggaagacttccaagcattataccccctagctctgccaaagtatgaagaatatgtaagccatcttttgccagttcttttgcagacagaattccaatatgcagggattcagatcattctcattttgttctttctgttggagttagaaaaatctttgcttcggcatactctcaaatataatagctttgaattctggacccctgg

SEQ ID NO: 20682 - DNA, 863 bp, Oryza sativa
  ref <308>: DATABASE ACCESSION NUMBER: AK070988
  ref <309>: DATABASE ENTRY DATE: 2001-12-06
ttggggcaatagcccacttcaatactgctacagcttgtatatatgcctcttccctgacctcattccaagcgctttggtaggtctactggctcagctcgcatatctacttgtctcttctcgcgcaaagctgtgccattcttcacattatcccctgcgcagcagagcccagccaatcttggcgagaggcagtagacattggctttttttttttcaaaaggattgcactttgtgagagatggggaggaagctaggttttgagaaggtcctcgactgcttctccctcgctctctgcacgaacgcctgcgtctgcatacattcggtggaagacgacgaggaggaggccatcgagagggaggcgctggtgagctctcagctggaagagcttgtgaagctcaaggatctcgtcggcggagccaagactctcgctttccatctagagccaaagaccgtggagctcagggtgtccatgcactgctacggatgcgccaagaaagttcagaagcatatatccaagatggacggtgttacgtcgtttgaggtagatctagagagtaagaaggtggtggtgataggggatatcacgccgtatgaggtgctggcgagcgtctccaaggtgatgaagtttgcagagctgtgggtggcccccaactcccaaggttgctagctaagctagtagtagaatgatagatcggcggggataatacatatatgtgagatctcgtcgcgtcaagtattcaagtgtatggtacgccatggggtcgtgccttctcgtccgtctcggtcttgaacgcatcgcgtgcacatatacagaagcaccgtcaggattgatcaggaaatgtaactagggaagaagcgccattttc

SEQ ID NO: 20683 - DNA, 1051 bp, Oryza sativa
  ref <308>: DATABASE ACCESSION NUMBER: AK070989
  ref <309>: DATABASE ENTRY DATE: 2001-12-06
gatctctggctcttcgcgtgctcaaccgctaattccctcccctctcctctctccctccgatcattcgcggcggcggcggcggcgaccggcgaccggcggccatgcgggtggcacccaaggtcctcgtcctcgtccgcgacgccgccggctacggcgccgccctcgccgacgcgctccgcccaacgccggggctcacgagggaatccacgcccctggagctccccctcgccaagtacggcctcgacggggagaaggcctccggcgagctcgtgaacttctccgattctagtggcgatccgcaggtgtccttttttgtcctaccagactataagcctcctgttgcagcatgtgctatgaatgagattttagcattggtttcttcggaagctccatccactcagccaaccctcattgtcccatttatgacaagatcgccaaactattatcatggagcaaaaacaggacagttagctacactccatggtgctgaaataggagcaacaactgagtttactcagatgttagttgacggaactactaaacttcctcaatctttacaagtgcgaagtgagccaatactctgtttgctggaaatggtacgtgtgttgaatataccgacagttattctttttgcatccggtgggcagcaccaaggaaaaagctctacagatgtggaccttgaggtgctgcagtgtgtaggtgatcacttggctaagcacatcaacttggaattcagcaaagaaaccgttcttcagagggggatcgaaaaatcacccgtctttcaggaaccatggcgcgaactgtaccagtgacagaattctggcatgccagcaccctctgaatttagttttgtaggccttacatgttggactagtacggtgtaccggaatgctggatttattctgtcaaagggtgtgtaatatgacgctctgtttgcttctgtttacttccatcttgatcaactgcttctcattccttgctgccactctagagcaaagctcctataaaattatagaagaaaccgctggactggtcaatctggtcttctggc

SEQ ID NO: 20684 - DNA, 935 bp, Oryza sativa
  ref <308>: DATABASE ACCESSION NUMBER: AK070990
  ref <309>: DATABASE ENTRY DATE: 2001-12-06
gtcccctggaaccccattccacccacccacgcgcagccgcagcgacgagaggagaaacgagagagagaaaaagaagaaagagaaaaatgctgcgccacgccgcccgccgcctggccaccacccgcgccgccgccgccgccggccgcagcagcagggcgctctcgacggcggaggtgccggccgaggcggccaccgactccgccttcgcggaggcgtggaagaaggtggcccccaacatcgaggcccccgccacgcccatgtcgctcatgcagccccgcccccccacgccggcggccatcccctccaagctcaccgtcaacttcgtcctcccctacaagtccgagatcgccaacaaggaggttgacatggtaattgtaccagcaacaactggtcagatgggtgttttgccaggccacgtttccacaatcgcagagctcaagcctggtgttctctcggtacacgagggaaacgatatcaccaagtactttgtgagcagtggctttgcatttgtccatgcaaactccatcgctgatatcgtggctgttgaggctgtccccctggaccagatcgacccagccgcggtccagcagggtctcgcggaattcaacgccaagcttggatcggcctcaactgaactggagaaggccgaagctcagattggagtggatgttcacagtgcgctcaatgccgctttggctggttgatcaatacgtttttaagttgctgtccctctctctcttttgcatcttcatttttagaatgtgagctgaagtttgcaaactcatggatgatgggatggagggaatgatcttaaataaattatactccatctcaaagacagaaccctgtttcttcttttaacttgactcctgcatggatttttgtaatagtgaatatttttctccgagcctacaaagtcgaagttttctggttcc

SEQ ID NO: 20685 - DNA, 917 bp, Oryza sativa
  ref <308>: DATABASE ACCESSION NUMBER: AK070991
  ref <309>: DATABASE ENTRY DATE: 2001-12-06
gatccgtagtattctccaccaaagagtaagtgcgatgaacgatacgtgctttgcccacctttcccacggaagcagcagcaatggatcagaactcgaaagaagcgaagctccccttccccatggcgcacagaaggttgcccggaacaatgcggcaattggatgccaccaccacccgcagctcaacgatggtcagctccttcttccccgtgacggccgagatccccaccaccatgcggtacaccgcaacgtcggcggcggcggcgacgaagcggtggtcgtcgctgccgagaggcaaggcctggccgtcgaaaggcaggttggtgtcgtgcaccatctcccactgctcggtgtccatgtcgaaggcgcatgtgcccttgtgatcttgctgctgctgctgcggcggccgcaccgacaccgagaggaggatgtgtgagccgacgagggcgtacgccgttacgcgcaccttgggcgggtcgaggaactccagcgggttgaggcggcacgggaagagcggcggcgacggcagctggcgccacacggtgtggctgaggtcgtcgaggacgaagaaccatggctcgaaatccagctgcctcacgacggccggggtgcgggagagagcgtagagcttgccgccgccaccgccgccgccgccgtcgtccgagatcgagatgaggacggggttcaacttggggaagacgagtcgcgggccgccgcgctccgtggaggcctcggggtcgtagacggtggtcaactccacaccgacgcccacgatgcgtgtccccaccgcggcgaacgacatgccgcggccgcggccgctgccggtgtctgttggttgattttatcggctaatgccggttagttaggatatggttaaaatcctacgggtttttctatcctaataagatacaaactaagag

SEQ ID NO: 20686 - DNA, 1647 bp, Oryza sativa
  ref <308>: DATABASE ACCESSION NUMBER: AK070992
  ref <309>: DATABASE ENTRY DATE: 2001-12-06
gagcgactcgactccgcccgtccggccaactccgcggagtcgccaacacgaacccccctcctctcttcctccctccctcggtctcatcgaaaacccccactattactaccactccccctcgccttctccgcctccacagcgaccagcagccgcgccgagctcccagatccctcgtgcattccaccttctcccgaggacgatgggcgcttctgcagctaccggtatgcagatggtggctgcacgcccctgcatctcagcctcccagggaatgcttacttccagggcggcggtctcccggattggccgcgcactcagcaccaccactggctttgcaacctgtcccagaatctgctactccagccctcttggttcttccaagcgcagcggtgtcgccatcagagcaatgtcaagcgaaagtggcccccaaggcctaccaattgatcttagaggtaaaagggcgttcattgctggagttgctgatgacaatggctatggctgggcaattgcaaaggctcttgctgctgctggtgctgaaattcttgttggtacatgggtgcctgcactaaacatatttgagacaagcctaaggcgtggaaagtttgatgaatcacgaaagctgcctgatggatctcttatggaaattgttaaagtctatccacttgatgctgtctatgattcccctgaagatgttcctgaagatgtcaaaggaaacaaaaggtatgctgggtcatcaaattggactgttaaggaagttgctgagtcagtcaagaatgactttggcagcattgacattttggtgcattctctagctaatggtccagaggtaacaaaaccactattggagacatcaagaagagggtatcttgctgcactgtcagcatcgagttactccttcgtctctttgcttcagcacttccttcctataatgaatccaggtggtgcttccatctctctaacatacattgcatctgaaagggcaattcctggatatggtggtggcatgagttcagctaaagcagctcttgagagtgacacaaaagtacttgcttttgaagctggaaggaaagggaaaatcagagttaacaccatatctgcaggtcctttgggaagccgagctgccaaggcaattggattcattgagaagatgatagaatactcttatgttaatgcaccgttgcagaaagaactgttggcagacgaagtggggaacacagcagcattcctggtgtctccattggcttccgctatcactggctcgactgtttacgttgacaatggactcaatacaatggggcttgcagttgacagccctacaatatcatcataggtgtggtatggtagatagatgggttttcctgcttcattgcggcttgtttcttgaataaagagcttagttaggtagtataagagctaagggcaggaagaaaaaatagagcatgaatccaatttggtccttgacatttgagtaattcctgcactggggtactcgagcaatactactaggtggttcggaatgattcaagccccagttaccaatgttctgtgctgtatcttgaaatttttaatcattgatactgtgtttcttcgtataaactttgtcaatacagtgaaaatcatgtgcaataataagaatggataatgtttggt

SEQ ID NO: 20687 - DNA, 1283 bp, Oryza sativa
  ref <308>: DATABASE ACCESSION NUMBER: AK070993
  ref <309>: DATABASE ENTRY DATE: 2001-12-06
gggggcgtaatgacgatggaagttacgttgtgctgtttcgatctacagagcatccaaactgtggacgtcaaaaaggatatgtgagggcttttattgaaagtggaggtttcaagatttctcctctcaagtgtcgcaacggaagaccccgcactcaagttcaacacctaatgcagattgatctcaggggatggctcctcaactactctccttcctttcagtatcattctttgctgcagatacaaaactgtgtagccggcctacgagaatacttctcccaaacagacgaaacacatataactccaaggattcctgtgatggaaaacatggttgacacatctgcagtacagaaagatgacaagaagagtaccgaagaagtagactccaagactaaaacaccagatcgaggacaagcggacagtaaaaacatgggaatcattgatgaagaaacagacgaggatgaggactatcaggttcctgaagctaacatagaggaagatcctaacaaagatgctaagcgtgcagacgaaccaccagaaaagattgatctatcatgcttttcgggcattcttcgttgcgatgcggatgagaaaagccgaaactgttggacagtacctgacagcaagctgtttaaagtccgtagcaagaacttcccgcatgataaatcaaagatacctgcagcgagttacctgatggagcttgcggccattgactggtttaaggacagcaagcgtatggataacgtaggcaggcagaaaggctgtgtagcccaggtagctgctgagaaagggatgcatacatttgttgccaacatacagatccctggatcaactcattacagcttggtgatgtacttcgtgacaaagtcgctgaagaagggatcactgctgcagcgattcttcgatggggatgatgagttccgcaatagcaggctgaagctgataccctctgtacccaagggatcatggatagtgcggcagagtgtagggagcacgccgtgcttcttcctacgaggatgatcatttgtccaagaaaaccaactaagctagcacctctctcaacgcacgcactgcaacttatcaatcatttatcttcttgtaatttctaattatttccgaggctcatagcaagctttgttttttttcttttcatctttttttttatctcgttaagttgtttgcaaagtacagctggttttcttctacgtaggaacaaagataaatctagctagtgacagtatttcgttggaacctaatattatagactgagatattttgtttaggctt

SEQ ID NO: 20688 - DNA, 1740 bp, Oryza sativa
  ref <308>: DATABASE ACCESSION NUMBER: AK070994
  ref <309>: DATABASE ENTRY DATE: 2001-12-06
gagggagggtttcgtttccgtttcttgcgcctcctccaaccgcggcggccgtcagtggggagcctcgtcggcgtccgcctccgccattcgcgagaggaattcaggtgatccctctccctaccagagccgcgctcccctccgatcctccccgaatctggatgatctcccccgattccgctcggcttcgctgatcccccctccgccgccgccgccgccgccgcggcgggtgggctatcccgcttgtcggaatcgatcgatttctgaggccttggattgtgatgaagtcatggatatcgggccgcatagcatccagctgatcgcgccgccgtccctctatcacgccgcctccgctgccgccatgggtgatcaccgcgacccggctttccccgcggcggcgggcggctgccggctgcccaagacgtcgtcggtgagcgtcacggagtccgtcaccgcggtgcacgatttcaaggtgacgggttactcgctgatcgaggggctgggcatcggcaggtacgtcagctcatccaccttcaccgtcggcggcgtcgactgggccgtcaggttctaccccgacggctccaccgtcacctgcctcgggaacgcgtcggcgttcctctactactgcggcagggagaaggaggtcaggaccaggttcaccctgaatctgctcggcaaggacggcaaattgtcgcaggtgaccaattcctacatgaagcacaccttctccccggcgagtgacaattggggattcatcaaattcgccgagaaatcgaagctgcagagctcgccgttcctccacaacgactgcctgaccatcaggtgcttgctgaccgtcgtcagggaatcccacaccaaggatgttgaggtcaattctgttgttgtcccaccgtccaacctgcataccgattttgagaacatgctccaggatggtgaaggttcagatgtgacattcgccgtgggtggccaagagttccgtgctcataaatgtgttcttgccttccggtccccggtgttcaaggccgagcttttcggtccgatgaaagaaaatggcacgcaatgtatcaagatcgacgacatggagcctgaggtttttgaggctcttcttctcttcatttacacagataggctgccagatagctgcagagatggcaaggctgcagcaatgcagcacttgctagttgccgcggatcggtacggagtggacaggctgaggctgatttgtgagaggcggctcagcgaaaccattgatgtggaaacagtggcaaccactcttgttttagcagaacaacatcactgctcgcagctgagacaggcttgcattgggtttgtggcatctccaaacatgcttgggccagtcatagaaagcgatggatttaagcatctggtagaaagctgcccgttgattatgaaggagatcttgagtaaggtttcacatatttggattgacaagtcttgctgagaagtttattaagctatcacttttgtagtagtacatcttagtagttatgaaagtcatgatcagttatctacatctctatatgcgactttgatctttttaagttgtgtgatccttccaacgcctaatatgtatgaacagtagaaatcttatgtatatggatgactccttagcaccatggtgtaagtttgggcattcttccccttttcatcttttttgaaatgttggatttactctatactcacatgctttcctgaatgtataatgactagttttttgagtgg

SEQ ID NO: 20689 - DNA, 906 bp, Oryza sativa
  ref <308>: DATABASE ACCESSION NUMBER: AK070995
  ref <309>: DATABASE ENTRY DATE: 2001-12-06
gagcgcgccgccacctcgcgtcggcatcctcctccgcctccgccgccgccgcctcgccgcccaaggtaaggtaagccatggtgaagcacaacaacgtcatcccgaatgggcacttcaagaagcactggcagaactatgtcaagacatggttcaaccagcccgcccgcaagcagaggcgccgcatcgctaggcaaaagaaagctgtgaagatcttcccccgccctacttctggaccacttcgccccattgttcagtgccaaacacttaagtacaacatgaagtctagggctggaaggggcttcacccttgaagagctgaaggcagctgggatccccaagaagtttgccccaaccattggcatctcagtggatcaccgccgtaagaaccgctcacttgaaggtctgcaggccaatgtccagaggctgaagacctacaaggccaagcttgtcatcttcccaagacgtgcccgcaaggtcaaggctggtgactcgactcctgaggagcttgccacagccacccaggtccagggtgactacatgcctatcacccgtggcgagaagcgctcggttgaggtcgtgaaggtcacggatgacatgaaggcattcaaggcctacgccaagctgcgcgtggagaggatgaaccagcgccacatcggtgcccggcagaagagggcggccgaggctgagaaggaagagaagaagtgaaaggattgcaacctgcaacgttaagaatagatgccctaagttttattaccattattgttatcagcttctcctgatgcgagactggcattctgatcttgctgctgtctgtctactcttcagtttgagcttgtttgggtttttgtctgaagtgaaccaaactaagtgcatactacttgtcttaagatgaattcagtcatttcgc

SEQ ID NO: 20690 - DNA, 1521 bp, Oryza sativa
  ref <308>: DATABASE ACCESSION NUMBER: AK070996
  ref <309>: DATABASE ENTRY DATE: 2001-12-06
gacattatgttcgctgcgacgacgcagctccaaatcggaaccctaaccctagtagtcctcctcctcccgcgctcgatccgaggtcgtcatcccgctgattccgaggctctctactgcggcggcggcggcgatggaagagcataggcttggcggcggcggcggcggaggcggaggcggggggaggccgccgatcccgggggcggcggggaggaagcttccggggctctcgcggcacgcctcgttcgtgaggagtcctgcaaacagtacaaaatctggaactgagaaaacttttgaaaacatggatgctgttgcatatatgcctgttgtaaggtctggaggttgggctgatattgggtcaaggcacacaatggaggatgtctttatttgttctgataacctcatgaaagagtttggagttgaaagttttgaagatggtccgagcgcattttatggggtttttgatgggcatggtggaaagcacgctgctgactttgtgtgcagcaatttggcaaggtttatcgttgaggatgaggattttccaagggagatagagaaagctctgtcctcagcgttcttacagactgatgctgctttcgcagatgcttgttctgtgaactcctctcttgcttctggcacaactgctcttgctgctcttgtggttgggaggtcacttctggtagcaaatgctggtgattgtagagcagtactttgttgtcgtggaaaagccattgaaatgtccagggatcacaagccttcttgcaacagagagaaggttcgcattgaagcctctggtggttatgtttatgatggctacctgaatgggcagcttaatgttgcgcgggcaataggagactggcacatggaaggaatgaaggcatgtgatggtcttggacctcttagtgctgagcctgaggtgatgatcaggaatctcactgaggaggatgaattcctcatcatcggttgtgatgggatctgggacgtattccgcagccaaaatgcggtagactttgcacgccgaaagctccaggagcacaatgatcctgttacctgttgtaaagaacttgttgatgaggccatcaagaggaagagcggcgacaacctttctgttgttgtcatctgcttcaactctcggccgcctcctgtcctaacaactccaaggcctcgtgtacagaggagtatatctgcagaaggcctgagggagttgcaaagctttcttgatagcttggctgattgacatgaggcttcttccttgatagaagcctgacatactgtcgctagtgtacttccattgcttagcatggaatttttaggtttagtgcggctattccaaggcttaatgccagctatctcacaaattctctgagatagcagctgttgagtgattctggtgttgtaatgtattatgcggctaattctatctgcagtttaagtatttattggttcagggatatgctgtcttaaagagtctggaattatcagggaacatttctaagatatctgaaatggcgagtgatgttgtcc

SEQ ID NO: 20691 - DNA, 1726 bp, Oryza sativa
  ref <308>: DATABASE ACCESSION NUMBER: AK070997
  ref <309>: DATABASE ENTRY DATE: 2001-12-06
gaggaggcaaggcaaggcaaggagggagagaggcggcctccggccatggatcccctcataaagctccttgacgacgacgtggacgagaccatgcactcgggcgccgacgtcgaggccttcacggcggcgctcaaccgcgaggtggagggcagcggcggcgcgagcaccagcgccgcggcctcctcctcccagccgctggatcacggcgccggtcttgtgcctcaggagagcaattcaatgttcacccacaatcatgaacagtggcagggttcagtaaagaatgaaattggaaaccaggagaaccaacaacaggaacagaaacatttgcatcattcaaatgagcagccatctaggcctgaactggtatctgggggtgctgataataaacaagaccagccaaaggttaagcaagagccaggaaacagttctcaacaaagtaattctggtcagaagcagcctttgcaacagatgaggagtcaacaaacaccaagcacaaatcaaactaatagtgctcctacggtggggaaacctcctgttgttacatttcatatgttaataccaattttgagacggcaccttgacaaagacaaggatatgcaagttcagtccatttttacaaagttgcggaaaaatgaagttagcaaggaacactttctcaaagttgtaaggactattgttggcgataagttgctcaaacaagctgctgcacaatatcaagctcaggctgctcatgggcaacggaatccacagacaaatccaagcaactattctttgttaagtcaagtttccaatcagcagaatgttcccagtggttctacgtcaggagttgagcacaaatcatatccgtcagctcattccattcctgcaaaccaagctagtgacagcccaagaccaccttttttccgaccttctttgtcaggccaaatgcaaagtaacatgggctatccatcttcagaaagcaatttgcaaaaggttaatgaatctagtaacatgtcagatgtgaaaggggggcatatgctcagccatccacacaatatacaatcagccccagggcaagcaacacagcatccacaaacatctttacctgtgcttgggtcaaataatattcatgctcgtccattgccacgaccagttggaggtccaattgtaccacttagaccacaaatggcagattccagtcaaagaggacaattagtccagggagctgttacctcagtgactgggagcatggcagcacgaccaacgttgcaaactaatatatctccatggcaacaagtaaacaaagagcagaaaactaaatctttccctccaacagaacacacaaataagggtgttggtgttcctgaaaaccaaccatcaacatcaggtacttctaaatctttcaacacaacaaactcaagtcagcctcatcgatctcatggcactcaagcagaaccaaacatgcagatccaacctgctacacaaacacctccccctgcagcagcttctaaaacacctcaaaagaaggcatctgctggacagaagaaacctttggacgctttaggctcatcccctccaccatctagcaaaaagcagaagacatccggaggttatcatgatcaaagtattgaccagctgaatgatgttactgcagttagtggtgttaatctgagggaagaagaggagcaacttttctctgctccaaaggaggagagtcgagtttcagaagctgctcggatggtcgtac

SEQ ID NO: 20692 - DNA, 1251 bp, Oryza sativa
  ref <308>: DATABASE ACCESSION NUMBER: AK070998
  ref <309>: DATABASE ENTRY DATE: 2001-12-06
ggtttccatgaacatggacgagtttgtggctaacatatggaatgctgaagaattccaggctaccaccggaggttgcaagggtgccatggaggaagccaaggtggtagacagtggaagcggaagcggtggtgcaggaggaagcggtttatgtcggcagggatcattttccttgccgctaccgctgtgccagaagacggtggaggaggtgtggactgagatcaaccaagcccctgcacacacctccgctccggcctccgcgctccagccacatgccgggagcggtggtgttgcagctaacgaccgacaggtaacactaggtgagatgacacttgaggatttcttggtaaaggccggggtggtccgagggtcctttaccgggcaagcggccatgggatctggcatggtcaacgggccggtgaaccccatgcagcagggccaaggcggtcctatgatgttcccagtaggaccggtaaacgccatgtatccggtgatgggtgatggcatggggtaccccggtgggtacaacgggatggcgattgtgccaccgccacctcccgcccaaggtgccatggttgtcgtgagtcctggatcatcagatgggatgagtgccatgacacatgctgatatgatgaattgtattgggaatgggatgatgattgagaatggaacaagaaagcgtccccacagagaggatggctgcgccgagaagacggtggagcgccgccaacggcgcatgatcaagaaccgtgagtcagctgcacggtcccgtgctagaaagcaggcttatacggtggagctcgaagctgaactgaactatctcaagcaggagaacgctcgtctcaaagaggcagagaagacggttctactgacaaagaagcaaatgctggttgagaaaatgatggagcagtccaaggagaagatgaatgcaaataggggtggcagccagctgcgccgcagcggcagctgcatgtggtgaaacgggcatagcggtgaccggcgagtggcacactcatcctgcttctggtgtggcactagcctctgaggctctgaagaggatttgcacattaagtcttctttcagactaagtgatgtgaaggtattatggtagtagttgatatacatatatgctgtgatgcttgtaaacctgcctggacccacatgtcttgccatcgtgttcaccggtccttgctgcttatatggttacatgtcgctgtttgtacaaaacaacgatgaataaaattatacaatagt

SEQ ID NO: 20693 - DNA, 1895 bp, Oryza sativa
  ref <308>: DATABASE ACCESSION NUMBER: AK070999
  ref <309>: DATABASE ENTRY DATE: 2001-12-06
ggctctcactcccacccgctcgaccaccaccaccgcctcctcctcctcacctcgcaccccgcaaaacctagccccaggtcctctcctcccctccgccttgccgcattacccccagatccaccgcctccggcccagatccacccatgcgcctcccggtgctactcccgctgctgctgctgctgctcgccgcggcagcggcggtggcggcggcggaagcggcgacgctttcggcgaggatggtgcaccggctgtccgacgaggctcggctcgcggcgggcgcgcgtggggggcggcgctggccccgtcgcgggagcggggattacttccgcgcgctggtgcggagcgacctccagcggcagaagcggcgggtcggcggcaagtaccagctcctctccctctcccagggcggcagtatcttcccctccggcaacgacttgggctggttatactacacttgggtggacgttgggacgccaaatacttccttcctggtcgcattggatactggaagtgacttgttttgggtgccttgtgattgtatccaatgtgcgccattgtccagctaccatggaagtttggatagaaatcttgggatttacaagccatctgaatcaactacaagtcggcatctgccctgtagccatgagctttgctcaccggcttcaggttgcacaaacccgaagcagccttgtccatacaatattgactacttttcagaaaatacaaccagctccggtttgctaattgaggatatattacacttggattctagggagggccatgcacctgtgaatgcttctgtcattataggctgtggtaaaaagcagagtggtagctatttggaaggtattgcaccagatggacttcttggtcttggaatggcagatatctcagtacctagtttccttgcaagagctggattagtacgaaattccttttcaatgtgtttcaagaaagatgattctgggagaattttctttggtgatcaaggagtacctacccaacagtctacaccatttgtcccgatgaatggcaagcttcagacttatgctgttaatgttgacaaatattgtattggacataagtgtacggagggagctggcttccaggcattagtagacactggaacatccttcaccagtcttcccctcgatgcctacaagagtatcactatggagttcgacaaacaaatcaatgcatcaagagcatcttctgatgattattctttcgaatattgctacagcaccggtcctcttgagatgcctgatgttccaactataactctgacttttgctgagaacaagagtttccaggctgttaatcctatacttccatttaatgacagacagggagaatttgctgtcttttgcttagcagtactaccatcacctgaacctgttgggattattgggcagaatttcatggttggctatcacgtagtttttgacagagaaaatatgaagctgggctggtaccgctctgaatgccatgatcttgacaacagcacgacggtgtccttaggtccatcacagcataacagtccagaggaccccctaccgtcaaacgagcagcagacctctccggctgtcacgccggctgtcgcaggcagggctccgtcctctggcggatcgacgactctgcagaacctacttgctaactctaacatgctgctcttactgactatgtccgtgttcttcatctcatgaacaactcgctgacaatgatctaacttatagtagctctgtaaattgtatgtgcctcgtatatgcctatatggtgtctttttgttgcttagagagctcagtaaatcagcagctgcatgcttctgggtgccgtgccgataagtcgtttcctgcgtgcactgcgtgcagctgtatgtaagtatatgtgtcgtg

SEQ ID NO: 20694 - DNA, 786 bp, Oryza sativa
  ref <308>: DATABASE ACCESSION NUMBER: AK071000
  ref <309>: DATABASE ENTRY DATE: 2001-12-06
gagtgggtagtaccactccaatcccaatccaagcctgaatcctcttttgatgtgatggcagtggagcgcggcgagcgccgtggcggcggcattgggtgcctctcctgctgcttcggcggcggggacggggacggggaaggagaggagctggggcagcgcgcggcgagggcgctgcggacgtcgtcgcggtgggtgcgggaccgcgccgtggagctgccggagatggtggcgctggccggggggcggcggaggaagccgcatctgcagcatcatcagcagcagcagctggccggggagttccgctacgaccccgtcagctacgcgctcaacttcgaggaggacggcgacggcgaggcccagccgttcaagtacatggccttctccgcgcggctgccggcgtccccgccgccgccgccgccgccgacggcgctgcccgtcgaccggggttcttgaattgattgttaggccgttcggatgtacatacgtacgggagattaaagtttgggtttctttctcttttttttttgttgtttgattccttcgatttttgttggcgactacgagcgctgatatgtgtacaggaggatttgaatcgtttcttcttttggtttttttaagcagagatttccttttctattacaagttatcttggctctgaagaacgttgtttttttgttttagtgctagtatatgcttctgagaagaatgttgtttattggggtagcaaaatctcaagccattgccttgttctttgaaaatactaagttatccatgtgttatattgcg

SEQ ID NO: 20695 - DNA, 1443 bp, Oryza sativa
  ref <308>: DATABASE ACCESSION NUMBER: AK071001
  ref <309>: DATABASE ENTRY DATE: 2001-12-06
gtattgagtgtgtgtgcgtgcgcaattttcagattactttggagcaggaggaggagcggagcggcggcggcggcggcgagggaggagacgagggagctcgcgttcccacacttctcggcgttagacggcgccaagatgcagcaggcctcgcacgtcctcgcacgccaccgcatgttctgaatggggctagagtgattccggcctcgtcgccattcaacccgaacaatccgatgttcagggttcagagctcgcccaacctcccgaatgccgtcggcgccggtggtggcgcgttcaagcagccgcctttcgccatgggcaatgcggttgccggatctacggtcggtgtgtacggaacaagggacatgccgaaggcgaaggcggcgcaattgaccatcttttatgctggttctgtaaatgtattcaacaacgtctcgccggagaaggctcaggaactcatgttcttagctagcagaggatctcttccaagtgcgccgactaccgttgctcgtatgccagaggcacatgtctttcccccagcaaaagtcactgtacctgaggtttcgcctacaaaaccgatgatgcttcagaaaccgcagcttgtttcgtctcccgtgccagccatttccaaacctatctccgttgtgtcacaagctacaagtcttccacggagtgcctcaagctctaatgtcgactccaacgtgacaaaatcttctggtccattggttgttcctcccacaagtttgcctcctccggcccagcctgagacactagccactaccactgctgcagctattatgccgagagctgtccctcaagcgcggaaggcatcccttgcccgattcttggagaagcgaaaggaaagagtgacgaccgtggcgccatacccattggccaagagcccgctagagagcagcgacacaatggggagtgccaatgacaacaagtcatcttgcacggacattgccctctcaagcaaccgcgacgaatcattgtcattaggccagccaaggaccatcagcttctgcgaggagtcccccagtacaaagctacaaatctgatctgggtgattgcccagtgtccatagattcggccattctgattgatgcaaaagacataaagaatcttgtgcattcaagcggggaggagggcttgggaagaggcataatatatagtatgttattgatggtgttcttgttcttgtttatgatgtgttttcacatggttaattcgcttaatgctggtctagctggtgcaaaccccccaactaacaagggagctgccacttgcagactcttgagtattttttgttggccttgcgccattgtattgcagaaagaaatatgccaaaatttagcagtaccaaaattataggcttacaaaaactgtactattcttgtttcttgtatgaacttacaagctgcagaatgcaagaacagatgctgc

SEQ ID NO: 20696 - DNA, 850 bp, Oryza sativa
  ref <308>: DATABASE ACCESSION NUMBER: AK071002
  ref <309>: DATABASE ENTRY DATE: 2001-12-06
gatttcgaaagaattcacgtcggttcgcccgcctcctccgctcgcgtgcgccgtcgccgccgcagctccctcttctctaccgtgctgccgccgccgctccctcccaatgagccgtcggatctcctagtaaggaggccggggccgtcagatccggtgaccccggtctcctcaccggcggatccggcgccaagacgccaacctccgctcgcaagcgtcgtcgccgtcgccgtcgccgtcgccgccgcaactcccttctcctctaccgtgctgccaccaccgctaactcccaatgagccgccagatccgttaagaggaggctggggaggagaaggggagtcgggagggacaccaccgcctggagcgaggcacaccccggccgcggccgcgaccccgcatccgtcgcccgctgcgagccgcatctctgccccggtctgtgcggcgccaaatccgcctcgggaccatcggctggctcgccgatgtatccggctacccaaagacgacggagctagcacatgcagaagattacggagtggcaggatgaggtggtggtggttcttccccagacccttcactgctctggaggtcaggtttcgccgatgatgcgccatggatttgggcctcccggacctcaaaatcttcaaggtcatttctatctcccagccaaggtcactgttcaaatgtgctcctccattactccttccccagagccacaataccatccccctcaatcggatgatgggtagacatgtatcatgtgtttttgtatggtctggagaaggcatgctttagccatggtatgtcatatttgccaactctctcacacaagatgtaacatgcacattttgatatt

SEQ ID NO: 20697 - DNA, 1891 bp, Oryza sativa
  ref <308>: DATABASE ACCESSION NUMBER: AK071003
  ref <309>: DATABASE ENTRY DATE: 2001-12-06
gatgagggtccataccgtttgcttgcttcatttacatcgagctggatgtcaaatcacaattctccctgtgacatcccaaagcctgcctctgttgatgaattcgtcaagaatggcaagaagaagaagtcattcatgtcgagcatctttcggaagaaagggaggagcggcacggggagctcggacaagaagctgctatcgcggagggatatcgtcttcggtttggatgagaaatgcgacgataggtcggagctcttggattcttcccctgccgtccgcaagagcttttcagatcggcattgcgccacaaaaattgagagcttgactctaagctgcttggattcaccccacaggcagttcgatacccgggaataccgggtgttcgtaggcacatggaatgtggctgggaagcctcctaacagcagccttaacctggaggattttctacagatagaaggattacctgatatatgtcttggggtttcaggagatcgttcctctgaacgcaggcaacgtgctggtcatcgaggacaacgagccagcggccaagtggctgggcctcatataccaagctctgaacaagccccaggaccagtcctccggcgacgagctgtctccgccggagacctccgacagccggcagggcggcggcagcggcagccgcgactccatacccaagtcgtcgagcggcggcatgctcttcttccagaagccgtcgctgaagatgctgagcaagaactaccgcgtggacagcgcgctggtgaagacgtgcacctgcctgaccgacccgtccaccatgcagcgccgggcgcgggagatgcgggagttcctctaccgcatcgaggcgtcgccgccgccgtcgttggcgtcggcggcggcggcggccgacgaagacgggggcccggacgccggcggcgagctggcgaggagcagcgtgaactactgcctgatcgcgagcaagcagatggtgggcatcttcctgtccgtgtgggtgcggcgggagctcgtgcagtacatcggccacctcagggtggactccgtcggcagaggcatcatgggccgcctcggcaacaagggttgcatcgcgatgagcatgacgctgcaccagaccagcgtctgcttcgtctgcagccacctcgcctccggcgagaaggaaggcgacgaggtgaggaggaactccgacgtcgccgagatcatcaagagcacgcagttcccgcggatctgcaaggtgcctggccagcgtatccccgacaagatccttgaccatgaccgggtcatatggctaggagacctgaattaccgagtcgcgctaagctacgacgagacgaagacgttgatgggggagaatgactgggatacattacttgagaaagaccagttgatgatcgagagacaggcagggagagtgttcaaagggtggaaagagggcaagatctacttcgcaccgacgtacaaatacaagcagaactctgactcatacgcaggggagacggccaaatcgaagaagaaacgaagaacacctgcatggtgtgaccggatactgtggcacggccagggaatcgagcagctgcagtacatcagaggggagtccaggttctcggatcacaggcctgtttgcagcgtgtttgtgatcgaagccgatgtagataatggaagcatgatcagaaagggctactcaactctggattccaggatccatttcgagtctccgataccacaaagacacagcttctacgatgatttctgacttgtgattagtggttttgtctatactactatacttgtagcttaattacaaaaagcaggaatgtgtctacttttgtagtgggtgggctgcatttttcaagcctagcacttgtcttacactaactggagtaaatggtggcttctgacc

SEQ ID NO: 20698 - DNA, 1433 bp, Oryza sativa
  ref <308>: DATABASE ACCESSION NUMBER: AK071004
  ref <309>: DATABASE ENTRY DATE: 2001-12-06
ggtccccttcccttcgcgtaaaagaaaatctacagtctctcgtcgtctcctcccgccctccgcccccttgcgcggctgaacaggggcggggcgccgatctccatctggcgagcagagcagggaaggcgaggggatcctggatattttaggatcatcataaacttcattgcttttgctgtatgttattccaacagggtgctctttgctatcttatacttcttcagctttttctgcgatggattggatggttggtttgcatgaaagtttaaccaagcatcaacatttggagctgtgctggacatggtaacagatagggttagcactgcctgtttattggcacttctctcccaactttacagacctggcttagtttttttgatgctgcttgggttggatattacaagccattggtttcaaatgtatagtatgttcctatcaggtaaaactagccacaaggatgtgaaggacactggcaattggcttctaaaattatattatggacatcgaccattcatggcattctgttgtgttgcttccgaggttctgtacataattctttttctgtttgctgatgagaaatcgacaagcttgcttaatgtgtgcagatgctttctaaagggaagtcctctcactttcttcgtttttatttcaactctagttggttgggcattaaaacaagtgatcaatatcatccaggtatccagaaaccaacattaaaatttcttgcagttgcaggtgcttgatatttgtacatctgcaagtatttaagttctaattatgacactaataataggtttgttataaagctgaagaaaaagtgttgatgcactggttagctcatatgctttacattagggtttagctagccctggttaataggagatacattatgcccaaattataggttcacatatgttgctaaaagcctagagcaggtgcttattgtaacattctattctttatttagagtgtctatttatatgattctagcagtactaatagcgacacattaataagaagtgtggatcgagatgtcgactaccactagagttgggcacttgtaggatcgagatgtcgactagaggggaggggggggggaggggtgaataggcaatttaaaactaaatgacacctaatataaaactaagggtgtgtttggttcccggtcaaggttggatgggatatggcggtccagttttttgtttggtggagtgaatatggcgatccagttttttgtttggttgtagggatgaaagttgatatggtgatccatttttttgtttggttgggggagtgggatggatgagtggttgcaatcaccctttcattagaggtggtgagtctacccctccaaattctcacccaaaaattatcaatctactaaaaaaaatctaaatagaaataaaaaagcagaaagaaataaaaggggaagg

SEQ ID NO: 20699 - DNA, 1820 bp, Oryza sativa
  ref <308>: DATABASE ACCESSION NUMBER: AK071005
  ref <309>: DATABASE ENTRY DATE: 2001-12-06
ggcgggggtcgcgcgggtccatcggatcgggagcgcgcggcgaggcaggcggggtcgccaccacctgtcgcgacgcgaccgcggggggcgcgcgtctccttccttcctcccctcacctcacgctgcctccctcccatccccttcgccctcctgtccgcctcgctccccgctccctctcgctctcgctctcgccttctcgccaccgatccatccgcccccgtggcgcgccgcccatgtcgtcgtcggtgtcctccgtgcgcctcccgctgcgggcggctcctcccctctacggccgccgcgagtggagggccgatggggcccgggcgccgtctcccgcgctcgtcgccgtgaagccgctgtcgtgcagggcgcccgcgtcgtaccgctccgcgctgctcctccaccgccgccgccggtacgcgctgcccccggttgccgccaccgccacctccaagcccgtcctcaaggacccgaagaagtatcaggaatgggactctctgacggccaagttcgccggcgccgccaatgtccccttcctcctcctgcagcttccccagatcatcctcaacgcccgtaacctcctcgccggcaacaaaaccgcgctcttcgccgtcccatggctcgggatgctcaccgggctgctcgggaacctgtcgctgctgtcctatttcgctaagaagaaggagacgggggcggtcatcgtgcggaccttgggcgtcatctccacctatgtagtcattgcccagctcgccatggcagggtccatgccattgccacagttcgtggccacttcagccgttgtggccgctgggctgctcctgaacttcctcaattactttgggtggctcccgggaacactctggctgctgtgggaggatttcatcacaataggtggccttgcagtgcttcctcaggttatgtggtcaacatttgtccccttcatccccaatagcttactgcctggcataatctctggttctttggctgccacagctgtcgtaatggcaagaatgggaaagctttctaagggagggattaactttgttggatcattatctggctggacggccacacttctcttcatgtggatgccagttgcgcagatgtggacaaattacctcaacccaagtaacatcaaagggttgtcagctttcactatgttgcttgcaatgattggaaatggacttatgattcctcgtgctgtatttatcagagatctcatgtggttcactggttctgcctgggcatctttcctacagggttggggtaacttggcctgcatgtactgcttcgatagcatcagcagagaatctttcttggcaacaacatttggacttcttctgtggctaggatttactctctggagagataccattgcccatggcaacagctcacccgtgacttctttgaaggaacttcttttcggaaagtgaatagaactccattatgtccatattcagcagcaaactgctgccaggcaggaagctctcctacaataattaatggtgaccggcaagaacctgttcgacattggcattattgaggtgaagcactctggtcgacaacctattgtcgtggtgaaactggaacctcccagcttgctgcttgcagaaagtggcatgtgctcctacagaaattaccaggtggccagcttgtgcatctggcagagaagggtacagtgtgtagcttttcttcttttttttttttgtaagaaagaactttatgtttctcctcttgaataagactgtcaggtcatgctggtatgggaaaatgcaaaccactggccattgggtcattggtgatgtccagcagcttcagcc

SEQ ID NO: 20700 - DNA, 1096 bp, Oryza sativa
  ref <308>: DATABASE ACCESSION NUMBER: AK071006
  ref <309>: DATABASE ENTRY DATE: 2001-12-06
gatttccgcctctctctctcccccccatctctacagaggcagcagcagcggcggcggcgacaagggaagccgatggccatggcgacctccaccttctcccccccggcctcgcagctctccctcacccgccgccgcctccacccgggccccgacctcctcaccctctcctccccgcgcctccgcgccggcctccgcctcgcccgcgccgccgccggggaggcccccgtggagactgtcgaggcgccgccgagcaagccggaggccgagccgtcccccgctgcgtccaacggggccgccgtcaaggccgagaagccgccggcggcggcggcggcgcccccgctgcccaagttccgggactcgaggtgggtcaacgggacgtgggacctcaggcagttcgagaagggcggcgccgtcgactgggacgccgtcatagacgccgaggccaggagaaggaaatggcttgaagattgtccagaggcaactagccctgacgaggccgttgtcttcgatacttcaatcataccgtggtgggcatggatgaagcgtttccatctccctgaagccgagaagctaaatggccgtgctgccatgattggcttcttcatggcatactttgttgatagcttgaccggcgtggggcttgtcgaccagatgggcaacttcttctgcaaaaccctactgtttgttgctgtggctggtgtgctgctggtcaggaaaaacgaggacatagagacagtgaagaagctcatcgatgagacgacgttctacgacaagcaatggcaggcaacctggcaagatgagtccccttctcagcccaagaaatagctctgaagtggaatctgaatctgaatcctccctatgttgtattgtatcacttctttttgcagcccttttctcaacccatttattagtgaggctcagtacattttgatgatcttaatacctatgacgtcttgtaaaaagtacgaactcgtttctgtgctagaggttaacgttgctgcgggttacttggttgaatgttttctttgtgagaattgcttgtactagttactccctccgcttcatattataaaatgctttgactcttttctaaatc

SEQ ID NO: 20701 - DNA, 1266 bp, Oryza sativa
  ref <308>: DATABASE ACCESSION NUMBER: AK071007
  ref <309>: DATABASE ENTRY DATE: 2001-12-06
gggcctccgcgtggtttccatccccgcgcgcgccgcccctctccgctgccggcctccgctcctcctccggcgccgtcgccgtcccatcggcctccgcttgccgcccgctccgcgctattcaccccggccggcagtgacaatggcaaggcttgcagctgaggacccattggttcgcgatgaagccatattggatgatgatgatgatgatgttgataccgacgaggaagagtccgagtcggaagatgattcaggggaggaattccatgccgagccttccaagaaagctgtctacaacaaggaggggatcctggagaagctcgaggacattgcgtggccggagaatgtggactggaggcacaagctcactatcgaacatgaccagggggagaaagtcgatgtgaacgacgatcttgctcgtgagcttgcgttctacacgcaggctttggatggtacgaggcaggcctttgagaagttgcagtctatgaaggtccggtttctcaggccggctgattactatgctgagatggttaagaccgacgctcacatgcacaagatcaaggggaggctcttgtctgagaagaagaagattgaggaggctgaggagaggaagaaggcgagagaggccaagaagagggcgaaggaggtgcaggcacagaaagaaaaggagagggccaagcagaagaaagaacagattgagtccgtcaagaagtggaggaagcagaggcagcaagggggctttgccaagggaaatgatgatgggccagatctgaattttgaaggtgacgaagggttcaagcaatcaaagaaaaagaggcctggtgtttctcctggtgataggtctggtggtcttgctaagaagggtaaacaaggaaagaacaggaaatcaagggattccaagtttgggcatggtggtcggaaagggctgaagaagcaaaacactgcggagacgacaaatgacttcagaggattcaaccagatggacaagtcacaaaacaagaggagaaaaatgggttgacgcgatattgtaagaatctgcgtctgcttccttgagctgtattactagttgtttttggtaactttattttactgcagtacatcgttgctagatgcgaacgttagttgagatagattgtaggaggcagttaaaacaaaagaccattttatgttttaactatgctgttctccacaagatatttgcatgtatctggtgatggccctttttcgttgtgtgatgtggaagaatcaatcttaccctggaattatccg

SEQ ID NO: 20702 - DNA, 1218 bp, Oryza sativa
  ref <308>: DATABASE ACCESSION NUMBER: AK071008
  ref <309>: DATABASE ENTRY DATE: 2001-12-06
ggcgtgcagctgcgcggccgcgtgcatccgctgcgctgtgctgccatttctcttcagcttaaaaagcgagccctaccatttcctctctctcttcttgtcatcctcctcatctcttcttcctccctcgtctcaccaacagcgaggtgactgagagaagctagcttgggagaataatccatggcaggcaagatgtctacaattgtgatgatggtggatcttgaatgtgacagatgctacaggaagatcagaagggtcctctgcaagctccaagataaggcgagcatcaaggccatctcgtacgacgagaagaacaacacggtgacggtggcggggccgttcgacgccgacgaggtctcggacaggctctgctccagcgccggcaaggtcatcaccgacattcgcgtcgtcggtggtgccaaacccatgccaggcggcggcggcggtggcgccaaggcgcacgccaacaagccggccgggaaggacggcagcgcaggcggcggcggcggcggcggcggaggaaagccggagatgatcaagaagcacgtcaagttcgagatggcggacgacatggacgacggccgccaccaccaccaccacgacaacaggaagccgaaggtggtgacgaccaccaaccacgccgccggcgccctcgcgcggatggagggccgccgcgccgaggcgccgagcatggccatggcggcggcgatggcgccggcgcccatgccgatgacggtgcaggcgacggccacgccgtccatctggccggcaccggcgccatcggcgccggcgccgctggagtgggggcacagcgccccgacgtacggggcggggtgggccccgccgccggcgtacgggtacggcggccggagcccgtaccagccgccgtactacgacgaggagccggccggctgcagcgtcatgtgacgtgacgaaccaaaaccgatgaggccacgagtcttcttgtgtgaaaaaggaaaaaaaaggaaaaaaatttatgtgtatgcatgatcggttcgtttatatcatcatgtgtaaatttgaacaagagaatgctagctgagtaccatgtgtgtagagttactgtgtaatgtaatgttttcaacttggtgtatttatgatgatgaaaacaagtatgcaatcagggtttcttttaatttaaagctgtatcagattttgactttgtacaatgttttatttaaaagagtgttcttttgtgct

SEQ ID NO: 20703 - DNA, 1010 bp, Oryza sativa
  ref <308>: DATABASE ACCESSION NUMBER: AK071009
  ref <309>: DATABASE ENTRY DATE: 2001-12-06
gtagtggtggtggtgcgagagggagggagatgggcattcccagagctctcctgctgctgctgctccacgtcgccgtcgtcgtcgttctccggtcgctgccggtgtcctccgccgacctgtacgcgctcgtctacaagggctgctccaaccagagcttccccggcggcgcggtgccccccacagtcgccgcgctctcctcctcgctctcggaccagtccgcctccgccaagttctacaagacctcgtcgtcatcctcggcttcctccacctccgtcttcggcctcttccagtgccgcggggacctctccggctccgactgcgccgcctgcgtctcccgcgccatgtcatcctggtccgaggtttgcggcgcctccgtcgccgcccgtgtccagctcaccggctgcctcgcgctctacgagatatccgggttcccccaggtgtccgggacccagatgctgttcaagacctgcggcaccggcggcggcggcgggaccgacttcgagatgcgccgcgacaccgccttcgcgcagatggaggccagcgtcggcgggggaaacggcgggttctacgccaccagctaccagcaggtgtacgccatggcgcagtgcgagggcgacctctcctcgggggactgcggccagtgcgtcacccaggccgtccagcacgtcgaggtcgagtgcgggggcgcgccatcaggccaggtgtacctcgagaagtgctacattagctacagctactatccccatggcataccccatggcggcggcatcggagcagacagcaaagactgtagccattgttctcggtggagctgtaggtctgggttttgtggtcatatgcttgcttttcgccaggagcctggtcaagaagaaggagggtgagttagtggaatcacatgccactcgcagcaccatctcttcaatcggctattcaatttgcagctaccattgcttcctgttctgggtatctgccctctgttcttcttacgaaaatctgtgtgcgtttggccc

SEQ ID NO: 20704 - DNA, 1908 bp, Oryza sativa
  ref <308>: DATABASE ACCESSION NUMBER: AK071010
  ref <309>: DATABASE ENTRY DATE: 2001-12-06
gtagattttgggggaacaaggagagagagaagaggagagaagaggccattcttctcttctccaccacctacactctctctctctctctctcatctcctgccttctctctaggatcgccgccatccaccacatcccacgctttttactgccgcacacataagagcacaggaggaggaggaagaagaagagtagagagagaaagatagagagaggagcaggagaagcattcgttcatccaggagagagagaggcttcaagttcttggtctcctgctctgccatgtccatggatgaagggtatggccctacctgggacagcgacgacgagtacgacaacttcatacgcaagatgaacccgccaaggatcgagatcgataatgattcatgcaacgacgccacgattgtcagggtagacagtgcaaatgagtatgggattctccttgaagtaatccaagttctgattgatctgaatcttgtgataagtaaggcgtacataacctcagatggtggatgggtcatggatgtctttgatataactgacaaagaagggcagaagcttaaagataaggctactattgcgcgaattgaagactacatttgtaagtctttgggtgcagattcaagatacataccttctcgccggagatcagtagatgtcgctgcttcgagtgatcacaatgtcattgagctgacagggactgaccggccaggcctcctctctgaagtcagtgcagttcttgcaagcctcaagtgcaacgttgtcagcgccgagatctggacccataacaccagggctgccgccgtgatgcgagtcaccgatgagggcaccggatcggccgtcacggacgccgacaggctcgagaggatcagggataggctgtcctaccttctccggggaggcaacctctcgcgcggcgcggccatggcggtgtcgacggggacctgcagcacgcacaccgagaggaggctgcaccagatgatgctggatgatggcgaccatgagcagctccatcggcatcctccgaatcagtcccagaggcccaatgtgacggtgagcaattggaatgacaaggactactcggtggtcaccatccgatgcaaggaccggccgaagcttctcttcgacacggtttgcaccttgacagacctgcattatgttgttttccatgcaaatattgatgccaaggataatcaagcttaccaggaattctatgtgaggcatgtaaatggatctccaatgcacactgaagctgacaggttgcgagtcatccagtgccttgaagctgctattgaacggagggtgtctgagggtgtgaagcttgagctctgcacaaatgacaaggtcggcctcctgtcagaggtcacccgaatcttccgcgagaacagcctgactgtcacaagagcggaggtgagcacgagaggaaggatggctgtcaacacattctatgttcgcgattccacaggagggacggttgatcagaagacagtagactccatcaggcaagccataggccagaacattcaggtgaaaggccagcctgagccatcagagccacagaagaaagagtcacccacatggttcctcttcgccaacctgtttcgaccgagatctctctacagtttcgggatgttcatgcgctgatctcatgagccgatcccgaaaaccgcactgaaaattcttagctgacgaagaggcccaagaattcaggaagttacagagagggccttcattctgttcaagacttaccagtggagtggcgcaggaatggaatagtagtgtaggggttgtttatagatcatcatcatttgtaaatatactcgaattcgccatgtccacattgtacatatgtagataaatcatgtaaatataactgtggaagatattgttttataagaaatatgttagatt

SEQ ID NO: 20705 - DNA, 1970 bp, Oryza sativa
  ref <308>: DATABASE ACCESSION NUMBER: AK071011
  ref <309>: DATABASE ENTRY DATE: 2001-12-06
gcagcagccagctagctagctactcctactcagcagcagcagcagctcaggtctctccagtgttcttcgagctatacactagctctcacagacttttgctccgactcatcaagcggattgattcgatcggctgttagagagagaaaaaaggagagttggagatggtgagccaagtggtcgccgaggagaagccgcagctgctgtccaagaaggccgggtgcaacagccacggccaggactcgtcctacttcctggggtggcaggagtacgagaaaaacccgttcgaccccgtctccaacccttccggcatcatccagatgggcctcgccgagaaccagctgtcgttcgacctgcttgaggagtggctggagaagaacccccacgcgctcggcctccggcgagagggcggcggcgcctccgtcttccgcgagctcgcgctgttccaggactaccacggcctcccggctttcaaaaatgcattggcgcggttcatgtcggagcagagagggtacaaggtggtgttcgaccccagcaacatcgtgctcaccgccggcgccacctcggctaacgaggcgctcatgttctgcctcgccgaccacggcgacgccttcctcatccccaccccatactacccagggttcgaccgcgacctcaagtggcgcaccggcgcggagatcgtacccgtgcactgcgcgagcgcgaacgggttccgggtgacgcgccccgcgctggacgacgcgtaccgccgcgcgcagaagcgccggctgcgcgtcaagggggtgctgatcaccaacccgtccaacccgctcggcaccgcgtcgccgcgcgccgacctcgagacgatcgtcgacttcgtcgccgccaagggcatccacctcatcagcgacgagatctacgccggcacggcgttcgccgagccgcccgcgggcttcgtcagcgcgctcgaggtcgtggccgggcgcgacggcggcggcgctgacgtgtccgaccgcgtgcacgtcgtgtacagcctgtccaaggacctcggcctcccggggttccgcgtcggcgccatctactccgccaacgccgccgtcgtgtccgcggcgaccaagatgtccagcttcggcctcgtgtcgtcccagacgcagtacctcctcgcggcgctgctcggcgacagggacttcacccggagctacgtcgcggagaacaagcggcggatcaaggagcggcacgaccagctcgtggacgggctcagggagatcggcattgggtgcctgcccagcaacgccggcctcttctgctgggtggacatgagccacctgatgcggagccggtcgttcgccggcgagatggagctctggaagaaggtggtgttcgaggtcggcctcaacatctcccccgggtcgtcgtgccactgccgcgagcccggctggttccgcgtctgcttcgccaacatgtcggccaagaccctcgacgtcgccatgcagcgcctcaggtcgttcgtcgactccgccaccggcggcggcgacaacgccgccctccgccgcgccgccgtccccgtcaggagcgtcagctgcccgctcgccatcaagtgggcgctccgcctcaccccgtccatcgccgaccggaaggccgagagataatcgccaagaacaaaaccacaccatgtccattactattaccagtagtagcacatactagtacattactacgtcacagtacactatactagtagcagcagtagcagattcctttcgtttcttgtaatcttttggcgccatttttttttcctcggatcgaggcgtgcatgcccgatggtctcggatgatcacatatcgatccattccatcagccggcatcggatcgatcccgtatttttcactgggaattttcagttttcccccgacactgaatttctcccagttgttgtaacctatggaaagtattattgctcgtcaataaaagctagtgcccaccacttgtagttc

SEQ ID NO: 20706 - DNA, 1745 bp, Oryza sativa
  ref <308>: DATABASE ACCESSION NUMBER: AK071012
  ref <309>: DATABASE ENTRY DATE: 2001-12-06
gatgaaaaaaaaaaagtcgccgatccgtttcctcctcgattgccggcaagcggaagagggagagcggaagcgaggaggaggaggatcgaggcagcgggcgcaacgtggcgcgcgctttgcttgcaacggaagcgtggggattatagaagagggggcgcgagatccagatctggcgccgatgcgccccccctccctgctctccctcaccctcgactccgcgctcctccgcatcgcccacctccacgacctctcccgcctccccgaccacctcctcatcgacctcttccgtagaactatagctgccggtaagctgacaggaaaagtcctgaagttgtttctggcaacggattgcgaggaaatcgccttgcttgttcagttgctcaacattaagcagccgcttgtaccggtccttcccacgaggtgctctgagaagttctagaagtgacactgattaggtcagtcttggttacctgagaaaagatgtctttggaaattcaggacagtgaggtcgacattgtgattgcagcactccagcccaacctgactactttctttgaggcatggaggccatttttctctcggttccacatcattgttgtcaaagatccagatatggctgaggagcttcaaatccctacaggttttgatctcaaggtttatacgaagtcagatatgggagtgcttggagccacatccatcgacttctctggtcactcatgccgttactttgggtaccttgtctcacgcaagaagtatgtcatctcaattgatgacaattgcctcccagcgaaggacaatggtgggttgactgttgatgcagttgcacagcatatgtccaatctgaagacacctgctacacctttctttttcaacacattgtatgatccattccgcaaaggggctgactttgtccgtggatacccatttagtctgcgcgagggggttgagtgcatgctctcttgtgggctgtggcttcacaatgcagactatgacccaatgactcatgttgtgaagagaaatcaacgcaacacaacgtatgtggatgctgtgatgacagttccacttggtgcgatgatgcctgtgagcgggataaatgttgcattcaaccgtgaggtgctgggacctgtaatgttccctgctctgcggctgcgcaaggaaggaaagcacagatgggatacacttgaagacgtttggaatggcttgtgtgctaaagtggtgtgtgatcgcttacggtatggcgtgaagacaggtcttccttatgtgatgagaagtgatgcagaagcaggtaaggctctcgagagcttgaaagaatgggaaggggtgaaagtcatggacgtcgttcttcccttcttcgaatctctgaagctatcgagtacttcagttactgttgaagactgtgttaaggaactaaccagcattgtcaaggagaaactgggaccgcagaatgcaatcttcgctaaagctgctgatgcaatggaggaatggaccaaactctggaaatctcacggagctcaaagcgcttaggctgaaatttggttatctgttatgagcatatctgatttcgatacccactgttatgaaactgaataaaccgcattcctgtatgctgggaattttctcgttagtgtacgctccaatactcgtgccgttttcaaagacaagcagtgatatgcaaagcaatgctgtgtatcttgtgtgttacatcaggagttttttttaatggtgatttcgttcatagttttcag

SEQ ID NO: 20707 - DNA, 1083 bp, Oryza sativa
  ref <308>: DATABASE ACCESSION NUMBER: AK071013
  ref <309>: DATABASE ENTRY DATE: 2001-12-06
ggatcaaccatcacctctttcacaccatatcctataatggcgaactcaccgacgccgacaatgctggcgttcctggctcttgggctagcgctcctcctctccgccaccggccaggcgagcgcgcagaactgcggctgccagtcgaacatgtgctgcagcaaatgggggtactgcggcacgggcaaggactactgcggagatgggtgccgctctggcccgtgctacggcggcggcggcggtggaggaggaggaggcggaggtggtggaggcggaggcggaggcagcggcgtgtctgtagagagcgtggtcaccgaggcgttcttcaatgggatcaagaaccaggccccgaacggttgcgccggcaagaacttttacacacgacagtcgtttcttaacgctgcccactcctactcgggcttcgccagggaccgcaccaacgatgactccaagcgtgagatcgctgccttctttgcccacgtcactcatgagaccggacatatgtgctacatcaacgagataaacggggcgagcatggactactgcgacaagaacaacaagcagtggccgtgccagccggggaagaagtactacgggcgcgggccgctgcagatctcgtggaactacaactacgggcctgcggggcagaacatcgggttcgacgggctgagggacccggacagggtggcgcaggacccgacgatctccttcaagacggcgctctggttctggatgaacaacgtgcaccaggtgatgttgcaggggttcggcgccaccatccgggccatcaacggtgcgctcgagtgcaacggcaagaaccccggcgccgtcaacgcaagggtaaactactacaaagactactgccgccaattcggcgttgacccgggtggcaacctttactgttgagttacatgcacacatgctgcgcggctcatcgatcaggactgaataataaacaaagtaatgacgaataaaacgtttggtgtgtacgtacattgcatgcacgtacggtacatgttgcaagtgacgtcaagagtttggtacggataaatatgaaaaataaaatgttgggatcaggattaaatg

SEQ ID NO: 20708 - DNA, 1694 bp, Oryza sativa
  ref <308>: DATABASE ACCESSION NUMBER: AK071014
  ref <309>: DATABASE ENTRY DATE: 2001-12-06
ggcgtcctcctcctgtgccgccgcgctctctctctctctcgcttcggatgccgctattgctgctgctgcgcctgtggctgccataagtatatcgcactccacggtgaccgaccgaccgacgcagtcgtcacgggcgcggcagatagctggctagtggctagcaccgcgcgtcgagacgggatgggcgagaggaggcgccgtgccagcgctgtcgccggcggccgggctgaggatgagaaggctgcttcggcgcctgcggccgcggccccggcaccgacggtgtggttcgcgctgaagaggtcgctgcactgccggtccgagccgtcggaggtgcacgtgccgaggcccaaggccgtcgccgccgccgctgcgggcggtggcgggcacctctcggcgattgtgaccaagcgcgcggcgccgcggtcgggttgctcccggtcgatagccaacctgcgggacgtcatccacgggagcaagcgccacccggagcggccgccgagctgcagcccgaggtccatcggcagcagcgagttcttgaaccccatcgcccacgaggtggtgctcagcaccaactcccgctgcgagctcaagatcaccggcttcggtggctgcggcggcctcgcggcggcggcggcggcggggggcggcgtactcgcgtcgccgcacgaggcggacggcgacggcgccgtggtgtcgtcgttcgttggcacgctccggccgggcaccccggggcccggctggagccacggcctgcagtacagcggctcgtgccggggcagcatgcggtgcacgcctccgaggtcgccgaatgtgctgctggacagcagggacgccgccgcggccggggtgaccgctcaccgcgcgtcctgcgaggacgccgtcaagagctttggcaagggcggcggcctaagctgccaccgttgcggtgagcagttcagcaagtgggaggcactggaggcgcaccacctttccaagcatgcagtgacggagctggtggaaggggactcgtcgaggaagatcgtggagatcatctgccggacgagcctgctcaagtcggagagcagctgcgtgcggatcgagcgtgtgttcaaggtgcacaacacgcagcggacgctggcgcgcttcgaggagtaccgtgaggcggtgaagctgaaggcgagcaagctgcccaagaagcacccgcgctgcctcgccgacggcaacgagctgctccgattccacggcgccacgctctcctgcgcgctcggcggcgcggcgggctcctccagcctctgcgcctccgacaagtgcgccgtctgccgcatcatccgccacggattctccgccaagaaggaaggcaaggccggcgtcggcgtcttcaccacgtccaccagcggccgcgcctacgagtccatcgaggcctccgccggcgccgtcgtcggtggcgacgacccggcggcgacgcgcaaggcgctgctggtgtgcagggtcatcgccggcagggtgcacaagccgctcgagaacctcaaggagttcgccggacagaccggcttcgactcgctcgccggcaaggtcgggccctactccaacatcgaggagctctacctgctgaacccgagggcgctgctcccgtgcttcgtggtcatctgcaaggcttaactccagagtcatgcattgcaaacgactaattaatcaagtaattaaccattctttcc

SEQ ID NO: 20709 - DNA, 1957 bp, Oryza sativa
  ref <308>: DATABASE ACCESSION NUMBER: AK071015
  ref <309>: DATABASE ENTRY DATE: 2001-12-06
ggcgttgcgccacggataaatttccaccgccttcgccttcgcgagatcggatcacggcggcgtcgaccgcatatcggcgctccccgacgacctcatccagcgcatcctccgcttcgcgccggccaacgaggccgcgtccaccgccctgctctcagcgcggtggcgctcgctctggcgctccaccggcgccgtcaacctcgccgtgcgcctccccgagcccgacgacgggcgccgccacggccaccgcgtcagccacgacgccgtctcctcctgccatgacgccttcgtccgctccgcgcaggcggcgctctccgccgccgccgccgcagccggaggccgaggccgccacgtcacgaggctcaccttggaccttcgggcggcgaccatggatgtgatcgacaggttcgtgcacacggagaggccgcttggtgcggacgcggcgcccgacacggacgtgtggctgcggctcagcgacgacgtcgagcgagaggcggacagatgggtgaagaggggagacgtggtccgcgacgtggtctcccacccggcggcgcgccgcgtggaggagctccgcatcagcgccagcgcgccggccgtcgacgacgacgacgacgacggcgaggtcgggcgtctcgtcggggtgttccacctggacctccgctacgtcccgtcggagaccctccgcgtgctggacctctcccggtgcagcggcctgcgcatgccgcccgccgtggaaaccccgcggctgacgacgctgcggctgcaggcctgcgccgtgaacgtgaacgacctgcagcgcgtcatcgacgccgcgccggcgctcgccaccgtgcacctcgactccgtctccttcgacgggatggagcacggctgctaccgcctccgcctcccggcggccaccaccgcgctcgtgctggcgaggtgcaggacggacgcggagccctaccgctaccggagaagcggccgcccactggggaccagctccgtcgagatcgacgcgccggggctccgatcgttcaggtacgcgggctacgcgcggcgcttctccctcgcctcgccgccggacatggcgcgtgccgacctccacttcttccacgacatgtacgcctccgcctccacgagccgcgacctcttctggcgcttcgtccgcagcttccgcggcatcaggtccctcaagctcaaggtgagcgacctcaagcacgtcgccgtcgccggcagggcgacgcgcgccgagctcctcgtcgcgttccccaacgtcgagcacctcgagctggaagggcaccacgaatccgcgagcgagacggccgccgcggtggccatcggcaacctgctccggtgctgccccgccgcgcgccacctcgcgctccacctcgccacggcgccgccgcgcgagcgcgactccgccatgaacggcaggtacggccgcgatctcctgcgagcgagacagcaagccgacctcgccgagtctctcgatcgcttcgctcgccgccgccgacgcaaacccaatcctccgccgccgccgccgccgccgacgccggtgaactccatggacgaacacctgagcatcgtaggattgagtggccgatccttcgcctgcttgaagaactcgctgagaagattcgtaatccagtttcggatggatcgacccaactgcattggcgtcaagctgatcaagttcttcgccgagaacgcgattcacctcgaagagatgcgcatcgacggtggaaatcagaggatgcacgatcacatcaaccacatggttgagggatggatctccgattcatcgtcagcgaaaaagagggcgaatcacgagagttcgcagggtatcgacgcgagtacgccacgctttagattattaccccttgagagacggtgaaattggattgtggtgttagcaagatgtggattgcaattcgataaactattgttaatttggattgtcgaatgttcttgaaattgt

SEQ ID NO: 20710 - DNA, 747 bp, Oryza sativa
  ref <308>: DATABASE ACCESSION NUMBER: AK071016
  ref <309>: DATABASE ENTRY DATE: 2001-12-06
ttggacgaacccagtcaatacaacccgcgcgcgcggcgacgagcccgacctcctcccgccgccgccgccgccgccgtagcgaggagaggagaggagagagatgggcgacgagcgcgtgaaggcggaggcgctgcagatcctgggccggttcgaggctctcccccgcctcgtcgtcttcgacctcgaccacaccatctggcccttatactgcgactgctgctccatcggcgactcgccgaggctcttccgccacgccaagggcatcatgtgcgccctcaaggagaaggggatcgccatggcggtcgcgtcccgctcctccacaccggacatcgccaacgacttccttgacaagctcgagctccagcccatgttcgtcaccaaggaaatattcgatagctggactcacaagaccgagcatttccaaaggatccagaggacgactgggattccatacgagtccatgcttttctttgacgacgagcacagaaattttgcaacggtatcaaaaatgggagtgacgagcatactggttgattgggatggaggtgttaatcttgaaatgtttaagttgggtctaaataactttgctgctaagtttgctgcctcgagcacagataaagatgagcaaacctcatttaacggctagaactgatcgacaaacaaggaaaataaatcatttgtgtactcattaaacttgtaatgtaatttattccccttgctatatattggacaacatgggggtattcg

SEQ ID NO: 20711 - DNA, 1481 bp, Oryza sativa
  ref <308>: DATABASE ACCESSION NUMBER: AK071017
  ref <309>: DATABASE ENTRY DATE: 2001-12-06
ttgagtctcattgtgccttctttcttcttcttcttcttgagctgagcctcctcctaaggcctctcttgtatatacacattttgtatagatttttagagttatatcacagtctcatcagctcttgcaacttcccattgcaagagtttgattgattgattggttgatcagctggtgttccaaatggatccaatcagcatagagaagatcagggccatgagcaagtgcagcaactgcaagaggcagcatccgatgatcctccctgccctggcaatctccatggttgccacctttgttcttctcctgctggtgaccagccctgtctgggtcccaaggctgtgctcactcatggccttcttcttcctcaccaccctccctgaccttgccatggccttcctcctcagccccaagtgcctcttcgtcgtcggcaacctcatcgtcgccttcctcgtcggcgagtctaggctcgccccgaggggggagccggcgtcgtcgtcggtgaatgagatacatgacgaacatgttaagaggaacgccgcgataagcgcaaaggcggtgaccgcggttgtggccattgatcagaatgctcatgttggagaattgggggaagaagaggaagaagaagaggaggaagaggaagaagaagagggggaggaagaagagctgcaccagagagtagaggacttcattgcaagggtcaagaagcagaggagaatggaggacaagagcatgtttgacactgatcgatgacctgatgagttttaccttggatttggaagattcaaagaagggattattgcatccaaattaaggattcttgtgatgctttagtttttcatctatcatcttagggccagagttaagaagaagaagagttcacttcactggctcactgcactgtaggagattatgcatgcacccttttgattagagtgtgtctgatgatctgatccggtttagccatgcacaagaattaggcagagaaaaaaagagagacaaggaatgtgtgtgtgatcttttgaaaaagcagaaaaagaaaagtgatgcatgtgtctttctcttatcgatctttgctttgagcctaattgcatatgtaatgccgcaattattacatcacttatcctgaggaacaatgaggccaagtacactcaacctgatcacctctcagttgtcgggataacaaagttgctcaacacaaacagtgcaaggcaaaagcttagcatttttgtgatttttctgaaacgttttcttaagcagctggcacataaatatgtgcccggtcaactcagttttcttttcctttttggaaggcagctagcaaaatttgatagtaattcgatttccaaattcctgcaacttatattaattgcaaatagtttttttaaaaaaaacatcagattttggatcgttcctaatgcaaaatattgagatctgcaatttgtttcaaggaaccttagatttaataaaacctctcgtatctatgc

SEQ ID NO: 20712 - DNA, 1239 bp, Oryza sativa
  ref <308>: DATABASE ACCESSION NUMBER: AK071018
  ref <309>: DATABASE ENTRY DATE: 2001-12-06
gagaagccgccggtgccggtgccggcgccgcccgcgtcagagaaaggggaagtgcgggagggaagcggggatcaacggagcgcgcccgtcctcttctccacttgcgtgggcggcaccttcgacgggatgcccgtgcagccgccggtttcgcgttccctctccgctgcggacggcggttccctccggcggctgcacgaacttagcttcagcagcatgagcttcttagattgaaagagtaaattgctcggctgaaatccaaaatcaaaagctgcaacaaagagattgacaaaaagaaggatgatagcaagaagcagttggaacagatgaaaagtttgcataatgctttggttgatgtcacaagaactatcaatgaattgaatgagcaaggccaaaataaaaatcgagaaaaccgcacttagctgatgaccaactccaggaatatcacagaattaaggaagatgcggcaatgagtacaacaaagctgagacttgagagatgggatggaaggttttttacaaagagcttgctgctgacgtttaagcaaaaaataatttagagaatatgcagcagttgtgtagctgtgagaatgagattgtcacaagtgcgtgaatcgtgtgcaaagcttaataagattcttcattcaatccccaaccaggaagatgagcttcctcgcttatgtgaggaaaataacaaaggagcaccagccctcaggagttaaataccaaaatgctgaggcagagctaggagtctaaggcggctattccctggagtccatggcgtgacagaactttgtatgccttaacagagaaatacaacctcgctgccactgttgctatgtggaattcgtggacgtagtaatggtagaagataagagcagagcaaaagaacacattaagctgcaggaatcatgtgttggatacatttactccctccaatcacaagtatgtcctgttggctgtagggcatcgacacagtcccaagactgcaacttgactgataatttctattttaatatatttccaagtgcagctacagctttggagaaaccaattccgtgtgcagttggaaatacacttgcctgtgatgaatttgatgaagtgaaaaccttaagttcaggtgatgaaaggtacaaggttgagtttttttttgtttctgcatatctaaaacaacagtatcttgtttggctattttttatgctaattgttctatcatgtgataatcgaatagtgagacaacagc

SEQ ID NO: 20713 - DNA, 1065 bp, Oryza sativa
  ref <308>: DATABASE ACCESSION NUMBER: AK071019
  ref <309>: DATABASE ENTRY DATE: 2001-12-06
gtgcctccccgcgacgccgcgccgccccgccccgcccgatcgccgccgcactcgccgcccgtccgcctcgccgcaacgcaccgcgccaccgcgccgcgccagcctgagggagagagagagacgccgaggtttgaggttggtgagggagctgaggcggcgggagaaggaggaggagcgagagcgagggagagagatcgatggcgaggttcgaggtgtacgagaacaacggcggcacgtgcgtggccgtcgccggcgccgactactgcgtggtcgccgccgacacgcgcctctccgtcggatacagcatcctcagccgcgacagctccaagatcgcccacctagcggataaatgtgttttggcctcatctggatttcaaggtgatgttaaagctttgcagaggaaccttactgccaaggaattgctttatgaacacaaccataacaagaaaatgagctgccctgcgatggcgcaattactgtccaacacgctctactacaaaaggttcttcccatactatgccttcaatgtgttgggtggacttgacagcgaaggtaaaggatgtgtcttcacatatgatgctgttgggtcttatgaaaggacaggttatagtgctcaggggacaggtgcagctttgatgatgcctgttctggacaatcagctaaaatctcctagcccattactacttccagctcgggatgcagtgacaccattatctcaatcagatgctgtcgatctggttaaggacgtttttgcatcagccacagaacgagacatatacactggagataaactggagattgttgtcatcaacagcgccggctctcaccgtgagttcattgagctaaggaaggattagcgtgggatactatcaaaccacctcgtacctgtgcaacaacaataccattcagttactagcagaatgtgccttttccttgccagatgtatttaaattaccgttgtattattcagtgttcaccattattacggaagtggttacgtaagacattttgtagtctttctatctgaactatgcgtatctgaattgctcactgaatttttcttgc

SEQ ID NO: 20714 - DNA, 1548 bp, Oryza sativa
  ref <308>: DATABASE ACCESSION NUMBER: AK071020
  ref <309>: DATABASE ENTRY DATE: 2001-12-06
gatatacaacgatttcctcttgtcaccctgaatctacttctgctgcaaaagcaataagcaaggagcagttagccaggtaaagctctagctagctagcttaggcagcaatggagcagcatcagggccaggcaggcatggacttgccccctggcttccgcttccacccgaccgacgaggagctgatcacgcactacctcgccaagaaggtcgccgacgcccgcttcgccgccctcgccgtcgccgaggccgacctcaacaagtgcgagccctgggacctgccatctctggcgaagatgggggagaaggagtggtacttcttctgcctcaaggacaggaagtacccgacggggctgaggacgaacagggcgacggagtccgggtactggaaggccacggggaaggacaaggacatcttcagacggaaggccctcgtcggcatgaagaagacgctcgttttctacacggggcgcgctcccaagggggagaagtctggctgggtcatgcacgagtaccgcctccacggcaagctccacgccgccgccctcggcttcctccacggcaagcccgcgtcgtccaaggtacacgaacgcacgtacgccgcgtgcgtgtgtttggttgtgaccagtttgatcgatcgatcgatcgatcgattgagcaggccggactgacacgccgtgggtttttcttgttggtgcgtagaacgagtgggtgttgtgcagggtgttcaagaagagcctcgtggaggtgggcgcggcgggagggaagaaggcggccgtggtgacgatggagatggcgaggggagggtcgacgtcgtcgtccgtggcggacgagatcgccatgtcgtccgtcgtcctccctccgctgatggacatgtccggagccggcgccggcgccgtcgacccggcgacgacggcgcacgtgacctgcttctccaacgcgctggagggccagttctttaacccgacggcagtacacgggcacggcggcggcgactcctcgccgttcatggcgagcttcacgcagtacgggcagctgcaccacggcgtgagcctggtgcaactcctggagagctgcaacggctacggcggcctcgtcgacatggcagcgtccggcagccagctgcagccggcggcgtgcggcggcgagcgggagaggcttagcgcgtcgcaggacaccggcctcacctccgacgtgaacccggagatctcgtcatcctccggccaaaaattcgaccacgaggccgcgctatggggctactaaggtttgatatgatcagcgccgtgtacgttaatcgcgggcgattagcgaagtagcgattactgtaaataaaaccatgagatcgcgatcgaggcatctaccaaggttcgcttaatttgcttgtacctataggtgtagattatttggtgatttgggagatgtaattagcattgtttgtttgtaattcgtatcagaatgatcgatgcagtattgtttggagggttagttaagcaattggccactcctcagttgccagttaattagttagagttgcttaatttagctctttct

SEQ ID NO: 20715 - DNA, 1965 bp, Oryza sativa
  ref <308>: DATABASE ACCESSION NUMBER: AK071021
  ref <309>: DATABASE ENTRY DATE: 2001-12-06
gggcttcttcctccacctctcccccccactctctctctctcctctctcttctctctctcctccaccgactcgccaacccctctctctctccctcctctcccatttcgtccccctcccgctcccctccccgtccgtcccccgtatctgccgccaccggggctgggcacggttctggttgatctcccccggccaacttcttgcggcggcggcgatctccgtgcgtggcttcgcgccccgcaggttcttggaacaatatatgggttcaagaccagttgatgaggttcttgatgctgccgcggctggggtccactactccacgctccgtttggatgagcttaacatcaatggctccatgacaggggaggaacaaccaacgacctcaggggtggagaatgggcaccaggagccatttgtcattggtgttgccgggggtgcatcttcaggcaaaagtactgtatgcaaaatgataatcgatcagctacgtgatcagcgtgtagttgttgttactcaggagtctttttattatgggttgtctgatgaggaattggtccatgttcatgattataactttgatcatccagatgcatttgatacggagttactactctcttgtatggagaacttgaaacatggcaaggctgtggacattcctaattacaacttcaaaacatataagagtgttgcaagtgcaagaaaggtcaatccttcagatgtaattattttggaaggaattctggttttccatgattcacgtgtccgggatttgatgaacatgaagatctttgttgacacagatgctgatgtgcgattaacaaggaggattcgacgtgacaccattgagaagggtagagatatcaaaactgtgctagatcagtactcaaagtttgttaagcctgcttttgaagacttcatcctcccaaccaagaagtatgctgatattatcatcccacgaggtggcgataatgatgttgcaattgacttaatagttcagcatattcgtactaagcttggtcaacatgatctctgtaaagtacaccccaatttgtatgtcattcagactacttatcagatacgaggtatgcacacaataatacgggatgctgccacaacaacacatgatttcatattctatgctgatcggttgattcgattggttgttgagcatggtcttggtcatcttccattcaaggaaaagcaggtcataactccaactggatcggtttacactggggtagagttctccaaaagattgtgtggtatctcagtgattagaagtggtgagagtatggagaatgcattgcgggcatgctgcaaaggtataaaaattgggaagattcttattcacagggaaggagacaatggcaaacagctaatctatcacaatttaccgaaagatattgcaaacaggcatgtgctgttgttggatcccatactgggaacaggaaattcagctgttcaagctatatctctactcttgaaaaagggtgtacaggaaacaaatattatttttctgaatcttatatcagctccccaaggagtgcatgtggtcagcaagagatttccaagagtgaagatcgtgacatcagaaatcgagtttggtctgaatgatgatttccgcgtcatccctgggatgggtgagtttggggataggtactttgggacagatgattatcagtcatcaacaccattcttttgtgatgagaaaaatcgtgtcaggcttttgtgagcatttaaatagacaaagtcctggcggcggcggcggcatcatctccatttttgagaaacttaaattttacatttggaaattcagatgcccatattgatgtattcattaccagaaactgtgtatcggttgaacattacaggccgatcttgcctaatgacataaacggagcaaattcctttatgttttttcttatgtcttctccagctttttagtcaggaagatgctgtgatctcatttcg

SEQ ID NO: 20716 - DNA, 1040 bp, Oryza sativa
  ref <308>: DATABASE ACCESSION NUMBER: AK071022
  ref <309>: DATABASE ENTRY DATE: 2001-12-06
cagctgtgccctctttctcatcagccgaggtgatgaatgatatcactgaaaggagcaactttggttggaccaagcaacagtatgtcaaagagcaccaagcaccaacatttgtggatagaatgcaaaaggtgaaagaagataccgaatttagtctgtcaaatggtggttatttcaaggaacaaagaacaaagggtagtgtgccagtgggcatagctgaagtacctgatacagtgtaccagcagggaaggcaaccaactaggaaggctcgtgatttaacttcagacaataatatgagaaattccattgcttatccaattattagaagggttgtaccagatgaagatgagcatctgaacgaactcctccaggaagaggaagatttggtgtctgctcatcggaagcaggtggaagagaccctagacatgatcaaagaggagatgaatttattagttgaagcggatcaacctggcaaccaactagacgactacatcacaagactaagcggtatactctctcagaaagctgccggaattgtcgacttacaggcacgtcttgcgcagttccagaggcgcttaaacgagaataatgtgctgctatatgcccaatgcccttgatcaaaggaagtacctatttgtgatgagaataacgtgcagtatatctgtataccagagcccttgatcagaggagttgcctatttgtcttcactacgaggctaatcagaaaagttggctgtgccactgtttgctggtatgctccgtagagatgcggccttgcctggccaatacagctgcagttcagaacccatagacgcaagacaaacgcagaactagatggctagtttactgcactttgggatcggccgacttcgtaagctatttgtacccgagttgcgccagttgtgtccttctgttacatccttgtgtatatcgtgcaaatcgtgtcgtcacaggattgtcctgttatttgttgctcaacaaatacacttttttttgtctgatgtatgatgaattcagagttttgtgataatccattttgcaccc

SEQ ID NO: 20717 - DNA, 1479 bp, Oryza sativa
  ref <308>: DATABASE ACCESSION NUMBER: AK071023
  ref <309>: DATABASE ENTRY DATE: 2001-12-06
ggtggagaggagagaagctgagaagggaaggaattcttgcacgtagcccccacccgcaccaccaccggcgtcgtcgtctctctcccccagatctcccctcccctcccctcccccctcgccaccaccgccagccaccgcgcgggatcggggagagcgatggcggacggcggcggcgacggcgcgatgccggacccgacggtgcggaacctcctggagcaggagagcctcaagtgggtgttcgtcggggggaagggcggggtagggaagacgacgtgcagctccatcctctccatcctcctcgcctccgcccgccagtccgtcctcgtcatctccaccgaccccgcccacaacctcagcgacgccttccagcagcgcttcaccaagttccccaccctcgtccgcggcttcaacaacctctacgccatggaaattgatccaaaggtcgaaaatgatgacttcgctaatgaaggaatggaaggattcctttcagaactgacaaatgcaattccaggagttgatgaagctatgagttttgctgaaatgctgaaactggtccaaacaatggattactctgttgtagtttttgatactgctccaacaggtcatactttacgattgctccagttccctgcaacactagagaagggtctagagaaaatgatggccttgaaaaataaatttggtggactgttgaatcaggcaactcgattgtttggtcttggtgatgaactgaatgaggatgcaatgctagggagacttgaaggcatgaaggatgtgattgagcaagtgaacaggcaatttaaagatccagacttgacaactttcgtatgtgtttgtattcctgaatttctttcattgtatgaaacggagagattggtgcaagagttggcaaagttcgagattgatgcacataatattattatcaatcaagttctctttgatgaggaagccgttgagtctaaacttctaaaggcacggataaaaatgcaacaaaaatatattgatcagttccatatgttatatgatgacttcaacataaccaagttgcccttgcttccagaagaggtatgcggcgtccaggctctgcagaacttttcacggcatttccttacaccatacaaggctgctctgaaaagaggtacagtggaggaggtggaacagagagtatcactactaaaatcagcactgcaagaggccgagtcagaactagatagactaaggaaagggaagcaggtagcataatcttttttcacatgtcaagtgcatgggaatgccaaaatcgtgaaaaaagcggaactagagagaaacatctcctttttgtctcgctacatactgcagtcgattttataaaattttatttttctccaaatgggatttttaaccttgttatagctattggcagaaagtgtacttctagagtgagacaaatgtgggattttgcccttatttattcaatgatcggtttgaagagtctgttcc

SEQ ID NO: 20718 - DNA, 1855 bp, Oryza sativa
  ref <308>: DATABASE ACCESSION NUMBER: AK071024
  ref <309>: DATABASE ENTRY DATE: 2001-12-06
gatggctactccagcctagggagtagggagatcgatccacctccgccatgctccttcctactccaccaatccggccatgaccggagctcgccgccatgccgccgcgcgcccgcaccctcctcatgccgcttgcggcggcgacgctcctcgtcgcctccaccatcttcctcttcgccgccaccggcgctcgatggcgacccgccgacaccggcctcccggtccccgccgccgacttctctgcggccgtcctagagagcgcagtgaccgacaccaccgccgccgcgaaggagctctcgttcgttgacgagaatggccgccccgacgatcccgcctccagctcggcggccgccgcgagatgcgacccgacccacgccgccgtcagggtattcatgtacgacttgccgccggagttccacttcggcatcctcggctggtcgccgccgacagatggagccgccgacgccgccatgtggccggatgtcggcagcggcgccgccgccccgcggtaccccggtgggctcaaccagcagcacagcgtcgagtactggctcacgctcgatctcctctcctcctcgtcgccgccgtgcggtgccgccgtcagggtcgccgactcccgcgacgccgacgtggtgttcgtgccgttcttcgcgtccctcagctacaatcgccactccagggttgtgcctccggagaaggtgagcagggacaaggaattgcaggagaagctggtcaggtacctgatggcgcagccggagtggaagaggtcgggtggcgccgaccatgtcattgtcgcacaccacccgaatagtttgctccatgcccggtcagtgctgttccccgtggtgttcgtgctgtctgacttcgggagataccatcctagagtagccagcttggagaaggatgtcattgccccttacaagcatatggctaagacgtttgtgaatgactccgccgggtttgatgaccggccgacattgttatacttccggggagcaattttcaggaaggagggagggaacattaggcaggagctatattatatgctcaaagatgaaaaggatgtttattttgcctttggaagtgtccaggaccatggggccagtaaagccagtaagggaatgcacgcatcaaaattttgcctaaacattgcaggggacaccccttcttccaatcgcctgtttgacgctatagtaagtcattgcgtccctgttatcatcagtgacgacatcgagcttccttatgaagatgcattggactattcgaagttttctatctttgttcgctcatctgatgctgtaaaaaagggttacttgatgaggctgattagaggagtaagcaagcatcaatggacaaggatgtggaataggctgaaagaagtggataaacattttgagtatcaatacccatcacagaaggatgatgcggtccaaatgatctggcaagcattggctagaaaggtgccagcaatccgcctgaagtcacataggtctagaagattttctagatatgatagaggaaaataaacatggagaagatccattagtctagaagattttcaagatctggcacaggaagaaaataaacaggaaggcggtgtatgcatgttatctagggccttggctaatctaactagcatttcactgacacatccgttgcacacgtctcatggtttcatgaacataatcggacagattagcaaggaacagtgagatgtaaagatatcaggttaattgttggctcatagcttaggttaggctgtccaaccgaagtgtatactggcaggcaaaagattgttgattttgtaacatatactcttaaaagtaaattaaaagagggtggcaaagttctttttctg

SEQ ID NO: 20719 - DNA, 1895 bp, Oryza sativa
  ref <308>: DATABASE ACCESSION NUMBER: AK071025
  ref <309>: DATABASE ENTRY DATE: 2001-12-06
gatcgacctccaccccacattgaataattatttttaataattttagttttttttttttggctttagatatattcccaatccccaacctccaaaaaaaaaaaaaaagaaaagaaaagaaaagaaaaatcccctccgcctcctcccccaatccttaacctaaactccgatcccctccgccttccatggctgccatgggaagaactgtactaccttcctatgttcttctggatcgcatcgttcgatcggaggaggaagccgtcgaggaggagtcggagtgggcggccatggagtgcgcggactggaagtcgtacgggtgccaccccggtgacaaacgctaccccaggaacgccgctagggtgaagggcatgctgctcctggcgcgcctcgcggagcccccgggtctctccgagctctccatccgcctctccgccgccgccgccgtgcccaggccgccgccggccagcttcccccccggcgccgccgtcccgcccatccccaacttgcccgacgcgtcaccggcgccgctcacctacgtcgaggcggcaggcgacggcctcatcgccctcacctcgtgcttccgggatggctgcagctgctacctcgtctacgacgtcgtcggcaagtcgctctccatgatcccgggcctgcccgagtcctgcctcacctactgcagcatgcggcctctccccctgcgcaccgccgccgccggtggctacgcgctgcgcagcagctactcgctggccatcgtggctaaggacttgcggtttgacatggaagcggggggagacgtctaccgggatgttctctgcctgtgcccaccgcggccatcatcatcctcaagttccagggggggcatcacgccatggcaattcaaggacgccatcttcccatcacagatgccgcgttccttccacggtgacaaggtgttctcgttcggaggccacgcgttctgggccgacctcgcaaagggcgtcctcttctgtaggtgcgacgacgctctctccggccgcaatgatgatgccgtgcaattccgctacatcccgctgcctgtagagtgccatcttaacatcagtttcgccatgaggggtgacctccagctatgccgcacaatgagctgtgtcgacggcggcggtgactctatcaagttcgtctgcatcagtgacggcggatccagctctgcgcacaccggcgatcgtgcgataacgatgtggacactgaccctcgcaaccggggagtggctgaaagatgcacaactcatggtggcagatctgtgggagctggagggcttcgacaaggcgaggttgcccaaggccataccaattagccctgtcctgaaccctcaggaagatggtgtccttagtttcatgctcaacgatgccgatgcagagctgtacatggtcagccttaacatgcacagcaagaagctcctctcgtccttgaccctctcatcctgccctgatgacattgttcctcctttgggtttggatctttccaaagaccttcagaatctgtctcttcgccctattgctgctgagtctgttccagccaagacacagggacgcccaattgcaaccaagaggaggaggtcgtcattaccgtagtgacatctttgtcagtggacggctcgtgatgctggagcagacttcattttgccaggctgctgcttacttggtagggtagggatcgtattcttcgtgccgtcttgctgttttgcaagctgactctttaggttttatattgttgccgccaccgttatgaaatcagatgatgaacacaaatgttgaaacaacctctaatttgtcatcagctgtcaacctatatgtggttgcttgttgattttggttcactcaagaaaacatctgttacttaacggttactaaatcatactgtcttat

SEQ ID NO: 20720 - DNA, 2015 bp, Oryza sativa
  ref <308>: DATABASE ACCESSION NUMBER: AK071026
  ref <309>: DATABASE ENTRY DATE: 2001-12-06
ggtcctcctcgcgaaaaccctaaccctcctcctcctccgccgccgccgctctcccaaggtggcggcgctgcccttcccccttgttcttcttccttgcatctgcttccctcccgttttgcttctaattgtatttctctttcgtttccgcagatccctcccgtcgtcgtcgctgtcggcccctcgggtctttctagcgcaggagacatggcgtaagtttccccccgcaccgaaatctcggcgcccccactcgcttcatagttgatatatttttttctgttggtctggctgctgatggatggcgcctgagaaatgggttgtgctcctagcggttttgcgggatcatgcccttgctgttcgtgttctgtttttttgttttggaattgtgagggtcgcggcttgttttgacgaattgattcaagaacccggcgagtcttcagcttgtctgtaatgttgtgcgattggaaagctgtcatgctcatgtggctcgtattttagcgaaagcgtgagctgccatggatgggattgaaatttatgctttaggaattctttagttatgcctgtaatatagttttgcaagcagatttctggttcatactcagaaaaagaccaaacttctggggacgaatctagacatgtgcttctccgtattcatttccagaagttgtatttttgggacggagggtgtacatggtaatattaagcagatagaacatacggccagatagaaagaaggcttaatgcttgctgaattagtttttgttcgttaagcgagttgttctggctgagtgggggcatattattagttctcctttctacatttgtcctcgaattgttttgttttgcttgaattcggaaaaacctagctttgtgcacgtcattgctaatacagtgggaaattgacttttgcttatgtttactaactattttgagaatgcagcaccatatattgtcaaattacttggaactcaattatctaaagagcatttccagtagaacaaaactaaaaggaaaacgtgttgctaccttgtttactaagattaagcatccatgcagggaagagactccagttgaggccccacctgccccggttcttggagagccgatggacctgatgactgctctgcagcttgtgatgaagaagtcaagcgctcatgatgggctcgtgaaggggctccgtgaggcggccaaggccattgagaagcatgccgctcagctttgcgtgcttgctgaggactgtgaccagcctgattatgtcaagttggtcaaggcactctgcgctgagcacaatgttcacctcgttaccgtgcctagtgctaaaactcttggcgagtgggcaggggtgagatacattactcttctattagctataccttgtcaattgttatactgtgttaatctgatgtctaggctgccggataagattttttgatttagccttctgctaatgactacagttttaccagctcagtgtaaaatgtgctatttaattttgtaatcctttatctaaattttaatttcattttgttgttgatatcgttctgcatctctcctttctgcatatcttctgatttaacaatatcacaacaaacgttgtttgcagctttgcaagattgattctgagggcaaggcgaggaaggtcgtaggctgctcctgcgtcgttgtcaaggtagataattgattacccaccatactacttcaaatatctttttgccatcttcggcatttggtaatgttggcttgttctttctcatttaccaggacttcggtgaagagtcagagggcctcaacatagtccaggactatgtcaagtcccactagatatagcgttcccgatatccagaacttgtgcttgacattgtgtactttcctttatattttgcttggttctgtggcttgctaggagataagaaaatttttgtggtgtgagccaaggggatatgagcaatttggacctctgaactttatgtttactgtgctggatcagctgtttatttatctgaaatcatcatgagctg

SEQ ID NO: 20721 - DNA, 2151 bp, Oryza sativa
  ref <308>: DATABASE ACCESSION NUMBER: AK071027
  ref <309>: DATABASE ENTRY DATE: 2001-12-06
gctcctgatattttcactttcactttgaccaacctaatcttccccttctatcctctcctctcctctccgttgacagccgtcgacccctcctcgccatggacccccgctacctccaggagctcggcgcgctcctcccccgcgcgcgcggtgtcaccctccctcaggtgttcgtcggcggccgccacctcggcggcgccgaggaggtccgccgcctccacgagtccggcgagctccgacgcgttgtagccggcgccggcgcaaccgccctcgccgcctgcagccggtgcggtggcgagcgctacgtgctctgcggcagctgcaacggcagtcacaagcggtacagcctcaaggaagcaacagtacgaggtcgtcttgcccctcccctccttcctcttcccctctcctaatgtttcctcttcttcttttgcatcttgctgataggggctaaggggatggggagaggggttgggatgggctcctggctgttctttgctgatggggcaaaggggatgtagtcttgtggggtggaggtagaggccaaatcttgtgtttgttcagatctgatgacagtgaatggatgtgatgtgagatttagtggctgattagttcgtgatgcagtgcatattctgaaaatagagaataataaaattgtagaatgtagatgcacatgatttttgcttagtgatgtttgtagcgggatttagtattttaaaattcgcttcttcagtggtgattctaatgacagattttgtctgcattggttccacaagaatctttttttcctagaggatgcttgcttatgcttcagctcatgtctttctgtaatcaaataccatatttttgccctaggcctttgtgtatgtatctcagtaattgaagtcttgcatctttggcctgtagggctgggtgtatgtatatcagtattaaagttatgcttctaagctttactactgactgagcagctacatcaagatatgcaaggatccttacagatattttagacaacctggaacaacatcgatccaattctaaagtcgatttggtatattatatttttcttctttgtgtagacatcaaccattggtcgtgaagacatccgagtctcagaggactgcaatatgataggtaaggaaattctgataggatgtaatggaggtcatatcacaattacttctgacaatgatgttgcaggaacgatttaagtgtaatctcttcgtccctttacatttttttccaggttagaaatcataattggtgatgtgcttacactaatgtttccgatattacagttcgtcaataccattacaaatagtagtttgcatagtacaattcttcattgaacaatacctaagatttttgtaaaggtagtgtttatgttatttgtttacatatagctagttagcactagatcattagcatttcactggttcaagccgaggttttctgaaattttttgaagttactctctggttgtcttagtaaattcatctatctaggctatgtctaattgctctctttagcatgaatactattgggtgtctttgtaagaactaatttgtacctttggaacaattaatgtgacctacactgctttagttctaggctcctggcaaaggtaagcactagaaagacataccagaactaagtaacaatgtatacttctttcttaatatcagaacatagtattgatgtatgggattttgatgttgaatttgttttgtgaatcatcagatccttcacctcctgatgctgcagtcatatggacttcattagttgagctaagcaattggcaatttcatggaaaactaggaagcacactatagctaatggtaaaagctggggttacatcatggctgatggcgatagtggcatccattttagagtgatgaagctatcccaggatgaaaaacagacaatgattgatggttattaagtccttttctttttccagactgccggcaatgctgttcgtctaagctttttttctggttgcacggccttttggttgcccatgcttatactggttgaagatagtgctcaatttcatctcagttgtagctgtttctgagatttgtattgttattatttcatatcagattgttgtcatattgattaattgaatgaacatgcatgtcaaatgcatttaaatcc

SEQ ID NO: 20722 - DNA, 1862 bp, Oryza sativa
  ref <308>: DATABASE ACCESSION NUMBER: AK071028
  ref <309>: DATABASE ENTRY DATE: 2001-12-06
gggtggccttttccccttccgctttcgtctggtctcgcctcgtcgcctcgcctcgcctcccctcccaccaccctctctctcttttccctcccttcctccctcccatggcccgccccaagaggacgaagccgccgccgccgtcgcgcaaggcggaggcggcggcggcggcggcgcagcggccgtcgtcttcgtcgtcgtcgccgtcgccgtccctccccgaggcgctgctgctcgcgacggtgtgcatggtcggcctccccgtggaggtgcaggtccgcgacggatccgcgtacgcgggcgtcctccacaccgcctccgtcgaaggcggatacggtgttgtgctaaagaaagcgcgaaagatcgctaacgggaatgataatgccaatattcctctgggagcttttgtagatagtcttgttattcacccagatgatctcgttcaagtcattgcaaaggatttttcactccatacaaaagatgtgtgcagaactcctgtttgtgataccgtcgcagccagtgcatatgtgaagcctcaaacttcacatgtgaatgtgtttccactaaaagaggttaagaagtgcagcacgccaggtgaggagactaacatctccattgggagaagttctcctgcctctccaactggatatgtagggccacgcctctcctgtaacgagataatgagttctgcggttgttggatcaaaagatggaaatactaagagtgcagttttgactacacccacaatgtcttcagatgtgaaaatctctcctccagccacagttgctaaaactgccacgccgagcaaaaccattgctaaggaatccaaactcaacccttgtgctagggtcttctctccttcgtttgcaagttccagaccagtacttgcagctgcaccctctgttaacccaatctacatctcaaactctgtagctggagttccaaccgggttacctgtatttgaaactaactcagtgccaggcggttcatccctgtccagcaaggctgttcattataataacctggctgctgcaaactatgctatttcacctcaatatactcagtcaaccatggggcataatgtgagcaggctggatcctgctagaattggcacaccttatcatcccatgcaagttggacctgcttacattagccctagtcctcagcctgttactggtgggaaatttaatcatgttgtttatgtacacccattttctcaggatgtaatgcatggagcacctgttatgccccaaggatggtctcttcctgcaccattgaactcacatcaagctagcctccagaagttccaaggcacagcccctgtatatgtagccccacctatcatggcaactgggaacctgccattggtggtaccaagccctgcaccgcttgtgcagccattccaggccgttcgtcccatcatggtacctgctgcaagcagcatggttccaggcaaatacatgtaaacttgtcatagcagtgtgatatcagtttttgttggaagaatcttggttttacccctttggccgttggggtttacatctaagaggactcgcagttttgcctaatctgttaattctcttgctagttgctggtctgtgtccgtctttttgttggaaggacttgcaacttttaccattcttaatgctttggcatcatcacgattttccttttttcttttttttttctttttggatcattggggtgggggtggtgggggtgttccatgagagcagttaaatgaaatagagaatattgaagcattttttttgtcatgtcaaataccttttccctttttgaagagtagcatgtactatgtacaatgagacactgtaaaagagttagatagtaaattgattgtttcc

SEQ ID NO: 20723 - DNA, 2015 bp, Oryza sativa
  ref <308>: DATABASE ACCESSION NUMBER: AK071029
  ref <309>: DATABASE ENTRY DATE: 2001-12-06
gttaggagttgcggcacatcaccgccgccgctcctacaccgtccgccatagcgattcccttccatctcgcagccatccaaagtgagtccttcttcgccgtctccgatctggaacttcaccgccgccgccgccgccgcatctcctccttcctctcttggcaactgtcggcggcagccaacggctctcttccccccttgttcctcccgctatcgcgagtcaacgggatgctcgattcgttacattttttttaagtactagtattgctaatttgttggagcaagctaactgcattgatcgctcacgtggtactgcttcgatcttcacaatcacccgataaaaatagttgcgacagagaaaaaaaaaaagaaagtgtgggacggaagggaaaggggggaattcgctataaaagcactcggaattggcctgctcgatgcgccgaggctgactgatctcctgcagttccaagactgaacagcgagatctctgcagatctgggtgcagtgatttgattcgcaggtgtaagcttgattagccattacttgaggagttaggtttcatgtttggataataatcaggcctacttttggtactgtcgtactaaggactgatctggtggtaatggcggagacggtgttgagcatggcaaggtcgctggtggggaatgccatcacgaaggccggagaggcagctgctgcagagataagcttactgattggtgtgaacaaggagatctgctgaagagatggagaaaaaacccaggctgttgaaagcgtgggtggagcaagtaagggatttatcttttgacattgaagattgcctcgctgagtttatggttcacgtggggagcaaaagcttgtcacaacagttgatgaagctcaaacatcgccatcgcattgccatccagattcgtgacctcaaatcaagagttgaagaagtgagcgataggaattcacggtactcattaatcagccctaacaccgatgagcatgacaccttgagggatgaatttcgctactggtcagctaagaacattgatgaggctgaacttgtgggttttgatgatgcaaaggaaagtatacttaatttgatcgatgtccatgctaaccatggtcttgctaaagtgatctttgtagttggcatgggcggtctagggaagacaagtcttgttaaaaaggtttaccatagtattaatattgttaataatttctcatgccgtgcttgggtcactgtgtcacagtcatttgtcaggacagagctcctgagaggactaatcaagcaacttttgggtggtgattcggaaaatgaacacttcaaaggtcttcagagcatgcaaaggaatgagaaagtggaagacctcgtggaagacttgaagcaaggtctaaaagagaaaaggtactttgttgttctagatgacatgtggagcatagatgcattgaattggcttaatgaatctgtttttcctgactctaataatggaggaagtcgcataatagtaaccacgagagatgccagcataattcaaaactgtgcttatccttcttatctgtaccgccttgaacccttaaaaacagatgatgctaaacaattgctgctgagaaaatcaaataaaagttatgaggacataaaagaggcaaggctgagaaggtgtttgataggatactagagagatgtggaggcttaccgctagctcttgttgcgataggagctgtccttcgcacgaaatgcatagaagattgggaaaaactgtctctgcagctatcttcagggctcaaaacaaagtcaagtcttgaagaaatgactagagtaattacacttagttatacacacttgccatctcatctcaagccatgttttctgtaccttagcattttccccgaggattttccaataaaaaggaggtgtatggtaaatagatggatagccgagggttttgtggatgcaaagtttggaatggctatggaggatgttggaaatagttatttcgatgaactcatcaatagaagcatgattcaacc

SEQ ID NO: 20724 - DNA, 2114 bp, Oryza sativa
  ref <308>: DATABASE ACCESSION NUMBER: AK071030
  ref <309>: DATABASE ENTRY DATE: 2001-12-06
gagccaacccaagcgtcagctctggaaagcaacccaccctactcaccctcctcctctccctcactcactccgtggtcgtcgtcctcctcggtctcctcgccccggtccacccccactgacaagtgggcccaccccaccatcccccccggctgcgtccgcggcgagcagcggaggcctccacctcgccggcggcggcatgagcgggttcttggcggtggtggggaaggtcgggaccttcctgctgtggctgctcttcctcgtgctgcagacggccaccaagatcgtcggcagcctcctcgccgcggggccaccaccggctgacgcccaggaagccgcggcggcggcggctgcgcggcgcaggtcgccgccggcgtcgccgcacagcggtggcggtgccacggacccgtaccagcctccgcagctgtgggacccgccgccgccgtcgtctccgtactcggctggccacgcggcggacgaatactcctcgtcctccagctaccggcggcgcggggcgagcgcgccgccggccgaggacgtggtggtttcctccagctactcgcgccccgccgcggcggtggcgtcggctccccaggcttgtaccgtgtcgtcggcgcctccgctgagggcggtcgagacccggtcgccggcaccgtccagggcggcggcggcggttgggggtaagcggccgaagctggagaggaagtattccaagattgtggatcagtaccgctcattggatgaggttattgaagcactagcgcaagctggtcttgagtcttctaatttaataattggaattgatttcacaaagagtaatgaatggacagggaagcgttccttcaatggtatgagcctacatcatattggtgattccccaaatccttatgagcaggcaatcacaattattgggcaaaccttgtcagcttttgatgaggataatttaattccttgctatggttttggagatgcatctacgcacgatcaagatgtgttcgctttctatcctgacgaaagaccatgcaacggttttcaggaggctttggcccgatatagagaaattgttcctcatcttcgtctttccggtcctacatcattctctccaataattgaaatggccacaaccattgttgaacaaagtggtggccagtaccatgtattagtaataatcgctgatggacaggttacacgaagtgtagatactgaatttggccagttaagtactcaggagcagatgactgttgatgctattgtacaagcgagtgaatttcccttgtctataattttggttggagttggagatggtccatgggatatgatgaaggaatttgacgacaacatacctgctaggtcttttgacaatttccagtttgtcaacttcacttcaataatgtcaaagaaaatcagtcagagcaagaaggaaacagaatttgccctttcggcactcatggaaattcctttgcagtacaaggcaacattagagcttggaattttagggcgtcggttcgcgaagtcacctgagcgagttccactgccccctccctttgcaagctataatacaatctcgagagcagcaccatctcgagcaaatagcttccgcagtatgccttctcatcctagggatgaggcacctgtagattcagcaatcacagcatcagttacatccccaccaagcgtggatgctagagcagcagaacctcaactctgcccagtttgcctctccaaaccccgggacatggcttttggttgcggacaccagacatgtgctgaatgtggaccgcaagtcgaacattgccctatctgtcgaaggccaattgatacaagagtaaaactgtactaatttcaccatctgtgatgcataaaaggttttcgtcgaaggccgcatccatggaggactctaataggctgttataggagtgcagtatgtactaatgttgataaaagatagcggtcaaataatcacaataaaacttgtatcctcttctgatgtaggtgtggtgagttaattgttatatttgtcattacaaggagtaacggaataatgtgggacagggagaagtcactttgactccttccagctcttccaaatggtttacccaggaggtattcgaacgctc

SEQ ID NO: 20725 - DNA, 1551 bp, Oryza sativa
  ref <308>: DATABASE ACCESSION NUMBER: AK071031
  ref <309>: DATABASE ENTRY DATE: 2001-12-06
gaagcttgaacgccaagatcgagatcgccggagatgaaggcgccgccgccgccgtcgccggtggccaagagggcgcgcgtctcgccgttcgtcttcctgctcgtgctcttcctcctcctcttctccttcctctacggcgaagacctcaaggagctcctcggcagccaagctcaagcgcggccgagcctccacttcaatgccgccgccgccggtgatgggatcgagctgccggccgccacggcggcgacgaccgaggggaggacgacgacgaggaggtggcgggggcggctgccgttcgcggcgaacggcgacggcgaggaggaggaggaggagtgtgacgtgttctcggggaggtgggtgcgcgacgaggcggcgcggccgctgtaccgggaggcggactgcccctacatcccggcgcagctggcgtgcgaggcgcacgggcggccggagacggcgtaccagcggtggcggtggcagccgcgcggctgcgccctcccggcgttcgacgcggcggcgatgctggacaggctgcgcgggaagcgcgtgatgttcgtcggcgactcgctggggcgcgggcagttcacgtcgctggtgtgcctcctcctcgccgccgtccccgaccccgccgcgaggtcgttcgccacgtcgcccgaccagcagcgctcggtgttcaccgccgcggcgtacaacgccaccgtggagttctactgggcgccgttcctcctccagtccaacgccgacaacgccgccgtccaccgcatctccgaccgcatggtccgccgcggcagcatcggccaccacggccgccactgggagggcgccgacgtcatcgtcttcaacacctacctctggtggtgcaccggcctccagttccgaatcctggaggacgggccgttcgacgccggcggcaactcgtcgacgacgacgtgggtgtcgacggaggaggcgtacgcgatggcgttccgggagatgctgcagtgggcgagggagcacatggacttcgcgacgacgcgagtcttcttcacgagcatgtcgccgacgcacggcaagagccaggactggggcggcggcgaaccggggggcaactgctacggcgagacggagatgatcggcgacgccgcgtactggggctccgacagccggcgcggggtgatgcgggcgatcggcgaggtgctcgacggcgatggcgccgacgtgccggtgtcgttcctgaacgtgacgcagctgtcgctgtaccgcaaggacgcgcacacgtcggtgtacaagaagcagtggacgccgccgacgccggagcagctcgccgaccccaagacctacgccgactgcgtccactggtgcctccccggcctgcaggacacgtggaacgagctcctctacaccaagctcttctacccttgaaaataattaaaaaaacaactagaagcttctagaacaatccatgtaggagtattatgtaatgtatgcatgcaggcatgcagctaggccgcggcatctagctaacatggttcaatatttcggaaagaaaaaaaaaggtaaaaaaatccttccatg

SEQ ID NO: 20726 - DNA, 1759 bp, Oryza sativa
  ref <308>: DATABASE ACCESSION NUMBER: AK071032
  ref <309>: DATABASE ENTRY DATE: 2001-12-06
ggccgccgcctccgtcccgcgcgaccgcctccgcctccgcctccgcctacgcctccgcctacgcctctgccttcccctcgcgccgccgcgtccacctcatcgccgccgccgtcgcttcgtcgtctcccagcgcctcagcctccccattgcgtcgtcgccgccgctgtcgccccgtcgtctcccagcgcctcagcctccccatcgcatcgtcgccgtcggcgagcgcacccatctccgcctccactagcgtcgtcgcctcgcgccgccacttccaccttcgcctccctccgtccctgccgaccgccgtctccggccaccagcgtccggatctggcccccatgtggtcgggggacggggatctgacatcccccgtgcgccgggcagcatctccgcctccgtcaccaccgtcgtcgtcgccgagcgccgccacttccgccaccgcctcgccccgttgctgacgagcccgccgcccctgctgcgtgcttcgccgccgtcgccgacggtcggtgctccaccctccgttgcggctgccatcgaagaaacggcggtggtgacggagccggcgccaaggaaggcagtggttgcgtcgagaagaggaggaccgtacgtcgccaggcggctccggctttctctagaggagtggagttgcagagtgacgtggaagccggtggcacacaggagctagccgacgagcttgacaccgagcagcttgggctggagagcaagattatggccatcaggaacttcttggaaggaccccgaccatgtcctccgtgatcccatttttactttctcgcagaatatgctccaaatatgcaactttcttgacatgaactgtgcatgttttttgtgttttgtctcagcccaaccgccccaacgacgtgctggtgaaatagtgagcttactgcaaaaccggctaaacatgaacatcaccttcaaggagctgcagggtcatccagcctcctccgccggcgagggcgaccagcctgtactgcaggcttggaccgccgtaggggactgcgggcgccatggaggggccgtgctgtccctgtgaccaatggacgatgacagttgcggctgccgcgagtccacgccgactgcgaggcggttaatgtcgatgacatgttcagcctgcgtagggatagccagatcggcaaggatcagtttcatggtactaatgaatacataatgaattgatctacccctccactcaaagcctcaaatcatgtcgctccatacaagtcgaatggccttgacaaggcatcagagatatcggtttgttcggattctgctgatcaaagttttagagtcgaggtctaatatggttgatcacagggccaatcttgtgcagcagtttcatggatgcagagctattggaatttgcaaactaaaacatggaccccaatgaacgtcacgactttaaaagctccacggtaccgactgtgacatattatacccacagatgacgatgaaatttggtggagcttttggtgaagaaaaagcaattggaggacgagaagcagggaatgattccatcgaatgtttgaagcatttgttttggttttctgttttcagatttcttgcaagcaaatttaaccatagcatcacaaatgcctagcccttcgatggaaatttagatgttttagtagtttaaagtgcagctataccttttcattgtatttgatttgcgcaagtaccagaactacctgaacaagtggaactctcattattaggagttttgttgtaattatgcccaaag

SEQ ID NO: 20727 - DNA, 1471 bp, Oryza sativa
  ref <308>: DATABASE ACCESSION NUMBER: AK071033
  ref <309>: DATABASE ENTRY DATE: 2001-12-06
gaggtcaggggcgctagctggccactggcgactcacacagtcacacacacacacactctctcgtccttgctgctagctatctatcgctgcttgccccggcccatgcatgtgagctcacttattatagatcgacaacatctgcggcctcgcgttcggcaaggaccccgagacgctcgcccgcggcctgccggagaacgacttcgcctcggcgttcgaccgcgccaccgaggccactctcaaccgcttcatcttcccggagtgcgtgtggcggttcaagaagtggatggggctcggcatggagaccacgcttgcgcgcagcgtccagcacgtcgaccgctacctctcggcggtcatcaaggcgcgcaagctcgagctcgccgccggcaacggcaagggcgacgcgtcgtcggccacgccgcacgacgacctcctgtcgcgcttcatgcggaaggggacctactccgacgagtcgctgcagcacgtggcgctcaacttcatcctcgccggccgcgacacctcctcggtggcgctctcctggttcttctggctggtctccacccaccccgccgtcgagcgcaagatcgtccgcgagctctgcaccgtcctggccgcgtcgcgcggcgccgacgacccggcattgtggctcgccgcgccgctcaacttcgaggagctcgaccagctcgtctacctcaaagcggcgctctcggagaccctccgcctgtacccctccgtgccggaggactccaagcacgtcgtcgccgacgacgtcctccccgacggcacgttcgtgccggcggggtcgtcggtcacgtactccatctactccgcggggcgcatgaagacggtgtggggcgacgactgcctggagttccggccggagcggtggctgtcggccgacggcacgaagttcgagccgcacgactcgttcaggttcgtggcgttcaacgccgggccacgcatttgcctcgggaaggacctcgcgtacctgcagatgaggaacatcgccggcagcgtgctcctccgccaccgcctggccgtggcgccgggccaccgcgtcgagcagaagatgtcgctcacgctgttcatgaagcacgggctccggatggaggtgcgcccgcgcgacctcgccccgatcgtcgacgagctccgcggcgccggggagtacgccgccgcggcgcgcgccaccgcggcctgcgcttagaagatcccgggcgttggacgaagtcaattggaaatggcaaaaaaatatgtagatagatgagagtccaagatagtaattactaaagggtttgtatggttggtgaggtcatttaaatcacttgcttttacagttcattaccagtcgatagaggaaatgtctaaagaaaactccaaacctaagattcttagatcatgtagtactatgattttggttgtgcagccaccaaaattaaggagcaataattaataattaatctcctgtgtgtaaccc

SEQ ID NO: 20728 - DNA, 1604 bp, Oryza sativa
  ref <308>: DATABASE ACCESSION NUMBER: AK071034
  ref <309>: DATABASE ENTRY DATE: 2001-12-06
tacagtctcactccccctcgccaccgctcctcctccgcctccgactccggcgaccgcgccccgccgccgccgccaacgacaatgaagcagctcaaccgccagcctaccctcagcaagcagcaccgcccgcaccaccaccgcctccccctcccccgctccctcgcctcctacctcctccgcgagcaccgcctcctcttcgtcctcctcggcttcctcctcgcctcctcctgcttcctcatctacccctccttcacccctctctcctcctcctcctcaccccgcgacaccgtcgccgccagaatccgtcgtggcggcggcggcggcggtggcgcgtcgtccgtcgtcgtctccgccgccgccgccgcctcgcgccgcctccccgtcggcgtccgcaagccacccctccgcgtcgtcgtcacggggggagcgggcttcgtcggcagccacctcgtcgacgagctgcttgcccgcggggacagcgtcatcgtcgtcgacaacttcttcacggggcgcaaggagaacgtcgcgcgccacctcgccgacccgcggttcgagctcatccgccacgacgtcgtcgagcccatcctcctcgaggtcgaccagatctaccacctcgcctgcccggcatcccccgtccactacaaattcaaccccatcaagaccatcaagacaaatgtgatggggaccttgaacatgctgggattggcaaagagggtgggagcccggttcttattgaccagtaccagtgaggtgtacggtgatcctcttgaacatccacagaaggagagctactggggccatgtaaatcccataggcgttaggagttgttacgacgagggcaagagaacagctgagactctgaccatggattaccatcgaggtgccggtgttgaggtgagaattgcgcgaatattcaacacatatggccctcgtatgtgtttagatgatgggcgtgttgttagcaacttcgtcgctcagacattgcggaaacagccaatgacagtttatggtgatggaaagcagactagaagttttcaatatgtttcagatttggttgatggattgataaccctgatggaaagtgagcatataggacctttcaacttgggaaatcctggagaatttaccatgttagagcttgctcaggtagtgaaagagacaattgacccaagtgctcgtgttgagttcaaacccaatactgcagatgatccacacatgagaaaaccagacatctcgaaggccaaatctcttctccattgggagccaaaaatctcactgaagcaaggcctgccacgtatggtttcagacttccagaagcgcatcatggatgagaaaagataaacaagaagaaacgaatgaactcacacctgtactatactccccggatcatttccagtaccttgacaagcttagctgcagaagtacaacagagaaattgcccaaagtttcttcttcgaggcaatcctttttgtgacaggaaatctcttgtttggttttgacttctttgatacatatgttttgtcacagaattttgtcatcgaaagcttagcctttcagacaacagtactactagaattttacataaacatagagacttttcatgg

SEQ ID NO: 20729 - DNA, 606 bp, Oryza sativa
  ref <308>: DATABASE ACCESSION NUMBER: AK071035
  ref <309>: DATABASE ENTRY DATE: 2001-12-06
gggacgacgtgcggccgggaagcgagcgagcgagcggagaccccctctcggctcgcccatggagttcggcagcggcggacgcgacgcccgcgcgcggcggcagctgcaggcggccgggcgcgccgcggcgtacctcggcggcggcttcctcctcctctccgccgcgtcctccgccgccgtccgctccctccgctccctctccgacgccaaccagaggaaattcgcggcgccgtgtggcgcctgcgaggggaaggggacctacgcgtgcaggctctgcaggggcagctcgacgatcgagtggtctccgctccacgacccggtgttcgtcaacccgtgcctctgccctacctgtgacgggactagggtgcagcgctgcttgaactgccttggaaaaggctacgcttgaaggggcaatgcgtccttgcgtttggcttatcgttggccactgggatttccgcacggtgattgaattggatggtttgtgtcgaggaattaggcctttttaggggaagttgagaaattaggcttgtaaggaggaatttctggccaaaaactaaaaccaaagaccaacgtgtataataaaatgtgactttgattttccctacc

SEQ ID NO: 20730 - DNA, 1672 bp, Oryza sativa
  ref <308>: DATABASE ACCESSION NUMBER: AK071036
  ref <309>: DATABASE ENTRY DATE: 2001-12-06
ggccatcctcgagcactccgccgccgccgccgccgccgcctcgacgcatccgcttccccccacgcgagccgaagcttctagaaccttcgaggccgcggctcccacgggcggcaatgcagagcgcggcggccgtcgggctcctccggccatgcggcgccaccaccgccgccgccccgctccagctccgcaaccctagcccccggggcttcggcgtcggagtcgggcagccgctgctcccgccgagggggctccgcctctccgccgtggccccgcgcgcgggcatctccgcccggcgcatcgggctcgtgccggcctccccggagcaggaggatgagcggcggcggggcgcacgcgacgtggccgtggcggcgacagcggcggcggcgggtgaggcaggggcggaggagggtggagggctcgcgaagacgctgcagctcggcgcgctcttcgggctgtggtacctcttcaacatctacttcaacatctacaacaagcaggttttgaaggtttttccataccccataaacatcacaaatgtccagtttgctgtcggcactgtcattgctctgttcatgtggattaccggtatccttaaaagaccaaagatctccggtgcgcagcttgctgctatccttcctctcgctatggtccacaccatgggcaatcttttcacgaacatgagccttggaaaggttgcagtgtcatttacacatactatcaaggctatggagcctttcttttcagttctgctttcagcacttttcctcggagagatgcctactccttttgttgtattgtctcttgttccaattgttggtggtgtggcattggcatctcttactgaagcttcatttaactgggctggattttggagtgcaatggcctcaaatgtcaccttccagtcaaggaatgtgttgagcaagaagcttatggtgaagaaggaggaatctctggacaacattaccctcttctcaatcattacagtgatgtcattcttcctcttggccccagtaaccttgctaacagagggtgtcaaagtcactccgacagttctgcagtctgctggtctgaacttaaaacagatatacacaaggtcactgattgctgcgttctgtttccatgcataccaacaggtgtcgtacatgatcctggcaagagtgtcccctgttactcactcggtgggtaactgtgtcaagcgagtggtggtcattgtgacatccgttctgttcttccgcacccctgtttcgcctatcaactctctgggaaccggagtcgctcttgccggagttttcctgtactcacaattgaagcggcttaaacccaagcccaagactgcctgattgtgtcttggtatctatcgtgaagaaccgtagaagcattgccacacgccatcggaatgagtgccttagcttagaatgatccttggagaagctccatccagtgaactgatgctgctgtgtgtatcgtttgtagttgagttactagcgtgctaatcgtggcaaggtttttgtgtcttctttaccaccttatgcttgaacagtcaattattttgttgtatcaataaatttcgtgcaatataacgttatattatctctgtttctttatggaagtattactatccttgtattataaattaaaaagtaaatttcataaaactatagatatcttgatc

SEQ ID NO: 20731 - DNA, 1118 bp, Oryza sativa
  ref <308>: DATABASE ACCESSION NUMBER: AK071037
  ref <309>: DATABASE ENTRY DATE: 2001-12-06
gacccgcgccgcgccccacccaagacgagagcgagcgaggcagtgccgccgccgccgccactgacgccgcccgagcaccaccggagcaggagcagcgtcagccatggccgtcggcaagaacaagcggatctcgaaggggaagaagggatccaagaagaagaccgtcgatccttttgcgaagaaggattggtatgatatcaaggccccgtcggtgttcaacgtgagaaacgtcgggaagacgctcgtgtccaggacacagggcacaaagattgcttcagagggcctcaagcaccgtgtgtttgaggtctccttggctgatcttcagaacgatgaggatcaggcgtaccgtaagatcagactacgtgccgaggatgtgcaggggaaaaatgttcttacaaacttctggggcatgagtttcacgaccgacaagctcagatcattggtcaagaaatggcagacgctaatagaggctcatgtggatgtagagaccactgataactacatgctgcgtctcttctgcgttggcttcaccaagaggaggccaaatcaagtcaaacggacatgctatgctcaagcaagccagattcgacagatccgtcgcaagatggtggagaccatggtgaaccaggcatcatcctgtgatctcaaggagctggtgtcaaaattcattcctgaggtgattgggaaggaaatcgagaaggccacatcaagcatcttcccgcttcagaatgtgtttgtgcgcaaagtcaagatcctcaaggccccaaaatttgacctgggcaagcttatggaggttcatggagattaaaggaggacgttgggacgaagctcgagaggcctgcagaagatgaggtcgtggtaggacaggaggtcactgccgagtagattttcacttattttactgctattttattcagacaatatatatatgtatcgcctatcaaggttttgatcacgagcagcaggctcggtttttgtggctaatttcctgaatactttcttgagattactagccagcatcgtttttgttttctggatggaagtttatttgtctaaagtttgtgctttcttttttttgcaacctgacaagtcaagactgataaagaagaaagttcttt

SEQ ID NO: 20732 - DNA, 1588 bp, Oryza sativa
  ref <308>: DATABASE ACCESSION NUMBER: AK071038
  ref <309>: DATABASE ENTRY DATE: 2001-12-06
ggacagccatagccactcgctgcgcctcctcctcatcgcctcgccgtcgccggagaagacaaccatgaccaccatcgccgcgcggatgccgtttgcgggcccacgcctcaggcctccctgcaacctcaccgcctcgaggccgggtcccaggagggccgggctggccgtcgtctccgccgccgccggtggcccgcttcccaccgtgctcgtcaccggcgcaggcggccgaacaggccagattgtgtacaagaagctcaaggagagggcagaccaatttgtggggagagggctagtcaggactgaagagagcaaagccaagattgggggcgctgccgacgtgttcgtcggggacataagagatcccgcgagcattgctcctgccattgacggcatcgacgcgcttatcatcctcaccagtgcggttccgaaaatgaagcctgggtttgatcccagcaaggggggacgcccagagttctactttgaggatggctcttatcctgagcaggtggattggattggccagaggaatcaaatagatgctgccaagagcattggtgtaaaacaggtggttttggttggatccatgggcggcacagatgtcaatcacccactaaataagttaggaaatgcaaatatactggtttggaagaggaaggcggagcagtacctagcagactcaggtctaccatatacaattataagggctggaggattacaggataaagatggtggtgtgcgggagttgcttgttgggaaggatgatgagatcttgaagacagaaacaaaaactattaccagagcagatgttgcagaagtttgtttacaggccttgctatttgaggaggcaaggtttaaggcatttgatctggcatcaaaacctgaaggtgaaggagtacctacaactgatttcagggctcttttttcgcaagttaatagtcgcttctaagaagtataatctgtcaacgaggcacaatatttgtgatggaataatatgaagtgtgtattgagtgaggaggctcctgatggaagagctcaagaacattgttgtctgctaattatggaaaacaggcaagtagttaaagtagacaaacgcgcaccttacttatcagcagttccaattcagcaacaacatcatatataggttccttgagacacagaagtgaaggaagaggggcatgggccatgttcatttcagattatatagagatcatgttgtccccatgaaatgaagggttcagattgctccaccgttttttggggggatattcttgatgcaatataaaaaaaggcgaatattagggatggcttgatgatctaaggctcccgtacatgttttttgcgagaaagtagctagcgagcccagctagaaacaatccttcttcttaagataatgagctaggaacatccttttatttgtccatctgtagttaactacaatgccttggcatcaagaatctccaatcaagaacacgttcacactatattgtgtctagcagcagctagcatcattatcctaaaaaaatttagctacatacataaacatttaaaagagtaaagtgtattgctggcacttaaatttgttcgtctt

SEQ ID NO: 20733 - DNA, 1728 bp, Oryza sativa
  ref <308>: DATABASE ACCESSION NUMBER: AK071039
  ref <309>: DATABASE ENTRY DATE: 2001-12-06
gccgtaggtactcgtactactccaattctttctctcgcctacgccttcctcccaatcttgttgtttcggcggcggcggcggcggcggcggtgagggagatggcggcggagaggaaggacgtgggcattctcgccatggacatctacttcccgcccacctgcgtgctccaggacgagctggagaatcatgatggcgtgagcaaagggaagtacaccattgggcttggacaggatagcatggccttttgcactgaagtggaagatgttatttccatgagcttgacagtagtgaagtcactcctggaaaactataagattgatccaaaatgtattggacgtttggaagttggcagtgaaacagtaatagacaagagcaagtctataaaaacatggctgatgcaaatatttgaggaatgcggtaatactgacattgaaggagttgactcctcaaatgcatgctacggtggaacagctgctttatttaattgtgttaattgggtcgagagcaactcatgggatggacgttatgggcttgttgtttgcacagacagcgcggtttacgctgaaggtccggctcgtccaaccggtggtgcagctgctattgcaatgttgattggaccaaatgctccagtttctttcgaaagcaagtatagaggatctcatatggcacatgtctatgacttttacaagcctgatcttgctagtgaatacccggtggtcgatggaaagctatcacagacatgctatctcatggcattagattcctgctacaatgtcttctgcaaaaagtatgaaaagcttgagggaaagcaattttctattcatgatgcagactattttgtatttcactccccatacaacaagcttgtgcagaagagctttgcacgcctatactacaacgattttctgagaaaatgcagcacggtggaagatggatcaagagaaaaactggagccttattcaggtttgtcatccgaggaaagctaccagagtagagaacttgaaaaggtttctcagcaagttgcgaagcacctctatgattcaaaggttcaaccaactacattaatcccgaaacaagtcgggaatatgtacacagcgtctctatatgctgctttggcatcagtgatgcataacaaaaatgaaactctggcaggccaaaggattgtcatgttctcatacggcagtggcttgacatcaacaatgttctctttcaagatcaatgaaggccagcatccattcatcctatcaaacattgcaggcatactggatgtctccaagaaactggagtccaggcatgtggttgcgccggagaagttcgtggcggcgctgaagctgatggagcaccggtacggcgccaaggatttcacgacgagccaggacacgagcctgctcgctccaggcacctactacctcacccacgtcgactccatgtacaggaggttctacgccgtcaaaggtcaagccgtcaccgaagtgtccaatggccattgaaaaaattgtgttgtgatgtgtggttcattcaacctgaagctgcaataagccaacggcatagagggttcagggcgtgggtgtaccaagttttctgatgaaagcttgtaaagggtgctaggttagagctgttggattagttggttcgctattcgctagtaaggcttacttggtgaaatggtatctccacttcgttaatgttcttcagtggaacacacggtagcgagctgtaagaattctt

SEQ ID NO: 20734 - DNA, 2195 bp, Oryza sativa
  ref <308>: DATABASE ACCESSION NUMBER: AK071040
  ref <309>: DATABASE ENTRY DATE: 2001-12-06
ggaagctccagtcacggcggacgccgccgctgcgacggagacgaggaggagggccgccgcctttacattccatcagctgcgacgccgacgcctcctccaccgtcgatttgcacttgcgcacctgcttctgctgctgcagcatcggctgcttcttcttcttttcgtcgtcgtcgtcgtggttgctgttgctggacgacgacgtgggcgtcatgggcgccggtggtggtggatcgagcagcagcaatgcggattggggcgtcctgaccggggcgtagcgcggctgcgcgaggagtccgtcagcggtgacacctcgtttcagggcggtgcagcaggtggccgtctgcggctgacgccgcccatcgtactcgtcttcttccacgccacctcgttgccgttgcctggtcaccaggttgcacgtcaggtggttgctgttgggctttgatggtgttgggcgcctcttcatcatcaacaggcaggtgcttgggttcaggacaacaaaccaccaccaccaccgaggaggcagctgcagcgtccttcttcttcccccacagcagaaggtacagacctaggatcatcaacactgatcctagcacgctgccatatatcatcatatatgcaaggatgaaatcaattaattatatatcatgcatgcatatacatatatatatatatatcgtcgtcaatgcatagtactatatacatatatacctgccgaggtggagctgctcatggaggaagaagaagtcgatgaaggcaaccatgatctggatgaccgggatgaaggctgccgtgaacacagggcccctcttccccacacaccatgtcattatcaggtaccctactccagacgccatcaccccctgcatgcatgcgcccccacacaattaattcatctgtatatatgtgcatggtgatagatgtactattagcaaggcatatgtaattaattgattaattaccgagtagatgacagtgacgatctccactttgttggtgagagtccaggcggaggctgtgagcctctcggtggccagtgtgagcgccccaccctgcagcgtgctgatgaagaacatgatggccgtgcaggagtagatcgccgggtatttcttggtcagcttcccctgcagcagcagccacagcgagaagcacaggcagttccccagcagcatcaccgtccccagcgtccattgcttattgttcttcaccatcactgacccaccatgtcctcctcctgcagaagcatccatggcagcagcagctgatgggtggtttgtgagtgccacgcccttgtagaggctcagcaacagcacacctgccatggacgtgagcgtaccaaggaccttggcacctcctgccatgctcttcatgttgagggattccacccctagcgcaatggcgatgaggaaggtgagcacaggagacaagttggcgaatgttatcgcgtacgtcgccgtcgtgtactgcaacccgtagaagaagctgtactgcgacagaccagcactgcatatacatatagccatacatccctagctctgaattattatcactttaatttaattaccatacttcatcaacaaattaataaactattgcatgcatttgaacttagaattgaaagaacaaacacagtagatgattacccaagcaatgcactgaagaagaggtatacaaatatctcccatgtcatcttaggccttgtgttcctgcctcaattaattaaacatactcctattagtacaataatgaattaattctctgagagaggaacatgcaattaattgttcatgtatatatataccgttctttgaaataggcaatcggagataggaagagagtggccaccagctgccggagtgtgatgaggacaaggcgattcagaccttgttccagcgccttcttcactagcgctgtcatcaccgcagagatgaggtcgaacaccagcattgtcatcaccgtcctacactcctcagcctgcaacatcatcctagctagcctgttagtgtttagcagctagctacttctctaattaacgatatatgtgattctctcaagtctcaacaatatatgtatgtatgtaatgtgctagcttcttgctgtaagacagtaaacacactctgctcatggactatatatacccacacacacgcatgctgctgcatagatagccctgtccctccacttattgatattcctcc

SEQ ID NO: 20735 - DNA, 1575 bp, Oryza sativa
  ref <308>: DATABASE ACCESSION NUMBER: AK071041
  ref <309>: DATABASE ENTRY DATE: 2001-12-06
gcttcccaaatcccaaccctcgttccattccatcccacccccccgccactaccatccaagggcgcgccgaggcgccatggacgacgacatcgacagcagctgctccaccccattcgccagcgcgccgtccagccccggcaggtcgcctgccaccggcggcggctacttcttcagcgcgccggccagccccatccaccacctgctcctctcctcctcctcggttgcctccggtgtggtgtcgggggcggggtatggcggcgtgggcgatgcggagttcgagttcggcggccccggcgggcccatgatctccgccgacgagctcttccacaacggccagatccggccgctcaccctgcccccgctcccggatctcgaccccggcagcgacgacgacgacggcggcggcggcgacttccgccccgggccggtgcgaggccgcgagctgacgctgcggagcgggtccgtgcaccgccgcacgcggtccatgtcgccgctccgcggcgcgtccccgcggctcaagctgctcaatgcgctcgtccccgccccggatcttggctccgagccaactccatcgcactcggctgggtcggaggaggccacgccaccggtcaccgcctcgtcacgctcgtcctcctcctcctcgacgtcctcgtcctcgtcctcctcgtcgtccgcccgcgggtcacggcggtgggtgttcctcaaggacatgctcctccaccgcagcaagagcgagccaggcggagcccacgcgcacgacgcccccgccaagcccgagaaggcgtggcagttctcgccctcgtgggcatcatcgagagacaggatcgccgcaaagctccgcgcggcgaggtcaccactaccaccacagccacaatcggaagcgtcgtcagacgccggcggcggcgaagaggcgcaggcgacgcgggggcgcgcgaggggcggcaagggcaggcggcgctcgagcacggtcgcggcggcgcacgagcgtctctacgcggcgcggaaccgggcgcaggcggaggagatgcggcggcgcacgttcctcccctaccggcagggcctcctcggctgcctcggcttcagctcccgcggttacggcgcgctccacggcttcacaaaaaccctcaaccccgtcttctcccggtaaaaaccaaaggcaaacgcctcatcggccaaaaaaactccaaaatagagagcaaatgggaagagcttaaccaagttcttcgctgttgcccgttaattaattaatattattatttcctgtgtaagcgaagcttgtactactttgtttttttttcttttcctttttctgccttcgatttgtgcttgggttttgtataggcaggcagcgtgagagggataacaggattcctcccttcgttcggaggcgttggtggtagtagtagttgtcacaggtcagtcacatcaactggaaacatcagcggttggtaaatgtggcgcgaagcagaatgcctggtgatttttttccccttcccctacccattcttgtgtgcatggaactatcatctcaaccctgtactactcgtagtaagtggagtatatacacgttctact

SEQ ID NO: 20736 - DNA, 1626 bp, Oryza sativa
  ref <308>: DATABASE ACCESSION NUMBER: AK071042
  ref <309>: DATABASE ENTRY DATE: 2001-12-06
tagtagtccagtacgatcacaagtccgacctaaactgctaaacaaatcttgcgcaccgcttattgccgccgcggcgcatcccccatcccccatcccctctgcactctcccctctccccacagcgagacgccaaaaccctagtccgttctttctccacggaggcgaggatggcgtcgctgctgatcgccagcacggggggcgcccaccgcctcgcgtggaaggacgccgccgccctgggacccgctccgcggctggcgcgaccttggcccgccgccgtggctgcaccggcgccgctgctcaggattagcagaggaaagtttgcattgcaggccatcacccttgatgattatcttccaatgcgaagtactgaagtgaaaaatcggacatcaacagctgatatcactagtctcagagtaattacagcggtcaaaaccccatatctgcctgatggaagatttgatcttgaagcatatgattcactgataaatatgcagatagatggtggtgctgaaggtgtaatagttggaggaacaacaggagagggccaccttatgagctgggatgaacacatcatgcttattggacatactgttaactgctttggtgctaaagttaaagtggtaggcaacacaggtagtaactcaacaagagaggctattcatgcaacagagcagggatttgctgtaggtatgcatgcggctctccatatcaatccttactatgggaagacctctatcgaagggttgatatctcattttgaggctgtcctcccaatgggtccaaccattatttacaatgttccatctaggactggccaggatattcctcctgcagttattgaggctgtttcaagtttcacaaacttggcaggtgtgaaagaatgtgttggacatgagagggttaagtgctacactgacaaaggtataaccatatggagtggtaatgatgatgaatgccatgattctaggtggaaatatggtgccactggagttatttctgtggctagcaaccttattcctggtctcatgcacgatctcatgtatgaaggggagaataagacgctaaatgagaagctctttcccctgatgaaatggttgttttgccagccaaatccaattgctctcaacactgccctggctcagcttggagtggtaaggcctgttttcagattaccatatgtacctcttcctcttgaaaagagggtagagtttgtccgaatcgttgaatctattggacgggaaaactttgtgggtgagaacgaggcacgggttcttgacgacgatgattttgtgttggtcagtaggtactaataagtgaattatgcaagtcccatgtacgttgatgaacatcgtttagttacattatgatagtttgcagtcttccttgtagacatttcagcactttttgatcacgcttgatcggttatcagtgtaatgggaatcgtaatcgggcttatttgtaccttaaatgataggtatattgagaataagctaagagatcatgtacattatccttattcggaaatgccctatacccttgtaccatttgtatatgcacccgtttctggttgtgataagggtgtcgcctaccggcggttactgcgtggtaattgagtttattgtgggg

SEQ ID NO: 20737 - DNA, 999 bp, Oryza sativa
  ref <308>: DATABASE ACCESSION NUMBER: AK071043
  ref <309>: DATABASE ENTRY DATE: 2001-12-06
ggcgagcccacccaaaacccaaaaccctactgcgcccatggcttcgccgccgccgccgccgccgcagccacctagcccctccgccgccacggcgggggcggcagcggcgccggtggacgcgctgttcctccagaacctgatgagccgggtccagctccgcccgcccttcctcgacaccaactccttcctcacccaggacctcgacgagttcctcctcaacgagttcgccgcgctgtcggccgccgcgggggcctccgacgatgacgacgacggcgaggatggggaaggggagggatccgatggggaggtggtctccggggaggcgaggcggcggcggacgctggcgagggaggaggccaagctggagaaggagatcgtgcggctcgtgctcgccggggaggcggaggaggcgctcaagcccaactccggccagtccgtcgccgtcggcgaccaccacatctgcgtcggcttccacgacgattccggcggtgtgtaccgcgtctgggagtggcacggccacgtcatgatcttcgacgacgaggatggctattccgcggagtacatctacggcaaccacttcgagcccctcgccgccgccaccgccagggcgaaggagaaggagagggagaagagggagaaggagctcagctcgggcctccgcgatttgatcctgggcgacactggcagcggcgccaatggctccaaggagaatggcaagggtggggcacccagggtggtgcgcaggaacgtcgtcaatgcccctgcggcgcctgcgaggtaataaaactcctctttagctctagcgcgtgtattgatggaagcgaggcatcaatccgagaaacagaagcaaaataatgatttgatctttccttttcttctgtagttgccgctgagggcggtttcttttgttctgatcagaaatgctatatactttgcttctgttatgatacacagtgtacccaactgggttttgagatgggagtatttgttccatatact

SEQ ID NO: 20738 - DNA, 1809 bp, Oryza sativa
  ref <308>: DATABASE ACCESSION NUMBER: AK071044
  ref <309>: DATABASE ENTRY DATE: 2001-12-06
gtgagcgacagcgagcctgtctcttaaaaaaaataaaattagtcccctccacgcgccgcgtgttcctcgtcctctggttgccaggacagagcacggggcccggcggcgatggcgctcggcgacggggacgacggcgcggccgccgccgccgttcctctcatctcggatcgccccaagcatgccgccatcgtcagaagcgggacggagtggacggcggcggcgcacgtgatcacggcggtgatcgggtccggggtgctgtcgctggcgtggagcgtggcgcagctggggtggctggcggggccggggatgatgctcgtgttcgcggccgtgacggcgctgcagtcggcgctgttcgccgactgctaccgctcgccggacccggaggtcggcccgcaccgcaaccgcacctacgccaacgccgtcgagcgcaacctaggtagctcgagcgcgtgggtctgcttgttgctgcagcaaacggccttgttcggctacggcatcgcctacaccatcaccgcctccatcagttgcagggcgatcctgaggtccaactgctaccacacgcacggccacgacgcgccctgcaaatacgggggtagctactacatgctcatgttcggcgcggcgcagctgttcctctccttcataccggacttccacgacatggcgtggctgtcggtcctcgccgcggtcatgtcgttctcctactcgttcatcggcctcggcctcggcctcgccaacacaattgctaatggaacgatcaaaggaagcataacaggtgctccaacgagaacccctgtgcagaaggtctggcacgtctcgcaggccatcggcgacatcgcattcgcgtacccgtactcattaatcctcttggaaattcaggacacactgaaggctccaccggccgagaacaagacgatgaagaaggcgtccatcatctcgatcgtcgtcaccaccttcttctacctctgctgcggctgcttcggctacgccgccttcgggagcgacgcccctggcaacctcctcaccggcttcggcttctacgagccctactggctcatcgacttcgccaacgcctgcatcatcctccacctgctcggcggctaccaggtgtacagccagccgatataccagttcgcggacaggttcttcgcggagaggtacccggcgagccggttcgtgaacgacttccacacggtgaagctgccgctgctgccgccgtgtcgggtgaacctcctgcgggtgtgcttccggacggtgtacgtggcgagcaccacggcggtggcgctcgccttcccctacttcaacgaggtgctcgcgctgctcggcgccctcaacttctggccgctcgccatctacttccccgtggagatgtacttcatccagcgccatgtcccgcggtggtcgccccggtgggtcgtgctgcagtcgttcagcgtcctctgcctcctcgtcagcgccttcgcgctcgtcggctccatccagggcctcatcagccagaagctaggctaaagatttagcctagcatcctgaatttcggatttgctttttctttgtgtaaccgtaatgggatgagaatgcatttggtggtcgtgtgttgtttgtaacaactggggagcggagctttgtccctggtgaatggcgcgatgaactcatgaacaatagcatagtggtggtggtacattgtgtctgcaggggtcagagggtggtggcactctgtttttcagtgcctttcctcctgtgctgcagagaaactgctcctatatatgtacagaatgtcgtcatattattgccatgatacttggaacggtg

SEQ ID NO: 20739 - DNA, 1702 bp, Oryza sativa
  ref <308>: DATABASE ACCESSION NUMBER: AK071045
  ref <309>: DATABASE ENTRY DATE: 2001-12-06
gatcggagctagagtcccagctctcgcagctgcaagacgagctcaagaaagccaaggagcagctgctctccaccgagcactccaagcggcgcgccctgcaggaggccgaggacgccagggcgcaggcggcggcggcgtccgcgcaggtcagggactccgaggcgcagctcgccgagctctcctccgccgaggagagccgcctcctcgagcttcgccggctgtcccaggagcgcgaccgctcgtggcagtcggagctcgaggccatgcagaagcagcacgccgccgactcggccgcgctcgtcgcggccatgggcgaggtgcaccgcctccgcgtgcagctggccgcggcggcgcgcgccgaccgcaagcaggacgtggtggaggcgatggccaccatcgacgagctcagggtgaagctcaaggcgagcgaggaggccgaggcgcaggcgcgcgccttgcacgaggagtgcaagcagcagctggagacgagccgtgccaccatcgactcgctgctcacggacggctccaagctcatggactccttcagcctcgtggtcaaggagctcgaggagtcacgagccaaggtgaaggcactcgaggaggagatcgcggagacgtcggcggcaaaggccggcgagcgttgcaactgctcggcgtcggcgtcggcatcggaggtcgctgagctgaggtcggaattggagtccacggaggccaggttccaagaagagcgcatcctgagcacagtggagacgcagtgcgcctacgagctcatggaccagataaaaatggagtccgactcgcggcacggcaagctcgccgcggcgctcgagagcaccaagtccgaggtcatcttcctcaaggcgagcctcttcgacaaggactccgagctgcggcgcgccctggacgcgaacgagaagctccaatccgagacgagaacggacaacgagctgaaggagcagctgcagggcgcgctcctggagaacgggcagctgaagcgcgagctgcagcagcacacctccgagaagaaggcctcggcgaaggcgacggacgccgccgacgcggcggcggaggcggcgaagaagggggagatggaggccgagctgaggcgtctgcgggtgcaggccgagcagtggaggaaggccgccgagaccgccatggcgctgctcacggtgggcaagggcggcaacgggaaggtggtggaccggagcgagtcgcttgaaggaggcggcggcggcggcggcaagtacgccggcctgtgggacgagctcgacgacgacgcggcggccaggaagaacggcaacgtgctcaggcggatcagcggcatgtggaagaaatgaggctgatcagaatcaaactgcgcgcgctatgcgctagggaatttgctcatcttttcccgtgttgtagtaaattctttttgccggttgctttggtacaaaaggaaaaaggagaaaaacataggagtgtgcttgtactggttgggggtaaacgtgctcatagctgtatcatacgtggtatatgaagggttaattcatccgggcgtgacagattggattaggctttttgttagttttcgtcagttctgattctctcagattcaccgatgagagctgtttgtatgtaaccttttgttcttcaatcggcgtgattcaaacatttcggcccatttctcagtcctgggcccttttctgtcttgggccagccc

SEQ ID NO: 20740 - DNA, 1135 bp, Oryza sativa
  ref <308>: DATABASE ACCESSION NUMBER: AK071046
  ref <309>: DATABASE ENTRY DATE: 2001-12-06
gatcatctcatctcacaccaaaaacgaatcagctcgtctccttcctccgcctccgcctccgcgagctcccattccattcccggattgcgccgccgccggtgttgcagcagccatggggatggggccactagagaacgccgtggtggacgcggcggcggaggccgtggcggcgaaggccgcggtcggcggcgtgggcgtggggggttcgtacgcggtgctgcagtgcggggaggactcggagtacgtgaggaaggcgtacgggggctacttcgaggtgttcagggcgctgctggcggaggacggcgagcggtggcgggtgtaccgcgccgtgcgcggggagctccccggggaggaggaggccgcggggatcgacgggttcgtcatctccgggagctgcagcgacgcccacgccgacgacccgtggatcgtcgccctcgtcgacctcatccgccgccagaacgccgccggcaagcgcatcctcggcgtctgcttcggccaccaggtcctgtgccgagcgctgggcggcaagacgggccgatcgaagaagggctgggacatcggcgtgaactgcatccaccccaccgcggccatggcgaggctcttttcgccgatcaagctccccgtccacatgcccatcatcgagttccaccaagatgaggtgtgggagctgcctcctcaggccgaggtgctggcgcggtcggacatgaccggcgtcgagatgttccgtctcggcgaccgcgccatgggcgtccagggccacccggagtacagcaaggacatcctcatgagcatcgccgaccgtctcctccggaacgatctcatcctggatcaccaggtggataaggcgaaggcgagcttcgacttgcggcaaccagacaaggatctgtggaagaaggtgtgcaggggttttctgaaggggaggcttcagtcatcgcagcagccgcagcagcagcaacatcagaagcagcagaaggcggcgcagctggagctatagtaaacaagattagtgagtgagatcagatgggggcattggggagcctagattaatccttattttctgcttcagatttgtacaggaaaaaaactatttattcggagcaataataagagagtaattgggggtggcctaattagc

SEQ ID NO: 20741 - DNA, 1859 bp, Oryza sativa
  ref <308>: DATABASE ACCESSION NUMBER: AK071047
  ref <309>: DATABASE ENTRY DATE: 2001-12-06
cctctcctcttctccgacgaaaccccaatccccaactccgacgcttcctccgccccggcgatcgccgccacccgaatccccccgcgaccgcctccgattgattcgatccggtgatcttgtgttgttgccacatgattgttgtctctaaatgattctatgggggccccgaatgaagtgacatcgtactcttccctctccaaaatcgatagcaacaaccagggaggtcatctatctagtctagttccagcaaacatttacccagcgcagggttatctctatgaaccgtccctggagccagatttcccatcggagtacgattctagagaagatccatttgttccaacacgagctagttcaaatatcaatttgaagactgtcctaactgggctggctgctattgtttcgggcacaaataagaaccaggataatacactgcagcagcaaagtttcagcacggatgtctcatttctaggatttgacaaggatggtgatgttaatgtacatccatctgtatgcgttcctagtgcgccaccactacttgaaacaaatgctttacaatacagtgcatacagggaggtgctacaggcagatcctccagaatggttaccagatagctctaccagtgtgtgcctgcaatgcagtttgcctttcacagctctgactcgtggaaggcaccattgccggttctgtggaggtattttctgtaaagattgttccaagggaagatgcttgatgcccatgaagttcaggcagcgtgatcctcagagagtgtgtgatgcttgctacgataggctcgatccacttcagggaatattgatcaattacaatagcaatgccatgcagccagcaaaacatgatgttatggattggacaagcacaagaagctggttgaacttgcctgttggtttatcaatggagtatgagatatacaaggcaacaaatacactaaatagatattgccaggttgctagattaaaccctgagaagtccatcccatcatctattctaaagggagctaaggggcttgctgtgataacagttgccaaggcgggtgcagttcttacatacaaagttggcactggccttgtagttgcccgaagatcagatggatcatggtctgccccatcagcaattgcatctgttggcctgggatggggagttcagtttggtggcgaactgacagattttataattgtacttcatgatcgtaaggctgtcaaggcattcagcagtcgcatgcatctttctcttggggcaggattaagtgcagcagcaggaccaattggcagggcctttgaagcagatgttagggccagggaaaaaggttctgggctctgctacacttacagctgcagcaaaggtgcctttgttggggtctcattggaaggaaatgtcgtgacaaccagatcagagaccaatctacgcttctatggcgatgcttacttgaccacaactgatatcctgtttgggaaggtggagaaacccagagccgcccagcccctgtactcagctctagatgatctattctctaaaatggtttactagttctacgtgttcatgccaaaaaaaaaaaggaaaaaaagaaaaggaaaagctctccattactcattgatgtacacaatatgtatataaagaaaaaggtaggaaaatgtacagcttttaagtcctgttcggatgggtcgatttgggttaaaatcccttgcacgacttataggttcaaatgtgaaaaaggtcccaaagtattttataattcaagtacccaaatctgaacagaccaattggattgtgttccactgataatctctcggtacacatgtaaatattatcatgatatttcaggccctgttgttactttatcc

SEQ ID NO: 20742 - DNA, 1500 bp, Oryza sativa
  ref <308>: DATABASE ACCESSION NUMBER: AK071048
  ref <309>: DATABASE ENTRY DATE: 2001-12-06
ttcctgtttactttaatgaaccattgtcttctcttcaaaagtgctttgaagatttggagtattccaatttactggatcgtgcatatgaatatggttcaaggggaaacgggctgatgagaattctttatgttgctgcatttgctgtctctggatatgcttccacggattctcgcccctgcaaacctttcaatccattgttgggggaaacatacgaagctgattatcctgaaaaagggatccgtttcttctctgaaaaggttagtcatcatccgatggtcatggcatgccattgtgaagggaaaggttggaaattttggggtgacagcaatctaaagagcaaattttgggggcagtccattcaactcgacctagcggtgtgctaactctacagtttgatgatggagaaactttccagtggagtaaggttacgacaacaattaataaccttatcattggccgagtctattgccatcaccatggcacgatgaacataagtggaaacaggcaatattcatgtaagctgactttcaaagagcaatccttcctcgatcgtaatcctcgccaggttcaaggacttgttacggatgctaatgggaccaaagttgcattcttgatgggaaagtgggacgagagcatgtcttgcatcattggtgatgatgcttctaaagtgaactcccgtaatgcaaatcagagtacgggtgccactttattgtgggagaaaaatgtgcctccagccaatcccactcgatataacctgtcatcatttgcaatcactttgaacgagttgacaccaggtcttaaggagaagcttccaccaacggattcaagactcaggccagatcagcggcatctagagaatggggagtacgaaaaggctaactctgaaaaattgcgcctggagacgaggcagaggatggcaaggaagatgcaggagagtggttggaagccaagatggttccaaagggacacagaggatggaacattccgttatgtcggaggttactgggaggcaagggagcagaggaaatgggttggttgcaatgacatattcggcaataatgtgtccactctttgcaccagcgcaagtatatagagaaacttctgtttagtagtcgttgacaccccattaattattgaagacggtacatagttgatcggctgctcccgttgctaccatgcaaacaagagctaacatgctctcctcttgtcatatagaaacactgggacatttatgtggatactgggatacttaactgtgaggcctgctagctaacaatgttgttattactctcagtgatatccattttttcaatctttgtactgttccacagagatactgagttatatacttggttcctaattgtaattgatcatgtaagcttctatgctcatggtcatggataatggacgttcatctttcttttttgacctctgtgccaagccaggcgagtaatcttgtcctgtatagaaatgccaaattaatatattcaatttcctgtc

SEQ ID NO: 20743 - DNA, 1481 bp, Oryza sativa
  ref <308>: DATABASE ACCESSION NUMBER: AK071049
  ref <309>: DATABASE ENTRY DATE: 2001-12-06
ggcgttcctctcctcaggtggtgactcggtcaccccttgcctccttcggccaccctctcctcctctcctctcctctcctcttcctcttcctccctctcctcgtcgcccttccaccaaagcgagagatcgaccgactcctctccctccgccgccgacccccctaggtgttgttgatcgctttgcgaaatggagctcccagttgctgatcctgggccggtgagggctgaaggattgcttctgcagtgtccctattgtgattcagaggcaatgcacaaactcgcgcagttcttgctccccggcttggctgcggtatgcattgactgcacgacaggcgatctcttcaggaagccgtcggttgtcgccgttgacatgaggaaggaaatggtggactatgtcacgcagagaagcgagacattcatatccgattcgcttatcgaatcagaagcaagtcaggatcaagagaacgagatgccggaggacccttttgagatcgtgtccatcttcatggatgattttagtagcacgaagaggaacattatcggccatgtctctgggtggttgatgagcgacagccgcgaagataagattgatgactttgtccaagaaatggagatgacccgcttctggccgctggaaaggagagaagttattgctgaggtcctcctcaagaatgtagacctgaaaaccaagtaccactgccctgagaaatatgaaaatgaagaacgtctcgctgatcataaggcccagtgtagcttcagacctgttacctgccccaatgatggatgccgagcgaaagtttctgttcgctgcatgcaagaccatgattcagcttgcctgtttaaaatccttacatgtgagcagaactgtgagaagcggcttctgaggcatgatatggataggcactgcgtgactgtgtgccccatgaggcccatgaaatgcccttttggctgtgattcctcctttcctgagcgtaatcttgagcagcactgttctgagtttcttcaggcacacctccataaactcctcaaggctattcataagaaaggttttacagatgaggggctcaaggaccatgctctactgctggaaaagcatgacaatgatggtaaactggctaaatctcgggatgtaagatctcttactaatgttgtaaagaatcttgaagccaaaataaaagatgattcgagttagagtggatggcgtctccagagcaaaatgcaagttttttttgaggcagcaaaatgcagcatggatattgaatggtatagttgaagagttgtttccactcacagtatacacagaagagtacaagattctgcacgtttttcctttacaactataattttcccctcatgatttttcttttctcaaaatcggttagttttttatggtgtaaaagtataacattattttatccttgctattttgtccaaggaactcttttttttcatataaattgagaataatttatcaggaatgcc

SEQ ID NO: 20744 - DNA, 1688 bp, Oryza sativa
  ref <308>: DATABASE ACCESSION NUMBER: AK071050
  ref <309>: DATABASE ENTRY DATE: 2001-12-06
gtggggagacagagatagatagagaggagagatgggcagcgaggtgaagccggcgaagcttggcctccggcgacacctcaacgccggcttcttcgccggcttcctcctcgtcctcctcacctacgtcatcgtctcgcagcagttcgccatggaaactcccacagctgtcactagcagggcgccgaggattgacgagaatgagtcggtgaccaaggctcgcgttgaaacagagaagaagagggagcaggagtggcagcggccaaaggacacgtctggtgccgtctcagcagaagagttctccaaaagagactcgacaaatgccaaaccgattgagaacggcaaggtagtgtgcggctcgaacgggttctactccgacacctgcgacgtcgacggcgacgtccggatcaacggcacggctctctccgtgacccttgttccggcgagccgccggtcggagcgccgccgcgagtggaagatccagccgtacccgcgcaggaccgtgtccggcatcgcggaggtgaccgtgacgcggcagcaggaccgggccgccgcgccggcgtgcacggtgacccacggcgtgcccggcgtcgtgttcgcgctcggcggcctgaccggcaactactggcacgacttcagcgacgtgctggtgccgctgttcgtggcgtcgcggcggtacggcggcgaggtccagttcctggtcagcaacatccagccatggtggctgggcaagtacgaggccgtcgtgcggcggctgtcgcggtacgacgccgtcgacctcgaccgcgacacggaggtccggtgcttccgccgcgtcgccgtcgggctccgcatgcacaaggagttcagcgtgaagccggagctggcgccgggcgggcagcggctgacgatggcggacttcgccgcgttcctccgcgacacctacgcgctcccccgcccgcggcggcgggcgcgaggcggccgcggctggtggtgatctggcgcgcgcactaccggaagatcgtgaacatggacgaggtggtgcgcgcggcggaggcggcggggttcgaggcggcggtgatgtcgccgcggttcgacgagccggtggaggaggtggcgaggaaggtgaacgcgttcgacgcgatggtgggcgtgcacggcgccgggctgacgaacgcggtgttcctgccggcgggggcggtggtgatccaggtggtgccgtacgggcggctggagcggatggcgagggcggacttcggcgagccggtggcggacatggggctccggtacatggagtacagcgtcgccgccgacgagagcacgctgctggagatgctggggccggagcaccaggtggtgaaggacccggaggcggttcaccggagcggctgggacaaggtcgccgagtactacctcggcaagcaggacgtccgcatcaacgtcgcccgcttcgccgccacgctcgccgccgccttcgatcaccttcgaccatcacatagctagtgagtgagtgagtgagtgacacagatgttacagttgctgatagatatgatacaccacctcattggtcgcaatttggtacagaatgttcaacccatccttttttgtttttgttttggctcagtatatccatcatcattggtggagcgtatgaacatgcacattgattgtattgatttggtagagtacatgtatgtcaccgaattcatgtt

SEQ ID NO: 20745 - DNA, 828 bp, Oryza sativa
  ref <308>: DATABASE ACCESSION NUMBER: AK071051
  ref <309>: DATABASE ENTRY DATE: 2001-12-06
gaatcgatcactccactggtgagtagtgagtggctagtgactggtcagttcatcacttgtgaaggttttgcaatcaggaaaagttcagaagatcatgggcaagctctggacaatcctcactcacgttcattcccttgcagggcctaccgtcatgctcctgtaccccttgtatgcgtcggtgcaggccatggagagcccatcgaagcttgacgacgagcagtggctggcctactggatcctctactccttcatcaccctcgtggagatgcttctcgagtccctcatctactggataccgatctggtacgagctgaagctgctgttcatcgcgtggctggcgctgcccaacttcaggggagccgcgttcatctacaacaggttcgtcagggagcagctcaggaagcatggcctcgccggcgccggcgccggcgccgccgccagcgtcggcaagaaggacaagtcgtcgccgtcgtcgtcacccaaggacaaggagaagaccaagagcaagttcctctccttcgtcactcccaagaaggatcatgaagcttactgagccaagaagtgctgatcagtcggatccctgaagatagttttttagtgtgtgtactgttccatttgtgtttgtccctcttcctctccttcagaagaggcagctagctagcttcatgtttggctggtctttttggccatctgtgcatgtctgtaaactttattggagtgaggggaaaaaagagcataattagttgctccatgttgagttgttagagtggtttcttgtaaatgtaattcaggatctcagatgagcagacaataaaaacacactgttcc

SEQ ID NO: 20746 - DNA, 1891 bp, Oryza sativa
  ref <308>: DATABASE ACCESSION NUMBER: AK071052
  ref <309>: DATABASE ENTRY DATE: 2001-12-06
gaggtcctcatcgaggccggcgttgtctaagttttaactaccctagctagcctcaccaattgcaattgtgtacactagctagttgcatcaatcaatctcactgctagtggcgtgcgtgcgtgtgtgtctagttagggctacttctactgctgcttctcctcaacctcttcttcttcttcctctagttgctctctctgctataaagtgccgtggagatcagggggttgggtactggaaggtgatgagagtactcaagttgatcgccggagcagcatcagcatcagcatcagcttcaccatgcggggatcagatcatcatcaggatgtcgtcgcggcaccgcggggcggtggcggtggaggagacgacgggcaggcgcacgacatggtgatgccggggttccggttccacccgacggaggaggagctcatcgagttctacctccggcgaaaggtggaggggaagcggttcaacatcgagctcatcgccttcgtcgacctctaccgctatgacccgtgggatcttcccgctctggcctcaattggggacaaggagtggttcttctatgtgccaagggaccgcaagtaccgaaacggcgatcggcccaaccgagtgacgccatcggggtactggaaggccacaggggcggataggatggtgaaggtggagggtgaccgtcctatcggcctcaagaagacgctcgtcttctacgtcggcaaggcgcccaaggggcttcgcagcagctggatcatgaacgagtatcgtctccctcatggcgacgctgaccgctaccaaaaggaaatttcgctgtgtcgagtctacaaacgcccaggaatcgaagacaacttccacctcaccggcacaaccactaaatcctccggctcaaaggcggcggcggcgatgggcaagaagcacgccgccgcgaaccggacgtcatcgacggcggcggctgcggcgccccgcctcgccccgatgttcgacggcggcggcggcggccaccactcatccgccctcatgggaaaggcaacatacaacgcatcacacaccgccgccgaagggacgaacgccatcgccatgtcactgtcggcggcggccgcgctgcatcctccggcgccggcgatgttccggtcgacggcgtcggtggcctcgctgagctccaccacgtcgacggaggaggacggcacgtcgctcttccacctcaaggccggcgcgacgacgacgaacacgacgacgatgcatcatcaccatcatcatcagcagctgcctgcttcaactcatgctctgctcaacaccaactcgtcagcaatggcgaccatccccatcgacgagctgagtagggcgattggatcttacagcaacatccaccatcaaccaaactctactacaactcatcaatcaactgctttgccgccatcgcaacaaagccctcttcttccattcgctagcatggagaagatttgggattggaaccctctcctagaatctcccaaggtttgcacaaacttcaagtaactttgattatgatctactcttggatgatggattaatgtttgtatgcatgaatgcatctatgcaactatgcatatatatgcattgcatggatgcaaaaaccatatggtattatatgtgtacttaattaattatgtatatgtataacacatatttgggctaggacagggttatctatctatataatggaacatggtaaggtagttctagtcccatgcaattaccggcttaccgcgccattattttagttcacattagtggatggaagtaactgtatgtcaatttctattggatatgatctcgaggacaatgtgtagtgttactcgtcgatctagagttgtaataaagatgaaatagcattatatatgtgatcttttttcgcttc

SEQ ID NO: 20747 - DNA, 1440 bp, Oryza sativa
  ref <308>: DATABASE ACCESSION NUMBER: AK071053
  ref <309>: DATABASE ENTRY DATE: 2001-12-06
gggcgagagaggggaagtcacgaggcgacggaaccggaaccctagctagcgcgcggcgtccatggggaaggcggaggcgaggtccagggagcacggcgggggcggaggaggaggcagcggcagcgcggggaagatcttcgtcggtggactgccccgtgacaccacggaagcggattttgtgaagcattttggccagtatggagaaatagttgattcagtgataatgagggataagcacacatctcagccaaggggctttggctttattacatattctaaccctgccgttgtggatagagtgatggatgatatccatgaattcaatggaaagcaagttgaaatcaagagaaccattccaaaagattctgtgcaatcaaaggatttcaaaactaaaaagatatttgttggtgggcttcctcaagcactgacagaagatgatttcaagcatttcttccagaaatatggccctgtggtggaccatcagattatgcgtgatcatcaaaccaagcgttcacgaggctttggatttatagtttttagttctgatcaggttgtagatgatttattagcaaatggaaatatgattgatcttgctggtgcaaaggtggagatcaagaaagcagaaccaaagaaatcctcaaatccaccaccatcatcacatggtagtgcctctagatcagcatatggtagggattctaggggtcattcttctggcaatgactatggtggactggccaatgcttatagcaactacaacagtggtggatttgggccttataggaaccatggagtttatggtggtggtagtctcagtggttatggtgggataggtgaatatggtgttcagtatggccgttactatacaggattaggaggatctggaagcatgccttcttttggttatgctagtcgtgttgggccgtatggaggaggttttgatggaccttacgctggtgggaacttaagtggatacaggcgtggtggtgatgagagctttggtggcctcagtagttctagctttggtggcgctatgtatggcggcgcagcatatgatcctgcactaggtggttatgcatctggtagcacacctgaaagaagcaggggaaatttggctggtggttcaggccggtacaatccatatggacgatagagatgcccttgaaggattcgacccatgataatattctctgcaatcttacttcctcattgccttcttttagcttcttatatggtgggcatcttagcaatgctagtacccttattagattgagcgtgtgcacaagtaatttattctgtacatgtttgctagttctcctgagcttaaagctttaatcggtaccatgtagtgatcagactagatgttgtaatgatggttttgtttgggatgaacggaattctggtattgttagttttatatcatctacgaagtaagtttaagct

SEQ ID NO: 20748 - DNA, 1361 bp, Oryza sativa
  ref <308>: DATABASE ACCESSION NUMBER: AK071054
  ref <309>: DATABASE ENTRY DATE: 2001-12-06
ggaaaaaaaaaagaaaaacacctcctcctctcttccttccagcgagctccacctccagccagccatagccatccccttctccgattcgatcgctcgccgtcgccgcggggccaatccgatcccgccgctcgccggcgatccggttcgagccgccggaagggaggcgatcatgaggaagcgggagcgggagaacccgtgcgggatctgcgggcactaccacaagtacgagctcggggaggtgtgcggggtgtgcggccaccgcccgccggcgtcggcgggggctcaggcggcggcgggggcggcgcaggcggcggcgccgaggcaggactcggcgttcccgtcggagatcctcaaggacttcctcttcctcggcagctacgacaacgcctcccgctccgagctgctcaagaccatcggcatctcccacatcctcaatactgtacccttatgccaaaacctttaccgaaattcgttcacgtaccactgccttcaagacgagaagactttgcagtttgatgatgcaatccaatttttagaacagtgcgaaagagataaagcacgtgttctagtccattgcatgtcagggaaaagtagatcagcagcatttgtgatagccttcttgatgaagaccaaaggctggagactttcccagtgtttccaatgggtgaaagaaagaagaccacaagtgcaattggctgatgcggcgcagcggcaactgatcgaatatgaacagaagcttttcaattccactgttggcattccagctcaggcttttgttccaacagatgcgttcccttcacttggatttggtttcccaaaaccgtcaggagacatccaggtgcctatctttaaccagcaggcatccatctttgagcgtgtaagcccacacaacatccctagcaatttcacatttggggctgaaagaactactgaagtgaagctcccagataacaatagctttggtgttgtcaactcatctgggggcgatagcatgatggacagctcctagtatgttttgcattgatacaaaaggaatcaactccgaatttagtcagatttctcgggatgttttagatttctgagaaggaaagttgcattttttgtacaaggatttcaagcgttttgaccattgcagttctgcgttttaacaaacatgtatgtgctttttcatcgaacttttcaagtgtaattcaagttaactgaaattacgctggaaagctcaagtaaaagctatgcatgtgtttttgttgaaacgtagaaatgtagtcgtcaagaatgctgtaacacccagaaatattactcccacggctgcaagatgaactgagaaatctggaaaatacacacatggtttgtttgtttgt

SEQ ID NO: 20749 - DNA, 1034 bp, Oryza sativa
  ref <308>: DATABASE ACCESSION NUMBER: AK071055
  ref <309>: DATABASE ENTRY DATE: 2001-12-06
gacctccgcccgacctctgcccctcctccgagagtccgaggtcgatcgccgtcgtcgctcggtcgctcgctcgcctgcctgatccggatccggcaggccggactgcgtaggtgtgccgcggcgagacgtgcgcgcggcggcgccgatcgacgacccgatcgatggacttcacctcgtcctacttccacgccttcggcaaccccgacttcgccgcggtcttctccggcggcggcagcgcgcaggccatccggccgggcaccaccaccagcagcagcggcggcgcgaaggcggtgaacgttggcaggggcggcgcggcgaggcagggcgccccgtccgtgttctgcgtccaggacgcggaggtggaggaggcgcaccacttcctcgacgagtgcaccctgtgtcgcaagggcctcgccggcgacatcttcatgtacagaggggacacgccgttctgcagcgaggagtgcaggagggagcagatcgagatggacaggaacaggcaccgcaggaagaagcagcagtactctcccacggcgcaggcggcggcgcaccaccaccgatcagagcgcgcgccccagcgtcagctgcagccgcagaggtagagatcaagagagagctcagctcggcaccacaccaagccgcgcgccctttgccggattggagactcacgcgcgcatgcatgttacgcatgcatgcacacacgcgttcaactggggtgatactacatatacaagtacaggtgtgtactagacatttcgaagagtccatggatcgatcgagaggaaccaccaccacgaccccgagttcccacgtttgtggtagggaaaacggtgaagtaattatagaagagttttttttgtgcattatgcttgctgatgagcatatatatatatacaggtttggttagaacagcatgctcgtccaggcgtcctgctctcgtgtttggtctatttacttcgtactggttcagaccgggctgtcaaaagaagcctatgagctcttttctaatgtatattgtaacgccctctctattc

SEQ ID NO: 20750 - DNA, 828 bp, Oryza sativa
  ref <308>: DATABASE ACCESSION NUMBER: AK071056
  ref <309>: DATABASE ENTRY DATE: 2001-12-06
gtccgcctccccaatccgtcccgtctcctcgccctccgccctcgactcccgtctcctcgcctgccgctggcgccgatctccatcctgctagcagaggtggcgccggcgtccttctgctcccgccgcattcgctcaccggtgagcatcctaatccatcccatccggcctcggcctcgaatttcgtctcctcgcccgccgcttgcgccgatccccatcctgcgagcagaggtggcgcccggcgtcctcctccttccaccgcatcgtcgctcgccgaataagataatacataaagaatggccgcgcacaacacatctatgacatgtgagggtgactatgagactgaacagaaaaagcaagccgctgcagatgtccttttccactattcacagtttattatggtttgcattggtgagggtgttcgcccaactgatctgaggttgcatcttatgaaggaagtttcaggaatggccacttctctaacgaaagagccacagcaagcagctgcctctccggattctagtgaaccatcttcttcagggacaacgaaatgagacacgaatgagatcttctaagcttcttcaagaagtatgataggaaatattgcaaactagtaggttcacagcttgtggtctgagaactgtttctggtgcagtgataggaagtattgatgatgatatacttgtgttggtgatgcttcttatgagcacttgatttgaataaattaaatgtaaatactttagtatgtttggcccacaatttgtaatgaaggaacatggatcgtgatgtttctgataaaattcttgaagtgcctagcccgcgttcatgttt

SEQ ID NO: 20751 - DNA, 1288 bp, Oryza sativa
  ref <308>: DATABASE ACCESSION NUMBER: AK071057
  ref <309>: DATABASE ENTRY DATE: 2001-12-06
gactcctcagtcctcgcctcggctcggctccctcccacgctccagctccgcctccaatggcgcctatggccatctccaccccgctcgccctccgcgcctccccgacccgcctcctctcccgcaggcggagcggagccaaatcaggcgtggctctcccaggtccacaatttgtaccacctggtatttcttcaaagttggacgagaggatacattgtcattcttctctgaggaaaaatacaattgtagcatcagagaatgaaaatccacctttaatgcctgccataatgactcctgctggtgctcttgatctggcaactgtattgttggggaaccgcattatcttcattggtcaatatattaactcgcaagtagcacagcgtgtaatatcacagcttgtcacacttgctgctgttgatgaagaggctgatattctgatctacctgaactgccccggcggaagtctctactccatcttagcaatttatgattgcatgtcctggatcaagcccaaagttggaacagtgtgctttggtgttgttgctagccaggcagcaattatacttgctggcggtgagaagggaatgcgttatgccatgccaaatgctagagtaatgattcatcaacctcaaggtgtatcagagggtaatgtggaggaggtgaggcgacaggttggggaaaccatttatgctcgtgataaagttgataagatgtttgctgcttttactgggcaaaccttggatatggtacaacagtggacagagagggatcgtttcatgtcttcatctgaagccatggactttggactagttgatgccctgctggaaacaagatactaacaaacaaacacttaggcacagtttgattagcagaggctggtacaaggattgtgaaactggagctgaagttgagattttcgccgtccttctagttcaaggactccaatgacaggaggctggatctgcgagacttgaatgcatcgccatcgctcctatgagcaaaacatctctgcgttgagtgtgattttttgctcttcttttttggatctggttttacatgccgccagcctatggtctcaatgcattggtcctgctaatgtttagtgtagaccagatgatcctttagacagcaaaacatcagttattactccgtagattttcccatgagctgattccagactgtgtgcaacttttgtgttccaattgcaaagtttgcaacccaacccaacccaacacatgggctgatgggctgttgacaaaggagagattttacacttcacatatgtcaaact

SEQ ID NO: 20752 - DNA, 1796 bp, Oryza sativa
  ref <308>: DATABASE ACCESSION NUMBER: AK071058
  ref <309>: DATABASE ENTRY DATE: 2001-12-06
cctcaccgccgctctctcttcctctccaacatgaatatgccattgctactcctcatcgccatcgtcgtcgtctccctctcccatggcaacggggagcagaccgacctcacgcgggagacgttccccgcgggcttcgtcttcggcaccgcgtcgtcggcgtaccaggtggaggggaacgccctccagtatggccgagggccctgcatctgggacaccttcctgatgcaacctggtgtaactcctgataattcgaccgcgaatgtgaccgtcgacgagtaccaccgctacatggatgatgtggacaacatggtgagagtgggcttcgacgcgtatcgcttctcgatctcctggtctcgcattttccccagtggacttgggaagattaacaaagacggcgtggattattaccacaggctcattgattacatgcttgctaacaacattattccatatgttgtgctctaccactacgaccttccacaggtgctccatgatcaatacaagggatggctacaccccagaattgtgagagattttgtgagatttgcagacttctgcttcaagacatatggtcataaggtgaagaactggtttaccattaacgaacctaggatgatggcaaatcatggctacggtgacggcttcttcccccctggcagatgcaccggctgccaacccggtgggaattccgccaccgagccttacatcgcagcccataaccttctcctttcacatgccgctgctgtcaggacatatcgtgacaagtaccaggctattcagaaggggaagattggcatccttctcgattttgtatggtatgagccactcaccgacaaagaagaggatcacgcagctgcacatagagccagggagtttacccttggctggtacctgcacccgattacatatggtcattacccagaaactatgcagaatgctgttaaggaaaggctgcccaatttcacacgtgagcagtctgagatgataaaaggatcagcggattatattgcgatcaaccattacacaacttattatgtcagtcaccacgtcaacaagacatccatcagctatctcaatgattgggatgtgaaaatttcatatgagcgtaacggtgtgccaattgggaaacaggcgtactcgaactggctttatgttgttccttgggggatctacaaagctgtcatgcatgtcaaggagaagtacaaggaccccattataatcatcggagaaaatggcattgaccagccaggcaatgagaccctacctggtgcactgtatgacttcttcaggatacaatattttgatcagtacctccatgagcttaagagggcgatcaaggatggtgcaagggtcactgggtattttgcttggtccctgcttgacaacttcgagtggcggctcgggttcacttcaaaattcggaatcgtctatgtagaccggagcactttcacacggtaccctaaagactcaacacgttggttcaggaagatgataaaaagtgaggtttgagttggattattatcactgttggcagctgctggagtgcttttttgttatgctagttttggttgtatgaataataagatgtcttgtactagttgagaacttcttcagattttgtacttctagtattctactttttgtacttcagattttgcaagcaaggatgattttagtttaatagattcaggacatctatatatactggtgataagagaggcagatttcaatttttggcttgaattgcccatatttgtgttttccaatgttttttaacttcaaattttaaactttgg

SEQ ID NO: 20753 - DNA, 991 bp, Oryza sativa
  ref <308>: DATABASE ACCESSION NUMBER: AK071059
  ref <309>: DATABASE ENTRY DATE: 2001-12-06
gcgctcgcggcgcaccgccgggagcacgggtcgctgccacagaccgacgcgctcatcgccaccctcgccggcagcctcgacaacactggctacggccgcaaggagctccaggggaaggtcagcactctcaagcgccgttacgaatccaccgctaagaagaagggcgatctcccaagcaagggccatgaccgccggctctatgacctctccaagagcgtctggggcagcgaggcggcagcggcggcggtgaacggcaccaccaccgcgccgagggagttcggcgagatgtgcgagctgtacccgcacctcgctgaggaggtcaagttgctggaggcggcacaccctggcttgttcaagagggacttcgggaagctcgatgacgacaaggcgcatgcgctggacatgaagatcaagaagcagaggattgccgagatttcggtggtgctgcgccgtggcgacctgaccaaggaggtgaccaaggtgctcgctgagctggtcgagtgactaggtgagctgaactgaagtgaacagtagtagctcggcgttccttaccatggcataagaaagtgtacctggtcattacctgcaaactatatcgtgaacaggcattacctgcaaaattttgcttcttagtgatggagttggatgttctatgttcttgtctaggcaattcagtcagcgtctcttctcagttcagatagatcgataggatgtagtataaaacattgaaatttcgtttttggtttgtcttatcattccagacagtgatagaatgtagcaagactgaaatcggtcatcgaatcagtcctgaactcttgactcctttataaactgaaccccagtcctcgttaagtatgggttagtgctggcagtgtgttgccctagcctgaggtctctgatatggcaacttgtcgcgtgatcagtgatcgtctctgtctagctgacatctctcctggatgaaatcaatccaaaaaaaaagaaggctttgatc

SEQ ID NO: 20754 - DNA, 922 bp, Oryza sativa
  ref <308>: DATABASE ACCESSION NUMBER: AK071060
  ref <309>: DATABASE ENTRY DATE: 2001-12-06
gacgaggaacacacacacccctacccgtctctgttcatctccacatcttgtcttctcgctgttgacttcgagcggagactagactagctactactcggaatggggaaggagatgaatctgatccgagaagacgagtacggcggcggcggcgtcgggttcgagccgacggaggacgagctgatgctccacttcctccgtccgcagctgcgcgggttcgcgccgcgcgtggcgggcgccgtggtggaggccgacccctgcggcgcggcgccgtgggagctcctggcgcggcacgggaggcgggaggaggggttcttcttctcggcgcgcgcgcggaggaagccctcggtgcggcggaccgtggcgggctgcggcggcggcggtggcggcggtggcgcgtggatgcacagctccaccaagaacgggcagtccgtgaccgacctcggcgtggtggtgcggtggtgcaggatcaactactgcttctacgtgcgcggcgagatggggcagcagcggagcaccgggtggatgatggccgagtacgagatcaccgacccgcggtgctaccgccgcgccgacgacggcgaggaggacgacttctgggttctctgccatgtcaggaagagctcgaggccccaagccgccaagatctctccagccaagccagcacggcggcgcaagcccgccgccgccgccgccgcggatgtccgggctgcgtgatccggccgacggcggagatcacgaggtttgcctcgcgttgggattcgacttcggttatacttttgctttggaattgtgttcctttgctttattcctcctctagcatctgcccatacattccgtgtgatgaacactgcgaatcaaatgggacgtttaagatgttgttgttgtactgatagcgtgattgaattcatggcctctttctgtc

SEQ ID NO: 20755 - DNA, 977 bp, Oryza sativa
  ref <308>: DATABASE ACCESSION NUMBER: AK071061
  ref <309>: DATABASE ENTRY DATE: 2001-12-06
tttctaattaattatttaatactgttaggtgatcgacccggaggaggaggagaggttcgacttcgacacgctggatgacaccaagacatggccggaggacgaggtgccgctccggcccgtggggcgcctcgttctcaaccgcaacgtcgacaacttcttcaacgagaacgagcagctggcgttcgggccggggctggtggtgccggggatctactactccgacgacaagatgctgcagtgcagggtgttcgcgtacgccgacacgcagcgctacaggctggggccaaactacctgatgctgccggtgaacgcgcccaagtgcgcccaccacaacaaccactacgacggcgccatgaacttcatgcaccgggacgaggaggtggactacttcccatcgcgccacgcgccgctccgccacgcgccgccgacgcccatcacgccgcgccccgtggtggggaggaggcagaaggcgacgatacacaagcagaacgacttcaagcagcccggggagaggtacaggtcgtgggcgccggatagacaggagaggttcatccgccgcttcgccggcgagctcgcgcaccccaaggtctcccctgagctccgcgccatctgggtcaactacctctcccagtgtgatgagtcgttgggggtgaagattgcgaataggctcaacgtgaagccaagcatgtgaagaaactaaggcacaagaatgcatcatctcttgttaattaattggagtactaccaaccaaataaggccagacaatgtcagatgcacgcatcttctgttgtcgttgggccatcttttgtatgcatcctattgttaattactagtacatgatatccaagtgatcatcagcaaggctacagaaattctgtaatacgataaattaaaagaaaccaaaatggagcctgcatatgtgtaacttaattaatgtactggcgtattaatgccactgctgcatgttgtaatactcc

SEQ ID NO: 20756 - DNA, 1285 bp, Oryza sativa
  ref <308>: DATABASE ACCESSION NUMBER: AK071062
  ref <309>: DATABASE ENTRY DATE: 2001-12-06
gcgggcagcagcaaaccgaccccgttcccgtttccattttcacgccaccccaccacccgcacacccacactccacgagagacgacccaaaccggccgccaccgccgccgcgatcccccacctccgctcgccggaaggggcgccgtagccccgcccctcccctcccccctctccggtggctggcccctctccggcgatggggagcgccgacctggtgctgaaggcggcgtgcgagggctgcggctcgccgtcggacctctacggcacgtcgtgcaagcacaccacgctctgcagctcctgcggcaaatccatggcgctctccggcgcccgctgcctcgtctgctcggcccccatcaccaacctcatcagggaatataatgtacgggccaatgccaccacagataagagcttctctattggaagatttgtgactggtttaccccctttctcaaaaaagaagagtgcggaaaacaaatggtctcttcataaggaggggttacaaggtcgccagattcctgagaatatgcgggaaaaatacaataggaagccatggattttggaagatgaaactgggcaatatcagtatcaaggtcaaatggagggatcacagtcatcaacagctacatactatttgttgatgatgcatggcaaggaatttcatgcatatcctgctggttcttggtataacttcagtaaaattgcacagtacaaacaacttaccctggaagaggctgaagagaagatgaataagagaaaaactagtgcaactggttatgaacgttggatgatgaaagcagctacaaatgggccggctgcctttggttcagacgtaaagaaacttgagcctacaaatggcactgaaaaagaaaatgcccgccccaagaaagggaaaaataatgaagagggtaacaattctgataaaggcgaggaggatgaagaagaggaagctgcacgcaaaaataggcttgcgctcaacaaaaaaagtatggatgacgatgaggaaggtggaaaggatctggacttcgatttggatgatgaaattgaaaaaggtgatgactgggagcacgaagaaacattcactgacgacgatgaggctgtggatatagacccagaggagcgggcagatttagctcctgagattcccgctcctcctgaaattaagcaggatgatgaagagaatgaagaagagggtggtctgagcaagtctggcaaggagttgaaaaagcttcttgggaaagctgctggacttaatgagtcagatgccgatgaggatgacgaagatgatg

SEQ ID NO: 20757 - DNA, 1829 bp, Oryza sativa
  ref <308>: DATABASE ACCESSION NUMBER: AK071063
  ref <309>: DATABASE ENTRY DATE: 2001-12-06
ggctcttcattttgcactccagactacaaacaagctagctaggatcaacaacaacaactcaaacaataatctgccgcccgccatggatcagcagctgcacctgcaggggactagtactgctacaactgttccattgcaaggtgaccctgcttctgatcaccacccacatctctcaatcgacataccaccagctgcagcaagcatgtcacctgcaccgacacaagctgctgcagatatcacacccacaccgaccacttcgattttgagcaccaaagcgagcacacctgcaggttcatgttccagcagaagcaccagcgttgccccaaagccgcaacgatcgtcatccttcatgctgaggcagactgtcaagagcctcttgccagtgggaagcttcaagtcgtcagtcaagttcttcaacgccagaatttcgaggacatcgtcgctcccggtgaccgatgtctcgcaggaacaagccgataaaacttcgactactcatgctgttgataaagcaggtcacatgtaccggtcacagtcgcttcccatgaacatgaagaaattgaataatggaaagagcttcaagagaatgaattcactcggcggtgtctaccgcgtagttccttcgacaccatcagtccccgtgacaagcagcaatgtcatcccagatatagtcccatctgaaccaggtgatgaagatggagaggacatagcagaggaagaggcagtatgcaggatctgcatggttgagctgtcagaagggagtgacactctgaagctggagtgttcatgcaagggcgagctcgctctagctcacaagcactgcgccatgaagtggttcaccatgaaaggtaccaggacatgcgaggtctgcaaggaagatgttcagaacctccctgtcacccttgttcgtgttcagagcatgcagcagcctgagcttcagaccaaccctgccaacgcatcaagatacgatcgcctcaggatgtggcagggagcgccaatccttgtgatcgtcagcatcctcgcctacttctgcttcttggaacagctgctggttgcccgtgatggtattgcagcgctggcaatatcgctgcccttctcatgtatccttggcctcttctcatccctcaccacaacaagcatggtggcaaggagatacgtgtggatctatgcgacaattcagtttctgttcgtcgtcttcttcacccatctcttctacagatatctccatttgcaagcggtgatatcaatcatcctggccacgtttgccgggttcggcgtagggatgaccggcaactccatcatcgtggagattatacggtggagggcggcgagggcggcggcggcgccgccggctcaaacccgtcatcgtcgtcgtcgtcatggtcgcaggcaacaacagccaccacctgcacaaccagctgcttcttcagctgccgtcgccgacgttgagaacccacctgtataatactcatcgatcgttacctgaaaggaaggttggaggccttgcaaactgtataaatttatttcaaactaggaagttaagttaataagtaggcatggagttgatttttttgctcaggatcgatgcatggatgcatgtcaattttatactatatttttttcagttctttttattttttttggagcttgtgtgaaagaatcagtcttagtatagtatatactagtataaaatgtgtcctggtgtacaaagtatgtcagacatgtatatctgcttgaaatcttgtattagtataaaactcttgagatgctctgctcttggcttgctgaaattgtaaaccatgcatcctccagaaattaatcttcatcttcag

SEQ ID NO: 20758 - DNA, 927 bp, Oryza sativa
  ref <308>: DATABASE ACCESSION NUMBER: AK071064
  ref <309>: DATABASE ENTRY DATE: 2001-12-06
cattggggccggaccagcaagctcggagaaggaagcgggcgagcgggggccgttccttggccacccgcccgggctccgggaacagccccacgtatacatatcgagccttctccaccgataggtacctgcacggattcggatcgaattggcggatgatttgatttgatagggcaaatcggtgatctctgagtagtgggggattgggattgggaagggaaccagttccagatgccgatcttgaaggaatcggagcggcggtaggaggaggggccgaaggtgtcgatgcgccactgggccagccgggagatggtctccacccggttctccctctccatcccgccgccgccgccgccgccgcgccgtctcctctcactctacttgtaataactcccgaagcggaaggcaggtggtggaagagctgatgcgccggcggcggcagcaagctggtgagcaggttccagtcgacgatgccggcttgctgatcgacgtcgacgcagctgctagcctgcgagacgtagccctcgccgtcgacgatggtggggctctccagaggcggcatcatgtcggagaagtgaagcttggactctgaactcagaatgttgctgtggtcgacgacgctgttattgttgttgttggcgaagagagctgaggcagcggcgctcatcaatggccgcccggcgaagctagggttgtcgtggtgcagcagcaagctgtagttgtcggggacggcggcgtaggctccggcgccgtagctgccggggatgcagccgtaggacagcctgtgctgctgctggttgggcatcggcttctgaaacgcgcggcaaaccacccaaccttcctcctgcatccatattccatattaatatccatgaattaacatatatagtaggacagataattaagtaaagaagtaaaaaattaagatgg

SEQ ID NO: 20759 - DNA, 1681 bp, Oryza sativa
  ref <308>: DATABASE ACCESSION NUMBER: AK099165
  ref <309>: DATABASE ENTRY DATE: 2002-08-28
gagagtctgtccattcctgcagttttgcccgtgtgtcctgatgatggcctctctctccaccccacctgctaccgccggcgtctccccgtcgccccgcccttccctcctcgcgtacaagaaggctgctgggctcaccccatctccatggtgcgggtggaggagggcggcggtggccaccgcagccacgagctccaatcggaccgctgcaccagccgagaccattgtcactggaaatgatgtccctctcttgtcttttgctgaggttgcagaaaggcttgatgaattccatgcatctggaaccagaaatcaaaattacatggccatgtactctagtatttttggtggaattaccacaaatccttctgcaatggtgataccaatcgatgatcacatggtccacagaggacatggtgtttttgatactgcagctattatgaatgggcacctctatgagttagagcagcatcttgaccgcttcctgaagtctgcatcaatggccaaaatcacgctgccttttgatcggtcaacaattcggagcatacttattcaaactgtgagtgcatcaaaatgcacccaaggatcactcaggtactggctatctgttggaccaggagacttccagctatcttcagctggttgtgcaaactcagccctgtatgctattgtcattgaaagtccatcgttaccagtaccagcaggatgcaaggtgatcacatcatcgataccgataaaatctcaacagtttgcggtcatgaaaagtgtaaactacctgccaaatgcactcactaaagtggaaggcgaagaaaatggtggattcaccggcatatggttggatgatgagggtttcgtagcagagggttccaacatgaatgttggcttcgtgacacaaagcaaggagctcctcatgccccgtttcgacaagatccttagcgggtgcacggcaaaacgggttctgacccttgccaagcagctagtggcagatggaaggctcagcgggatcagttcaaggaatgtgagtgtccaggaagggaaggcggctgatgagatgatgctcattggtagtggtattcttgtcaaacctgttgttcagtgggatgatcagataattggctcaggcaaagaaggcccaattgctcagatgcttttcaacctcattcttgaggacatgagatccggtccaccttcagtccgcatccctgtctcctattgaaactgctgacatctcaccgatctttctacagatatgtgataaataacagaacatgtattattaggaacaaggaacgattactagaattctgagactagtcacgtaaagctacactctatatttgcataattcagaaggtgtgttcttcagttgcaaccttgtgctctcagacatcttaatcctgaatttaaagctttgctatccagatgctacaccaagcaaggggggcaaggattttggtagctgttgatcaatgtagagaagatgtggatattgtacaaagaaacctgtgaaactgttaaatttgtacaggttttattatgtcttgagtacctcatactgcagcacagactcacagaggatggcttgcaagccacagattgccagaaccttgagctcaagccaccgaactaagtcagtttattatgttttacctttattcagaaggaatagttccgattcagcaacacc

SEQ ID NO: 20760 - DNA, 1779 bp, Oryza sativa
  ref <308>: DATABASE ACCESSION NUMBER: AK071065
  ref <309>: DATABASE ENTRY DATE: 2001-12-06
accccttcattttctcgaagcgcttcccttcccttcgcttccccgcacaatctgcaaacgcgccacccgtcgctcataaacccctctccctctctctctggccgacacatggaccccaccgctcccaactccggcgacgccaacggcggcgcggccgccgacgccaccgccccgtccaacaccaccgtcaccctcccgccgctcaccctccgcgacgtgcccctgctcccgtcggcggcggcggcgaccgacacgatccccaacccgatctcccgccacccctacttccacccgccggccaccttctacatctccccgggtgacgtctccctccgccacgccttcttcgacctcgcctccgcgtcgccgtccccgctcgtcgcctaccgccgcgcggggccgcgcgcgggggtcgccgtggaccccgcccgcgcgcgcgccgcggtcgtcacctgcggggggctctgcccgggcctcaacaccgtcctcagggagctcgtcgtcggcctccgggagctctacggcgtccgcgacgtcttcggcgtcgccgccggctaccgcgggttctacggccccgacgccgaccacgcccgcctggacctggccgccgtcgacgactggcacaagaagggcggcaccgtgctcaagaccacccgtggtggctttgatctcaacaagatcgttgacggcatcgtcgcgcgcgggtatacgcaggtttatgcaattggaggggatggaacaatgagaggagctgtggccatcttcaacgagtttaagcgccgtggtttgaacatttctattacagggatcccgaaaactgtggacaatgatatcggcatcatagacaggtcatttgggttccaaaccgcagtggagattgctcagcaggcaatcgacgcagcacatgtcgaggctgtgagcgccgtgaatggcattggacttgtcaaacttatgggcaggagcacaggccacattgctcttcatgccaccctgagcagccgcgatgttgactgctgtttgattcctgaggttgatttctatcttgaaggaaaggggggcctgtttgagttcttgtatgaaaggataaaacagaagggacatgctgttgtcgttgttgctgaaggtgctggtcaggaattgattccaaggactgacgatcaaaagcgggagcaggacgagtccggcaacattgtgttccttgatgtgggtccctggttaaaatctgagctgggtaaatggtggaagagagaacacccaagcgagttgttcactgtgaagtatatcgatcccacttacatgatacgagctgttccagcaaatgccactgacaatctgtactgtacattgttggcacattcggcgatccatgggatcatggctgggtacactggcttcgtccctggcccgattaatggaaactatagctacataccgctggaagatgttgctgtggcgaagaacccggtggatgtgaatgatcacaaatgggcatgggttagatcagtcacaaaccaaccagatttcatgaagccaaaatactaagaccaaaagtgctgttactggacatggttgtatgactttttctccctggagccttgacacgttaagcttgatttctttctatccagtttcttctcttgttatgccgatctatctataagatgttaggtattctgatctccctggtttgtgtttgtgtgcacttgaaatcgtgttagcaggtattgctgtaaatctgtagtacataaataaatgaagtggcaggaaatgttgttctcc

SEQ ID NO: 20761 - DNA, 1752 bp, Oryza sativa
  ref <308>: DATABASE ACCESSION NUMBER: AK071066
  ref <309>: DATABASE ENTRY DATE: 2001-12-06
ggccgccttcccgctccgaacgcccctcccttcgccgccgcccccgaccatggcgcacgccctcggctgcggcgccgccaccgcccccgccggggtgggtctcctccaccaccacgagaaggctggggcgttgttcagtgccgcaggctccatcgttcgggttcagcagctcagcgggaaggggagcaaaagccaagctataagatgtgcaatgccaagtgcaagtgagcatggtggaatttcaaccgcaacagctagtagtagtgatcaaaagaaaggtggactgcgtggcaaactgaataaagttgttctagcttacagtggtggtttggatacatcagttattgttccatggctccgggagaactatggttgtgaagttgtctgtttcactgctgatgttggccagggtgacattgaattggaagggctagagaagaaggcaaaagctagtggtgcaagccagcttgttgtgaaggacttgaaagaagagttcgttagtgaatacatttacccctgcttgcgtgctggtgcagtttatgaaagaaagtatctgctggggacttcaatggctaggcctgttattgccaaggcaatggttgatgttgcaaaggaagttggtgcagatgcagttgctcatggatgcactggaaaaggcaatgatcaggttcgttttgagcttacattctatgctttaaaccctgagcttaaagtggtggcaccttggagggagtgggatatcacaggacgtgaagatgctattgagtatgcaaagaaacacaatgtgccaattcctgttacaaagaaatcaatatacagccgtgatcgaaatttgtggcaccttagccatgagggtgacattttggaagatccagcaaatgagccaaaggaagatatgtatatgatgtcagttgcaccagaaaatgcaccttcaaaacctgagtatttggagattggtattattgcaggtgttcctgtttccatcaatggaaaagatctctcaccagcatctctccttgccaagctcaatgaaatcggtggaaagcatggtattgggcgcattgatatggtggaaaaccgcctcgtaggcatgaagtcccgtggtgtatacgagacccccggtggcaccatcatggcagctgctgtccgtgagctcgagtccttgactttggacagggagacaatgcagtggaaggacatgcttgccctcaagtacgccgagctggtctacgctggccgttggttcgacccgctccgacaatccattgatgcgttcatggagaacattaccgcgacaacaaccggctccgtgactctcaagctgtacaagggctccgtaaacgtcgcgtcccggaagggcccatacagcctgtacagggaagacatctcctcatttgagaatggggagatctacaaccaggctgatgctgaagggttcatcaggctatatggtctccctaccagagtccgggcaatgctggagaagggcatctaagcccctgttttctgcttaaaatgtacttctgtgctttggagaaaatgtagcaccacctcatgcagtgttgcctgcaggtaggcactgaatactttccgagttgtattagcgttcgaaagcttaactgccatctcaattcgattacaactttcgtgaagtgttgcatgatcatgtaatgaataatggggttgtacctgattttgacttggttgtctaaattgcaataagattgtctcatgtggtgccgtcgttgtgtt

SEQ ID NO: 20762 - DNA, 1622 bp, Oryza sativa
  ref <308>: DATABASE ACCESSION NUMBER: AK071067
  ref <309>: DATABASE ENTRY DATE: 2001-12-06
gatttgcaacggagctccttactctacctcgacttgcaaccgaccaatgctcgccgtttgttgggacatccatacccatgcattctggatacgctcttctctcctccgtcttgctcgtcctcctggcgctctccatcatcacactagtgccacgcatgccatcaccgcagtcgttcttccgatctccaccgcctcgcctgatcaacagtagggttcctcatccatccgatgccagcgattgtattttctccgacggtaaatgggtgagggacgccgcggccgtgactgcttaccgggaggactgcccgtttcttgaccctggtttccagtgcatcagcaacggccggagcaactcgtctttccgctattggcgatggcagcctcatggctgccagctcccgaagttcaatgcaactgatatgctggagaggagccggaacggtagaatcgtgttcgccggcgactcgatcggccgtaaccagtgggagtccatggtgtgcatgctcgccgcctccgtgccagcggggaagtcaagaatatatgagcagtccgggaaacccattagcaggcacaaagggtacctcgccatggtcttcgcagactacaacctctccgtcgagtactaccgcgccccaatgcttgtcatgatcgaccgcttcccggcaagcagcggtgccgtcaggggagcagtccggctggacatgctgcctcggcacgccaaccgttgggccggcgccgacgtgctcgtgttcaatacagggcattggtggaatgagcacaagactatcaaatcgtaacttgagccgtagttaattaattaattattttgtttctatacatactatgttgtttcatttattataactgatcccttagtctcaaactactgccgcatacatgttttcaggggaaactatttcatggttggtgatcggctgaacatgagcatggacatcaaggaagcattccgatggtccctggacacagtgaaagattgggagataagtagtacacgggttccaaatagttattttttcttcaggagttattctccttctcattataggtcaaaaaatgacagcaatggcacgtggaacacgggtggctcgtgtgctgaccatcgagatccagtgaccagtagtgaccaattcgacgaggagtactcttggatcaactccatgatctcgaacgccatcgatggcatcagaagccacggtcgaaggaaagcccatttcttgaacataacgtacatgaccgaactgaggagggatggccacccgtcgcggaaccgggagcctgggacgccgcaggacgcgcccgaggactgcagccactggtgtctgccgggcgtgcctgacacatggaatgaggtcctgtatgcacaccttatgtcaatgggatatgatatcaggatacactagtacaaaaccctcgcagggacctgctgtatatgtggctatgtgactttttccacctccacatgataaaaaaaatataaaactagcatatttaaacactatagttgttggctcttaaaaaaactggtagtaatattgggtataattttatgctttctaaatgtttcttgaaactaaatgatttgaaatgatgatgagattggt

SEQ ID NO: 20763 - DNA, 1529 bp, Oryza sativa
  ref <308>: DATABASE ACCESSION NUMBER: AK071068
  ref <309>: DATABASE ENTRY DATE: 2001-12-06
gggtggaagagagatttccctcgcgcgcttgtcgttcgccttcttcccctttgcggatttgaatccgctcgggggcgctattacctattggcgccgcggcggcggcggcggcgatttgagtcgggatcccgctcgatggcggagggcttcgggcggtgggaggcggatccgctcttccccgccgccgagtgcgtgcaggactccgccgacaggatggagggtgtgtaccgcttgctcttgcatgaaagaaaactgatacaagatgatacctcacatacaaaacgtcgtgtatcaatgcagtatgagagagatgtgtgcactgctcttggaacaacaaagtggcagttggagcaatttgagcgagaagtgaatgcagcggcattgtctaataagtcaaattcaagggaaaatgccatcttgcaatttaggcaatttattagagctatagcggagcaaatttctcaggtggaagatagtttggagagtcttaggaatgattccattagaacaccaaaacattcatacttgactgaacatgatggagatgaattggcatcttttctttctggtagtaatagaaaggataatcatgtgatttattccactggaacagatgaaattgttgagctcaagcttgatagtgttcctgcagtaaatggttatcattccacccaagaacgtacatcatgtgaattcagatattcaggagaagatgtggaaggagcagccaagcctcaatgttcatgcggggaaaatgcatgtgaaggagatcataatggtagcagtatgcgtggtttggattctgatgattcaataggtaggaagcatcatttcaggagcaaactgagcaggaaataccacagttttatgcggaatttatggtttacaaatagaggacgtgagagttttacaaagaggaggaaagatggagaagttatggatagcttgagaaatggaagtacattaccttcattcaatctacctccagctggaagggctatgtatttctggcctgagcttatcaagaggagattaagtaaatttaaatgctctacacatcacaagcatcttcaagtccgtttagcaacagtactactaattgcccttgctgtacttggcttgctggttttgcatgtgagatgactgggagcagtatccggttttggtccctgttgtgtacgtgccaatcgccatgttgcactgtaccaatcaatcattttcatagttcctgatgggggaggatccgtgtgctattgagcaccatttgctattttatattgccattcgagggagacataggtttggcgtcatttgattgctcctaagtagcctggaccagcactgacatgagctgtgattttccacaaatccacattttttgttcagaactgccacgtgaatacacgatgtattgtattggcttgtttgtgatacttgcacaatcaagtaatcaaccattgtctgatcagtaagatgacaaagtcttctccagatttttacggtagcaatcctgttaatatattccaccc

SEQ ID NO: 20764 - DNA, 1304 bp, Oryza sativa
  ref <308>: DATABASE ACCESSION NUMBER: AK071069
  ref <309>: DATABASE ENTRY DATE: 2001-12-06
gataatagccctcactcgtcagtctgcttttctcacagaagagagcagatcactaatcgaataagaaagttggtgcgcatctgcttgtacgcaaaaaatggaacgagacatcaccagcctcccgactaaaagggttgctgtggtcaccggcggcaacaaagggatcggactggaggtgtgccggcagctggctgccgacggcatcacggtggttctgacggccagggacgagacgaggggcgtggaggccgccgagaagctcagtgggatgggcctctccagtgtcgtcttccatcagctggaggtcacggacagttctagcgttgctcggttggctgatttcttgaagactcgttttggcaagctagatatactggtgaataatgcagcggttggcgggatggagtacgtccaaggagtggataccaacaaggaacagttcgttagcatggacaagaaacaaagacttgcatggttgaataaacaaggccgggagacgtacgacgccgcaaagaacggcgtgcagacgaactactacggcacgaagattgtaatccaagccttgctaccactgctcctgcaatcctccggcgaaggaagaatcgttaacgtctcctccgactttggactactaagagtcgtcaacaacgaggatctgaggaaggagctggacgacgttgataacctcaccgaggaacggctggacgaggtgctggacagcttcctgaaagacttcgaggccggcgcgctggaggcgcacgggtggccgacggcgttcgcggcgtacaagacggccaaggtggccatgaacgcgtacacgaggatcttggcgaggaggcacccggagctgcgcgtcaactgcgcgcacccgggctacgtcaagacggacatgaccatcgactcgggattcctgacgcccgaggagggcgggaggaacgtcgtgacggtggccctcctgccggatggcggcccgaccggtgcgttcttcgctgagggcaaggaggcgtcgttcctgggatgacggcggagaggccaaaaagtgaggccctttggagacggagtacagactacaaaataattgagctattggcactaaattattataataaaaaataattagtatcaatatattacactgtagcaatgatagtttttctgtgataaataactatattttattgcaacgatttacaatcgtttttttatttagtatttttgttgcgatagaaaatgagatatcgccaaaaaaaaatcttattgttataaaaaacatgttctatcgtcataattttaatgtttgtggc

SEQ ID NO: 20765 - DNA, 1375 bp, Oryza sativa
  ref <308>: DATABASE ACCESSION NUMBER: AK071070
  ref <309>: DATABASE ENTRY DATE: 2001-12-06
ctatttgaggggcgggacagatgtagggattttcttgacaagtgcagctttcatgggtttgcagaccacagtgctattcttggattggttcttccatatgcgcggctcatattttaaatcttagctatcgtgcatggcagctaatgcttacttttaaacttattattgcatgattattgtggagattgtctaatctagaatgttttgacaatttctgtagctactattaacagtggtggtagcttgctgttaacacaggatgtgttccaggcagtctgttgtgaacactgttatgtgaacatagctctcaagctatgttacattgttcaccccgagcactaatggggcatgctaaatgcaagagaaggtgctgagctttctagtgcaattttggaagtgcttgttggcttttgatgctataaacctaataacttgtcttatattcttgctttgaataaatcggtgcggtggcaccatttcagtgacataatggaataagtgtttgatcggcatttaaataatgcaggtttatgcttttcgtttgctcacttggatgctataaacaggaattggtagttcacatggggtattaacgtttttttctgactgctacttgtatgatctgattcaagcctttcatgtgtttaaaaaggtgccgtgatggttcttgttttggtcttcagatacactttactgatccaggtgcggtggacgatggtgcagctgctgttgaaggatgaggctgcctccgcgtattatcttccctttacataagagttctttatctgtgtctcctctttgcttggagtgagatgcagttattataagcttatataactaatatcatcatcgtcatgtagattgctgctgctcctgttgagttacatttgtgaaaatggtagtgatgctagaatgtgacctagcacaggatacagagtttgctcttcttacctttttcctcttgagcccatgctgatactttctgctgcccacttttccctcttcattttggtagagagcctcctgcataatataatatactactaatctattgcattgcattgtgcagaagatagcacaacaggtagcaggtatgtgcaggtaaagaaactagagggcttcttgatttgttttcccttttttctccccctgcatgcctaggtggtaccctatgcagagtctgactctggctttaagcagttgtgcaatcagagccatggcattgccgcatcgtaatctgcagctctgggaagctggtgttgcctggagagtgggctggctatggcgatgtatttacattgtgtaattatcacctttgtactggaattatcagagacgtgggtgagcaggagagatgtgttaacgatccattagg

SEQ ID NO: 20766 - DNA, 1966 bp, Oryza sativa
  ref <308>: DATABASE ACCESSION NUMBER: AK071071
  ref <309>: DATABASE ENTRY DATE: 2001-12-06
gatccaaccttatccacactaccgcccctcctcctcctccacccacccagcgccgccgcacgcctccacagcgccgccccactcccacccaccccagcgtcgccccacccccagcgccgccgcacgcccacctcccctacctctgccggcccgcatccgcctgctgccaccggcccccttcacgtggccgtgcctcctcggtctcgtcgtctccgccttcctcctccctctccctctccctctcggcatctcccgaggcagcagcggcgcaggggcgggtcaacggctcccagcgcagaggctgctcagtggctccctggcgcagcggctgcccggcggcgccgcggctcgggattcggctccgagctcgggacctccacagcggcgaggataaggtaaataataatccacctaagaccaaccgattatgagctctctatgcccgtttgccaaactcgcctctgctggcgccacatgccccgtaaaatcagacaacaaaaccacctcatgtcctgtcacagccaacaatcacaccgacgacgacgataatgaaaaaactggcaatgctaacaccgatcctcgtgtggtgccagcaaagtgcccctttggctatgactccaacaacaccttcaagcttggcccactcagctgcgtggtctgccacgctctgctacatcaaagcagcaaatgcaccccgtgctcgcacaagttctgcaaggcatgcatattgcgctttaaggactgtccattgtgtggtgctgacatccaagggatcgagcctgatgatgagcttcaaggccttgtcgaccgcttcattgatggccatgcccgaatcaagagatcacatgctgcaggcgatggtgaagccgcaagtgacaagaccaaggtcatttacgagcatgtctccatggagagaggagcttttctggtccagcaagcgatgagggcttttcgcgcacagaacattgaaagtgcaaagtcaaggctcagtatgtgtgcagaagacatcagggaagagttgaaatctaaagaagacaaccaagaactgtgttctcaacttggagctgtgttaggaatgcttggggactgctgtcggaccttgggagatgctccttcagcaatcacttactatgaagaaagtgctgaattcctctcgaaattgcccaaaaaggatctggagttggtccatactctctcagtttcactaaataaaattggagatctttgctattatgatggggacctccactcagcaagaagctattatgcgcgttcgttggacgttcgcagaagtgcagtaaaagaacactcagctgtggcttcccaggtcattgatgtagcaacttctcttgccaaagttgcggatgtcgatagaaatcttgggaacgaaagcatggcagttgagggttttgaggaagcaattaaatgccttgagaatttgaagctggaatctggagaggccagtcttgagcagcggcgtctctcggttctcgactttctacaaaaacaactggatgacaagtgatatgcacggttctttgaagagcacactcacaggatatatgtactatccataacgaggatcagctccagtagtctctgtgatgcatatggaagggagttgctccagaatgaatggtaactggtgtgtatttgaggtttgctgcgacacagaataaatactttcaagttgtatatgtttcttgtgtctgccacgggcggagacctctttgagtcaagatggccacctcttaagccctgaggcaccacggagacgaaacttctcggaagtactggttccttgttgcctctgccgtgttatgtgaatgttatcccactgtatatttattgatgatataatataagaaaagaacagcacagatgttttgtatcgccctatcaaattaagttgttttgcatattctagcggcaattgagataatctggatgaggaatctcaaaagtc

SEQ ID NO: 20767 - DNA, 1416 bp, Oryza sativa
  ref <308>: DATABASE ACCESSION NUMBER: AK071072
  ref <309>: DATABASE ENTRY DATE: 2001-12-06
gagacgcgcagttgcaaccgacgatccatccatgcaccgccgttgcaatttgcgtttcaccctcctcaccaaaatcgatttgctccccccctccccctcagatcccaaatcactagtactactacctcactaccaccactccggcgactccgccgccgccatgcacccctcctcctcctcctcccacccgcccgatcaccccaaccccaagtccccgccaccacccgcgcccgccatgggctacccagccaaccacccacccccacccccctcctccaacgccgcctacttcgcctccgccgccccaccccccgccgccaccaacggcaccgccgccttcgccgtcgcctacccttaccctgcgccgccgccccactcccactcccacccgccccctcctcctccgcacgcctaccaccaccaccactacccaccacctcctcctcctcaccaccacccctacccgcctcacccgcctccgcccacctgcctccgccgcctcctcggcctcgtcgtcgccgccttcctcctcctcggcgccgccaccttcatcgtctggctcctcctccgcccccgcgtcccggccttctccctcgcctccctcaccctctcccgcgtcgcctactccgccgccaactcctccctctccgcctccttcgacgcctccctcctcgccgacaacccaaactccaagctcaccgtcacctacttctccccgctcgcctccgtctccctcgccccgtcctcccccatcgccgtcgccacgctcccgcccttcgcgcagccgccgcggaacaccaccacgctcgccttccgcctcgaggtggatggcgcatacgtgggtcccgacgacgccgcgccgctcaagggcgggggtgttggtaccatggaggtccaggtcaggctcgccgccgtcgccgtcttcgatcgcggtggctggcgcacgcgccggagggtcatgagggtcatgtgcgacggcgtgcccgtcgccttccgcgggaagaacgggatggaggcggcgttcactggccccgctcgccggtgcgatgtagtgttgtgaaggatcactgcattgtggtcattgactacctcagatgctgatctatgggagcatcttccgaaggtacggcaagttaactggcgctataagaagttgatctgccgctgattgatgagtgatagctgctgggttactatagtttacccggccaccatagaatccttaacatggaaaagtctggattgatttatccttaatgggtgggtatatgacttatgttggagataattggctagagtgattataccctggtggttgttttgcacactgagaggaatttaaacatgtatggaaccacagggaacattcatactttaagctactattgcttgaaagcaagatatgttctctagttc

SEQ ID NO: 20768 - DNA, 1541 bp, Oryza sativa
  ref <308>: DATABASE ACCESSION NUMBER: AK071073
  ref <309>: DATABASE ENTRY DATE: 2001-12-06
ggcttcctgcaaccacgaggtccgccgctctcgggagctccagcgagccgcgtcgccttctgcgcccgccgcccggtggccggcttaaatttgtgcgcggaggcgagccgtcgtcggtgccgcggggcttcctaattcctcccgggggagtgtggtcgagtgggggtttctggggttcttcgccacttcgccgcccgccgtttagtaaattcaacattttggacctacatgagttgattaacaagtccattccattgtccttcatggaggcttcatcttggttgtgctaccaagctcgtggttttggttcatccagagtatggttatggcttcttctagctcttgttcttctgaattgcagcctggtactctcagcctcgccgtatctggtcggtatggggagcttcgacataacaggacctgcagcagatgttaacatgatgggatatgcaaatactgagcagattgcatcgggaattcacttcaggctgaagtcacgtgcatttattgtggctgagcctaatggaaagcgtgttgtgtttgttaatatcgatgcttgtatggcatcacagattgtgactataaaggtgcttgaaaggctaaaagcaaggtatggtgatctttataatgagaacaacgtggctatcagtggcatccacactcatgctgggcctggaggttatcttcagtatgtagtttatattgtcacgtctcttgggtttgttcgccaatcctttgatgtaattgttgatggcatcgagcaaagcattgttgaagctcataacaacctccgtcctgggaaaatatttgtgaataaaggtgacctccttgatgctggtgtgaatcgcagcccaagtgcatacctaaataatcctgccgaagagagaagcaagtacgagtataatgttgataaagaaatgaccctcatcaagtttgtagacgatgaactgggtccagttggaagtttcaattggtttgcaactcatggaacatcaatgagccgtacaaattctttgataagtggtgataacaagggagccgctgcacgcttcatggaagactgggctgaacaaatgggcttgcccaaacagtcagctcatgcaaattctgatgatttgagatctttgcacaagacatctgtacttcctcggagagtttctactataattcctgaaccaaatgagataactgatgacttgatacaattggcatcatcctatgaggcctcaggtggcaggcggttggcaggttcaagtatcactaggcgcattagaagtactcaacaaaacaaacctaaatttgtttctgcattttgtcagtccaattgtggagatgttagtccaaatgtccttggaacattttgcatagacaccaatcttccctgtgacttcaatcacagcacatgtaatgggaaaaatgaactttgctatggacgaggcccaggataccctgatgagtttgaaagtacccgtgttattgggaataggcaatttctaaaggctagagatctctttgattcagcttctgaagaaatacaaggc

SEQ ID NO: 20769 - DNA, 1134 bp, Oryza sativa
  ref <308>: DATABASE ACCESSION NUMBER: AK071074
  ref <309>: DATABASE ENTRY DATE: 2001-12-06
ggccgcctcttcatttcccctcctccctcccctttgccccgccctctcgtccggccgtttcgtggccgtttccgtgggtcccatccacttgtcctcccgtgcaatttacgaaattgcccctatcatcttcgggtggtccccacactccacgactttctcttgccccctcccttttctccctccctttgtttattccccaatcgctatcgccgagcgattccgtctcgtctcgtctcgtctcgccgctgctctgctggcgtggcggcacgggggccgtcgagatgtcgatctgcgcgagggcggagccgccacgtggcggcgggacgctcggcaagcggaaggagcgggaccgcccgtcgtcggaggagcagcgggcgccgccaccgccgccgccgccgctgttcccggcgatgtccgctaggccccagccgcccaggccggctcaccccgctcggttcgtcaagcccatgccaccgccgccgccgccattccccaagggtggcggcgggagcagcttcaagctcatggcggggtacctggcgcacgagttcctcaggtccggcacgctcctcggtgagcggccggagtcgaacagcaaggcccccgcccccgcggcgagcgccgggccggcggcgcccgatccccgcacgcggtacgccgaggcgtcgctgctgctgatggccggcggagcccgcgtccccggcgtcgtcaacccgacgcagctcggccactggctccggataaaggagtagaaccgccggggccgtgaggcgcacggtcgccgtcgcggcattggcggggtgggtcgcttgcggtgccgcatgcacgtctcccgaagcgatcggagcgaaagaagagaagaacggatgcttcggacatggcaagtggttttactttcacctcgtctcttttccttttaaatgctttttttcatgttaagaaaaaaaaatcatgtaggtttgaacttgaaactgaaggcgctagcttagcttccggtgtgtttatcccccaactctgtgtctcaaaagtgtagcaaatggttgacgaatgacctatcaacgcacgatttgttgtgcttagtggatacatatatgtacagaattaaacgagatgttatttagccccgttaatgcc

SEQ ID NO: 20770 - DNA, 1086 bp, Oryza sativa
  ref <308>: DATABASE ACCESSION NUMBER: AK071075
  ref <309>: DATABASE ENTRY DATE: 2001-12-06
ggggcgccaccgccgcaccgagctcagcgatggcggcggaagcttcgagaacatcggaggcgcgccgcgacgccgtgttcggccgctgggtcgtcttctcgccggcgcgctcgcggcgccccaccgacctcaagtcgcacgcccccgccggaggaggcgggggagggggaggcgacgcccggggagcgcgccgtggtggggttcgggttccacgacgtggtcatcgagacgccgcgccacgacgtgcggctgtgggacctggacgcggccggggtcggcgacgtgctgctcgcgtacgcgcgccgcgtgcggcagctcatggagcaccctgcggtgaagtatgtacaggtatttaagaaccatggtgcatctgctggggcctcaatggcacactcacatagccagatgttaggaactccctttgtccctccctctgttaccacccggcttaactgcatgaaggaggttttcgagagattggggaagtgcagcctttgtgagttccagtccaaggatattttggtccgtgaaacacacaatttttctgcaattgtcccttttgcagcatcgtatccttttgagatatggattattcccagacagcatagttcctatttccatgaaatagacaaggatacggcactggatcttgggtctttattgaggaccatgctggcaaagttgtctaagcagctcaacgaccctccattcaactttatgatacacagcgcaccatttggagtctcatcatcctgtcttccttacacacattggttccttcagatagtgccccagttgagtttaatcggtggatttgagattggaagcggatgctacattaatccagtttttcctgaagatgccgcaaagattctgtgggagcttgactgctgattttagttgccacacgtttggcatccgattgtttctttgctttacaccggaacaatggacatgttccaccacagttttcctttttgttcagaaaaagtactatgctaataattcgacttgatggttaactccatatgtaacactggctctattatggatgaaaggggtatttgttcgatgtcatgtaatttg

SEQ ID NO: 20771 - DNA, 1027 bp, Oryza sativa
  ref <308>: DATABASE ACCESSION NUMBER: AK071076
  ref <309>: DATABASE ENTRY DATE: 2001-12-06
ggccgtcgccgccgcctccgccgcgtgcgaagcttggagagttcgagcacgggcatggcgtcctcggggggagcggcgatctcggcggggcccacgccgccgtcggcggcggcggcgtcgtcgtcggtggactggcacctgcggccgccgaacccgaagaacccggtggtgttcttcgacgtgaccatcgggtccatccccgccggccgcatcaagatggagctcttcgccgacatcgtccccaagacggcggagaacttccggcagttctgcactggagagcacaggaaatcaggtttaccacagggatataagggttgtcagttccatcgagtgatcaaagatttcatgattcagggaggtgactatatgaagggggatggtactggatgcacgtcaatctatggtaccaaatttgatgatgaaaacttcattgcaaagcatactggtcctggcctactttctatggcaaatagtggggtgaactctaatggatctcagttctttataacttgtgcaaaatgtgaatggctggacaacaagcatgtggtttttgggagggtgctaggggatggtatgcttgctgtgcggaagatcgagaatgttgcaactggaccaaacaaccgaccgaagctcgcatgtgtcataagcgagtgtggtgagatgtagtttgtaccttgagggtgactattcttggtgctgctgatgtagaaatagactttgcatggatgaaactactccagcattggaagcaccataagacatagctgtaccaaagtatcaattcaccttgaatgagtgtctgtctatacactgatgaaagttcatcctcacttcgtcagtgacatcagttgtcacttaaactgttgattaatattctaaacagggaatatgtgtgtctgttcgacttgaaccttcgtcatgtcaagtggagctggcattatattcagctgaacatgcttgatgaaatgatgagtcgatctgtggttgcacccattttataaagtatactaaactataagctgcc

SEQ ID NO: 20772 - DNA, 1804 bp, Oryza sativa
  ref <308>: DATABASE ACCESSION NUMBER: AK071077
  ref <309>: DATABASE ENTRY DATE: 2001-12-06
gttcatttttatttttccagcgccttgcatgccgtgttcttctcgccgcgggaggagatcgtcaccccgcggcgtcgtcgtcggcgtcggcggcggcgcgcgggggtcggcacgagggtgctcgcccactctcgcgtcgatccggcgatggggctgctgagctcggcgagcaggtcgtgctgctgctgctcctgggtgcgcggcggctgcgccagctgctgctcgtggatccgcggcttctgcggcggcggcgggggggcgacgacgtcggcgcaggacacggcggcgtcggacgcgaagaagaggaagaagcggaagtgggtggtgcgcggcgtcttcggcaaggccgcgcgggaggcggaggagccgctgacgctggagacgatgaagaagaggaagagcgccgcgacgagcccggagctggagaagaacaagtgggggaccaagaagaattggaagaagaagaagggcaagacccaaccgaccggcttggccagcctcgtcaaggagatctccctcgagaatagtaccaggaacagggcagcggcaggagagatactacggatcggcaaccacaacattccaagcagagtattcacgttccgtcagctggccgatgcaaccggctctttcagcccggaaaacctgcttggtgagggtggattcgggagagtctacaaaggattcatcccagacaccaaggaagtcatagcggttaagcagctggacaaggatggattgcaggggaaccgcgagttcctcgtcgaggtgctgatgcttagccttctccatcaccccaacctcgtcaccttgctcggttacagcaccgagtgcgaccagagaatcctggtctacgagtacatgccactcggttcattgcaagatcatctcctagatctgacaccgaactcgtcgccgctgtcatggcacacgcggatgaagatcgcggtgggcgcggcgagagggatggagtacctgcacgagatagccaacccgccggtgatctaccgggatctcaaggcgtccaacatcctcctcgacggcgggttcaacgcgaagctgtcggatttcgggctggcgaagctgggccccgtcggcgacaagagccacgtcaccaccagggtgatgggcacgtacggctactgcgcccccgagtacgccatgaccggcaagctcaccaagatgtccgacatctacagcttcggcgtcgtcctcctcgagatcatcaccggccgccgagccatcgacaccaccaagcccactcgcgagcagattcttgttcactgggcagcgccactgttcagggacaagaagaagttcgtgaagatggctgatccactgctggacatgaagttcccactgaaagggctgtaccaggcactggcaatctcatcgatgtgcttgcaagaagaggcgagcagccggcctctgatcagcgacgtggtgacggcgctcacgtttctagctgacccaaactatgatcctcctgatgacgttgagcctctgccgatcaaagccccgaatttagacagagagagtagccagaaagaagctgaaggaggtgacaacgacagcgacgagggtggtgaagagcaggtttagggggaacaacaagaagtagctgaaaatggcttctggggagggagttggaacatagagatgattaatcaaccatgattagatgtggttagagctgcaaaattaatatcactcaccctctcctttctcctttcaaaatatcactcaccctgtttttgatgtatagcacctataggaaagaattaacaacaggtttttgttcttt

SEQ ID NO: 20773 - DNA, 1880 bp, Oryza sativa
  ref <308>: DATABASE ACCESSION NUMBER: AK071078
  ref <309>: DATABASE ENTRY DATE: 2001-12-06
ggtccgtccccaccaaccggcagctagcgccgagaatgatccagcgcgacttgtgctcttggcgaccgccgccgccgcgtcgccgccggcagccatacccacgcgcaaatggaagaagtgatccaccgtcctgcagccaaccaggcgctgacacgacaataacgaacatgcaacttccggaggatatatggcagcacatacattcccggatgccgatgcgagacgccgctcgtgctgcctgcgtgtcacacaggttcctgcgtttctggagaggctaccccactgtcactatcgatcaagaaaccctgggattaagctcgcaacgattctggatcacgagcgaagacgagagaggcgagtacatcctcaccaaagcgcagaaggttcttgagagccgtctttccggctccaccattgtgcagtcgctcaagcttgatctctccaccttccggaaggctatagttagtgccactgttgcggtggcctcctcgactgctggctccgcgccttcgtgaagcccgggattgtggatatcactgtgttactcccaaagtgcgaggacgacgacgactgttactactactacggtcatgattgtctgcctgagtacacatttccctgctcgcttctctcagacgatgaggacaagataacgtcgcttcagtctctttcactgtcctcctgtggcttccaccctacagaagggatgaccacactgcttggctgctggaagagcatgtcgacggtgtgcttgcacagagtcgccatcacggacgaggagctgggtttcttcctcgccggctgccttgtgctggagcggctggatctgtccttctgcaattcgataggcgccctcaagatacctagtgcactccggcggctaaggtccctacgggtgcgctcgtgcaggatgctgcggaccatcgagagcggcgcgccgatgctcgccacggtctggtacgacgggtggccgctgctgaggttctggctcggtggcgcgctcgagacgacgcatctggaggtgcatgccactcgaatgggggacgttatccagtatgccggctccaagctcccctccgccgcgctgaatctcgaaacgcttgtgctgtcgactgtttacgagaggttgaaggcaccagtgatgcatgacaaattccaacaactcaagcatctcgtcatctgccttggccaatcaactatgttttgcgcaggctatgactttctctctttggctagtttcgttgatgcttgtcctgccttggagaccttcattttacgaattgcatatggtatcagatggtacaacgaccagaaccgtgggaatcctgacgatggagcttcatgtagggggcgggaggccagcaaactccgcaatggtggcatcgtcggcaacctgaggaaggtgaccatcaccggtttctgctcggcgaatagcctggtcgagctgacatgccatatcctcgtgatcgcagcgttatcgctcgaacacctgacgcttgacacctcccctggttacgacaggaagtgctcctcctatgatcggtgcaggaagatgagtacagaggctctccgggaggccgagacagccctcgccgctgcaaggaagtacgttgagccgaaagtccctgacagcgttaacctgatggttcttgggccctgcggccggtgtcacctgggcatggaattcggcagttagcatttttcttttgttataaatgggtttatgaatgttttaccaaataataagaactacaatttaaatatgcatgttgcaaagtttgtaacaatcggaatacggatgtcggatggagagggtaccgctaaacgattaatcggagtacggacgaataatcggaatttgacggaaatttaacgttttg

SEQ ID NO: 20774 - DNA, 760 bp, Oryza sativa
  ref <308>: DATABASE ACCESSION NUMBER: AK071079
  ref <309>: DATABASE ENTRY DATE: 2001-12-06
gggggaaaaaaaatgtcatcttccacctccgtcctttcccctctcctcgctcacgctcatggccgcgcctctcccacctcaagggcgcaacctctcatcgcttcccggctcaacctcgccggattctcggcctcctctccacgacggattctcccggcacctcgcgcgagcggcggcggcggcggcggggaggaggaggacagccgcgtgcaggagctgagggtgcccggttcttggctcacccctgcaggagcagcgcaggaatccgaatggctgagggaaacactgcacaagtggctcgacgacgagtactgcccggagccagccaatgtggacatcagcaacaccgctgcgcggtcattctacgagtccctgacggcgaaagagtctgacctgggagagatcttgctgaagatggtgggagatctgcagaagctgtcatacaaggagagcttccacggcgcgttctcggctgccaatgccgcggtgagtttgatatcgcagaggatggagtcatcatctgatgactgatcattgccaagcaattgctagatgggttttgcttttgaaccatcctagcagggaattggcatctcagatctttgtctactgaattgagttcatcaggtttctttgtgtgcctgggcgggcgcttggttgagaaaattgaaagatgatgtgatcatgtaattgtaacttgtaagtacttgcaacagtcacatgcgattttgagtaaaatacgctaatggttcttaaactt

SEQ ID NO: 20775 - DNA, 2171 bp, Oryza sativa
  ref <308>: DATABASE ACCESSION NUMBER: AK071080
  ref <309>: DATABASE ENTRY DATE: 2001-12-06
gggcttggcttgctgtccgcccgcgttcacaaggagaggagaggaggttgaggttgatcttgagtgtgaggagaggcgagatcggaaaaaggggaaatcggcgttgcgatgccgaagcgggtggccgacgagatcgcggcgctcccggagccgcgtgggcccctgcgccgcccctgcgccgacctctcccgccgcgtccgcctcctcgccccgctgctcgaccacctccccgcctcctcctcctcctcctcgagtactcccctcgccgacgccctcggggccgcgcgagacatcctccgcaagacccgcgacggcagtaagatcgaccaggccatgcgaggggatgcgttcctggacgaatttgcaggcgtcaacaggcagattcacctcgccttggatgccttgccctacaacaccttccacatgccccaagaggtccaagagcaggtcgcgctcgtccactcccagttccaacgagcctccacaaggacggatcccccggatacacagctttccatggatcttgcttgggctcttaccgacaacccttccgaccccgcccttctcaccaggatctctcacaagctgcagctgcacaccatggctgacatgaagaacgagtccatcgcccttcataacatggtcatttccactgccggagaacctgatggctgtgtcgaccaaatgtcttccctgctcaagaagctcaaagactgcgtcgtcactgaagatcatgccaacgatgccctcaccactaggtctgcctccattaagcataggtctcctatcatcccagacgagtttaggtgccccatatccctcgagctcatgcaggaccctgtcattgtgtccagcggccagacatatgagcgatcctgcatccaaaagtggcttgattctggccacaagacctgccctaagacgcagcagccactctcgcatacttctctcaccccaaactttgtcctcaaaagcctcatctcacaatggtgcgaagctaatggtattgagcttcccaagaacaaacagaattcccgtgataagaaggcggcaaaaagttccgactatgaccatgctggtctagtctcgctgatgaacaggctcaggagtgggaaccaagatgagcagcgggcagctgcaggtgagatacgactgcttgccaagagaaatgtcaacaaccggatatgcatcgctgaggcaggagccatccccttgctggtcaatctgctctcctcttcagatccacgaacacaggaacatgcagtgacagcactcctgaacctctccattcatgagaacaacaaggcaagcatcgtggactctcatgctatccctaagatagtggaagtgctgaaaactgggagcatggaaaccagagagaatgcagcagccacactattcagcttatcagttgttgatgagaacaaggtaactattggcgccgctggtgcaatccctccactcatcaaccttctgtgcgatgggagcccaagaggcaagaaagatgctgcgacggcaatttttaacctgtgcatatatcagggaaacaaggtccgggcagtgaaagctggaatcgtcatccatctgatgaacttcttggtggatcctacagggggaatgattgacgaggcacttagtcttctgtcaattcttgcaggcaacccagaaggcaagattgtaattgcgcggtcagaaccaattcctccacttgttgaggttatcaaaacagggtctcctcgcaatagggagaacgctgcagccattctatggttgctctgttctgctgatactgagcagacattggctgcaaaggcagctggagtggaggatgcactcaaggagctgtcagaaactggaacagatcgtgcaaagaggaaagcttctagcatcctcgaactcatgcaccaagcaaatgaggcatgaagcagacaacattcatttgtttaaatctgatttgtggtcgtcttatagctgtagcccattgtacacatagacatataaacactaaattgtttctcaattatgttgaagtttgatatatatatgtaggcagattttttaaaagggaatatgccgtaaacgtataaagtgttgtataatttatattgtaacttgctaccatgtacttgataaaactggtaaaaaaatccatgtgtttcagtttgctggct

SEQ ID NO: 20776 - DNA, 1602 bp, Oryza sativa
  ref <308>: DATABASE ACCESSION NUMBER: AK071081
  ref <309>: DATABASE ENTRY DATE: 2001-12-06
ggtagttgattagtactagttcgaccagtagtttcgccctttccccccttcttccaccatccactaacccccatctcaacgcaaaccaccctctccgccgcgcgcgcgaggcagatctcgacggggagcgcagccgccgccgccagatcccgccccgatcgcccccgcctcgtccccacggtcccgtggatacctctctctctctctctctctctctctctctctctcggatcggtgcgattgcctttctttttgcgcggcggggatcgggtgtgttttggggacggtgaaggagaggagtgaagtgtggaggcgaatcgaatcgatctgattaggagacctgccatttctgtgcttgattttgtttcgatctgctccttgggctgtagatctggaagggcttcgtgggatctgctgctcgagcttcgtgagttgcacaggaaagtcttgggcttttgcgctcagctccaccaccttcacctgttcctcgggccatggctgctctcgtcatctcgaagcagcgcagtcaccagcagcagtcatccgatcgccggaggaagccatcgtcgcacttcgcgtcaccccagtccatgcgtggcttcaatgctgtcaactgccgagccttccactccagcgtcagcattggcatcctgccatccccgcctccacccccagcgcgcacctactcctccccggagccgaagacgcccaagtcgcagccacaccacgggaagaagcggagcagggcaatatctataagcccttcaacgtctccgccatcccggcctgagctctgggctggccccgctttctcaaactctccgcctcccagctcgctgccgatacccaagttctcactccaccagaagcgcagtgtttcactcgagttgccacctgctggccgatcagatgatgtggtggtgcctttgcatgctaagtcagcgccttcgtcgccaaccgcaggctcaggtgtcagcttctttagtgatagtgatactgctatcgcgactgagaatctgaggagaatcctccacctgaaaatcgctgatcactgaatggatgatgggcaggtccttgtacataggctatctgcaaactaaccttggtagtgtgtatagagtaaccgagaatggccatctttcacctggatggtggttctgcatagttcatcaacaggaggtacttcaggcaggcaaagcacctcaagtatgcatggcagcgtgaaactgcggtgaatgacttggtggtgagactgttggttgtctggatgagagcacagcagtttctgggtagcctttgtagcttgtggtcacctctatgttactaatgttctttcagccttttgggtattccttctttaggttttagatcaccattatccatggtctcacatcattaacctttagtcgtagtctgtccttgttcctggtagttcatgcctggcagggtatgatagtgtcttagtactgttcaaatgcttagatgtctgcatctgattatctggcagctatccatgtgtgaaatatctgtaggatagcaatatcttgcagtgcatgcattttgcttcaccttgtagacattccttggttcctctggctcacg

SEQ ID NO: 20777 - DNA, 1184 bp, Oryza sativa
  ref <308>: DATABASE ACCESSION NUMBER: AK071082
  ref <309>: DATABASE ENTRY DATE: 2001-12-06
gcggttcccagccggcgttgctgctctccctctctgcaaggcagcgtgtggcagccggctggagagtagcagggctcgttggccggtgggagtagagtggctgctcttctctccctcccagatctccaccccctcggctccggctcactcgcctctggccgacgaggagggccacgggcggagcgaagcgaagcggcggacgggcgagcgaggcgggtgggcggggagcaaaccaacggcgacctctttccctcccgcatgcatcccgttgtctctccgctgccctcttgcgtggatctgccaccggcgcctggatcccatcctctccgccctcccctcgcgcggatccgccattggcgttgacgggaggggtggatccggtgacctcttctcctcccgcatggatcccgtcatctccccgctccctgctcgcgcggatccgccgctagcgacaacaggaggggcggacccagcagcctctcctacggtgactacaacgattggtggacgtgggctgacccagttcccggcatctgctgcggcggcgacagcgaagttgccgaggatggcatcacgtgcgacttcctgctcaagctgctccgggcggggagcatggtgggtgccgacgcggctctgctgcaggagctggaatccagggcggtgcatacctcgcctagttagctctcgaggccgggctgcggccgactgacttcgaggagatctcgcccgcgccgtgcttgccaacgaccgacgtccttgactcgccgtcagttccagccataaccgcctagcatggaagcacaccagataagcacatggattttgttgggctactgtgttgtaacacaagtttgccaaacatttatgtggcatcaacatctatcttggaagttgaagctgtagataaacattatcaacaacaaaagcaggatgtatcttctcgaaaacaacggaaaaagatttggatacatattggtatgagcagacagacctcaatccctgcactgcacaactgcattgctcttcgcaggtgaaacgaatctagacattaccactatatgttaattaattagatggtacttttagttcattcataaactaccttacaagtcttgattaatggaagtgtttatgttagtaattattcaagctccttgggtagaatctaatgaaattgaaattgc

SEQ ID NO: 20778 - DNA, 1078 bp, Oryza sativa
  ref <308>: DATABASE ACCESSION NUMBER: AK071083
  ref <309>: DATABASE ENTRY DATE: 2001-12-06
ggttcattccccctgcctgcctgctgcctctctcgtcgtctgcttgcctaccttcctctcctttctcttgcccgctccggttcttggtccgcaggcagggcgcgttcggatgctgtcccacgtcgagatggccccggcggccggcgggttcaagctgttcggcaaggtcatcatgcagtgcggcgtttccgaggggacacaggacaaggcgcagggcttcgtcgtggcccgggagaaggttgaaccggaggaggaggaggaggaggagcagcgtgtcccggctgctgctacgtcggggcagcgcgcgtcgatcaagcgggaggccgcggaccgcgacgaggagcaacggcaagggggcggggacgcggcggggcagccgacgcagcggcggttgcaggactcggccgaggcgcgtgcggccgccgcggcgccgctgccgtgcccgcggtgccggagccgtgacaccaagttctgctacttcaacaactacaacgtcaaccagccgcgccacttctgcaaggcctgccaccgctactggacggccggcggcgcgctccgcaacgtccccgtcggcgccggccgccgcaagaaccgtcccctgggccccctcgcggtcgcccaccataaccaccaccaccgcgcggccgccggcttcgtcctcggcttccccaacccgtcctccccaacctccccgtcgccggtctacaccgaccggtggccggtcaccccggaccgcccgttttgatcccgccatgcatccagtcgaaccaaccggcttggatatagcttccctttgacttgctgcagctgggttgcggaggctagcttggcttgcttgtacgtgaggcttacacaaacacatggtagatggagatatcgaatgggcttttctttcttttttttcttttctcctcttgctagtaccaccatcatagcatgcagcttctctctccttactactactatcctgctagtagtttgtttcttcctctttctccttttgttgttttctaaggttgcgggtgtaatgtaagaatggaagtgatgaggttgcggaggcaagttgcgaactccgtgg

SEQ ID NO: 20779 - DNA, 454 bp, Oryza sativa
  ref <308>: DATABASE ACCESSION NUMBER: AK071084
  ref <309>: DATABASE ENTRY DATE: 2001-12-06
gatcgatcacgatcaccatctaggcatgcaaaggccaaatctgcaagttttgataattttaccaggtgaggccaggaggtgagtgagagagagagagagatcaggaggaggttacagatcgatatatagatggagcccatggcgatcgtgacggtgaccggcggcgtgctgggcccggtgttcgtgctgctgtcgcggatccggccggtggtcgacttcttccggcggctctgcgactgcctccgccaccctcaacgccgccccgcccgccccgtcagggcgctatggaagcgcgccgccgccgacgagcaaaactaattaaaacgtttctattctacctctgtgtgtgtgttaatgacgacgcattaggcgttaaccatggtgggtaataataattaaccttgtaacacaatgttttgttaattgtgatgttatttctccgtgtcaggacatt

SEQ ID NO: 20780 - DNA, 2021 bp, Oryza sativa
  ref <308>: DATABASE ACCESSION NUMBER: AK071085
  ref <309>: DATABASE ENTRY DATE: 2001-12-06
ggccgccgtcgccgtgccgagctctcctcctccgccagatccgcactagcggctcggttattctctccggcacgagagacgagggttccccggcgagcgagcgagggccggcgatggcggagccggagcagccggagttcgcgcgcgagcggcacgtgctgtttctggaggctatggcgtcggagctccccgcggactacgcctcgcaggaggtcaaccacctcaccctcgcctacttcgccgtcgccggcctatctctccttcgtgagctcgacagtgttaacaaggatcaaatagccaaatggattttgtcttttcaagtacatcctaagacagacaatgaattagataatggacaattttatggattctgtggctctagaacaactcagtttccctcaactaacatgaaggacccttgccacaatggtagtcatcttgcaagcacttattctgcccttgctatcctgaagattgtaggttatgatttagcaaacattgataacaaggttcttttgtcctcaatgagaaacctccaacagccagatggaaggtatgcattttagttttggtctccatgctaattattcttgtaattatcctccaaaaatatctatgcatttacatctgctacctgtgtttagttttaactgtaccaccaaaagagtttcagccaactcacattctgtcttaagatttcataataccccatagttggcccacctccttgattattttttgtatgtgttgattgctacctttccatttgcatatgttttctctgcatgaatttagtcatgccatgtcgttcgacaaacttgatattggtaaatacctcctttctggtatatctctgtattgttggtcagtcttcaagcttgttcaatcagaatgttaattaatgtgctgtgatcctaactgcatgcatgtgatagaggtgtttgtgcatgtgcaatgcaatcttgcttgcctgtgagcatttcattgatttcactaagatggcttccatggttccattctgcaaacaactaaactccacgcaccgcttaaatgcattatcttattggccaacttgagaagcattttttttttagcttcatgcctactcatattggtgcggaaacagacctacgctttgtatactgtgcaggtgggttgcactgtcatttatatttagtatgctttcaattttatctttgtttgaaataacttgacacacttgtgttgtcttctcagctgcaatctgctcgatgctaaaagattggacaggaatggacaaggaaaaggccaagcaatacattcttagttgccagtcatacgatggtggctttggcttggttcctggttcagaatctcatggtggagggacattctgtgctgttgcagctttgtgcctgatgggtttcattcaagttgatttggcatcaaatttacaagaaccatcatcaattgatgtacgcttgctcctggagtggtgtcttcagagacaagcggcagacggaggttttcaaggaagaaggaacaaatccagtgacacatgctatgcattttggattggaggtgtcctaaagatcatcggtgcataccgcttcattgatcatggtgctttgcgaagttttttgctctattgccaatcaccttatggaggttttacaaagtttttgtacgatcaattcccggatatctaccattcttactatggacttgccgctctttccttgctggaagaggaagggctggagccactctgcaccgaactggggatcctctctgctgcattgtagcttggaattgattgttcatcttctgtattcagtcaagttatggtgttctttaaagtccattcttgtaatctaatacaacatacagctgaaaagaatgcaagtaatctatagagttcgtttgtttgtttgggtaggcaggtcatgcaacattgtcttggataatatgattgtgaagtacagaggagcattctgtaaaggctatttcattttcagttagtcgaactaactgatattctg

SEQ ID NO: 20781 - DNA, 922 bp, Oryza sativa
  ref <308>: DATABASE ACCESSION NUMBER: AK071086
  ref <309>: DATABASE ENTRY DATE: 2001-12-06
agactttttacggatctgccgttcccctccccccgcgccgccgccgccgccgtcgagtcgtgcccgtatcggcgtgcggcttcggcagcggcagcggcagttcagggatgaggaggagtggcggcaaggcggatccagcgacggctcggagacgaggaggttcgggcggtggatccggtgatgccgaggcgcgtgggtgccggatctagtagcgtcggcgtcgtccttcgctctgcctctgcttcgtcaactactcggccggcagtggcgatgtcacagaggatcccctctccagctagagggaggatgggcgccacccatgaaccggcgacgggatgggtcatgccggcggccgcccccactgttccctcgctttgaagagttggaccaaatttccggaagctgccgttgatggaggtcaacgccctgccctgaagcggttggtgtatgaagtagagaaggactgcatgaaagttctaaggttttgtggatcatactgtgaccatggcccggcggctgatattaagaaattgttccgaatatcaactgatcgtcatcctcgacacggccatcgtcaacgctcgtcgccggcggccaacatgaagggcaggggtgatgcagagatgtcgacttgggatgagcgcgccgcaaataacgactggctccggtggcaggagatttgaagaatcttggcggctgatgtcctctgcactgtaatttttttggaaagaacccatttctacttcgttgatgccaccgtctggcattcacagtcatgtaatactagtgttcaagatgaatgtctatatattgtctcccgtgtgtaattttctttactggtcatgtgatagaaccaaaatacaattgtcctgatatcaccatgtttttggtgatcttaatactattcgtaaagatattactg

SEQ ID NO: 20782 - DNA, 1044 bp, Oryza sativa
  ref <308>: DATABASE ACCESSION NUMBER: AK071087
  ref <309>: DATABASE ENTRY DATE: 2001-12-06
gaccgcaaactactcctcctctcctcctagcgaagagaagggaaagggtagcgaagccgccatcggcgtcggcgagcgaggagaagccaaattcctctactcgatccgagctccttcgattcgatccacctcgtctcggttcctctccaccccgcctgccaagatgagtttcttgttcgggaagcggaagacgcctgctgagctcttgagagagaacaagagaatgctggatcgatcaataagggaaattgaacgagaaagacagggattgcaagcccaggagaaaaaactcattactgagattaagaaaacagcaaaggaaggccagatgggtgctgtcaaagtaatggccaaagatcttattcgaacacggcatcagatcacaaagttttaccaacttaaatctcagcttcaaggagtttctctaagagttcagacgctgaaatctacacaagctatgggtgatgccatgaaaggtgttacaaaggctatgggtcagatgaacaggcagttaaatctgccaggattacagaggattatgatggagtttgagcgacaaaatgagagaatggagatgacgagtgaagtcatgggggatgctatagatgatgctttggagggagatgaggatcaagaggaagaaactgaggagcttgtgaatcaagtccttgatgaaattggcattgatattaaccaagagcttgtaaaggccccttcggctgccgtcgctcagcccgcagcagcaggaaaggttgcgcaggctgaatctgctggtgggaatggtgacggtggaatcgacgcggatttgcaggcgaggctggacaatctgaggagaatgtagatttccgaccggtgctgtgctgcactaactaaaaaaagagtgctagtgccttgtagcaccatatcttgtgaatatgtattttctactaaaagatttgcaagtgtacttagagatttggaaatacatactcgatatgtggtatactttatactaataatgatcgatgagcaacctctttgctccgatgtgtcattcttcttact

SEQ ID NO: 20783 - DNA, 1542 bp, Oryza sativa
  ref <308>: DATABASE ACCESSION NUMBER: AK071088
  ref <309>: DATABASE ENTRY DATE: 2001-12-06
ttggcgagagagagagagagagagagagagagagagagagtagttcagttcccattctcgcctgctttcctcactcgcgatcgcgactccccccctcctcgtcgccggaagatggagcctgatcagagtggtgctgagcagacttctccacgtgggaatgattgggaagttgtccaacttactgcatcaacatatgcatctgcacctggaccaagaatgtctgagccttctgatgaggctgaagtcaagggatatgacacaaaaggggatgattcagctgcagcactgttgatgtctggtcatttctcggtttcaccgagtgaggttgagagtctccttaggggcactgacggcaaagagcaccagaaggagctttctggccaagatgcagtttctgccgaaggtgatgacgaaaaattccaggacacctgtgagcataaactgaaggatgaccttcactggattccatcctttgacaaagggaaaaacctttccctggttgacatggagtttgataaagcattccaagggatgggtttggttggtgaggaaccacttgggttctcatcatctcgttacaatccaattgatgctaacaatgagaagaaaactgaggagccaactgtgcaaaatgtgaaccgtgtcattgattcatccaaggttgttgcatctagtgaacaaaacaaacctgatgattctgaatttccacacgaagcttcatggaagaagcaactcttatcactgtacaagaatgtgaggaaaagcaacaaattctggcccatcgttgttgctactgctttggtgggagtcacatgtttttggaggcgctggcagaagggcaagttgcagcatcagccggtcaaattgtatcccagcagcaatgagaaaattaaccaagctgtaggaccgttgaatcgcatcaaggacatccttgttgccaacaatcacccagctccagctatccatggacatgctcgattgagctgattatgctcaccaagtcccgccaacatgctcagtttatgagacatctcctgaatatgtacccacttgagtcatcatcatcagtgaagaatgaatgcactggggcatcatctactcaatactgaaaatcgtctgggtgtttatgcgttgaagttatgtaattgattcaaacccccccttggatttgtatttatgtgtttagtgtgattcatcttcttcctcttttgagagtactgctcctggtttgtcaattgcagtgccctttcaggttgctgcagaaaacttgtatatatatatatatatgatcatttaggttgatgatgtttttggtctgtctgtgttgtgtgatcctgcttatattgtcaacacttacgtttgatttcccaagaacagtttagcagaagctgtaactcgatgagtcaggctttcagataccaaagctttgattacatcacatattgtagtattgtctgaagccactactgggtctctttttaaaactgtgctatattccattttgtattactagcatatcatgaataaatacataattacccc

SEQ ID NO: 20784 - DNA, 1617 bp, Oryza sativa
  ref <308>: DATABASE ACCESSION NUMBER: AK071089
  ref <309>: DATABASE ENTRY DATE: 2001-12-06
gagaagatcaagaggctggcaatggagaaggcggacagggagaaggcgctgcacgaagctcagcgagagctcaggaacacccggcatcgggcgatggtggcagaggagaaatcggtcgaattgcagaggcaactgaaccttgtcaagggagtgaaacattccatggaaaccgaaatggaagccatggagaacaggaggaatgaactggaggggagaattgagctcgcccatggcgagatcacgagcttgctcgacaagggccgcattctggaggaacgtctcgagtccgaaaaggcgctgacgctggagctggctgctaagtatcagcagatggatgcactagaggcagagaggagagagctgcgtggtcacctggaagcatcacaatctgaagccaaaaatctcggtgataagatcactcttctagagaagaagctggaggaggagaaggcgttttcaacccggctcgcagtgaggtgccatggaatcgaagctctggaagagaagaagaagggtacagagcatgagttggagtcggcacgagaggaaattgcatctctgcagaagaaagttagcatcttggaactgaaaatccaggaggagagggcactgtctgagaaactcgcgacacggtcttgtgatctagaggcactgggtgtgcagacaaatgagctcagatctcagctccaatctgcaaactcagaaatcgctggcctgaatgagaaggttaagatgcttgaagaggctgaagagaagcacaagccattgactgcaggattggagtcccagctcaggttggcacaggctgaagccatgcgcctgaaggatcatgtcagttcgttggagaagaagctggaaagccagaagaacttgtcatctgcctacattactgcattggatgcttctgaagcccagaagaacaaattcgccagtcggtttgagctcaaagaggcggaagtggaggaattgcgcaggaagatccgtttgctcgaggaggaaattcacaaagagaaagcacaatcttctgaacttggagtgcaatgtcagaatttgaaagagcaatttaccagcagagctcttagccaaccaatgaaacctatggcaagtaaagaacttcacattaaaaaggagaaagagctagctcgtgcagcagggaaactggcagactgccagaagacaatagcttcactgaacaggcaacttaaatcgttagcagattttgatgagtttgtccccggattcgagaacgacagcgtaatagctgaaggctgggaggaaaatggtctgaaactgttgaactctgcaaattatccagcacaattgggatgtttggcggtcaaatgattgctgttgttgcgagaagactgccattgttttttgttctggctgtcatatgatcacatggttgttgtgatgaggagattgccaggatccttctgaagatgctatatatatatggagataagttaatagtttatagataagcaaaatgttcatacggaaacgatgttaataaagttattcaagccttgaagggaactatgtaaagattaattttgttccccttgtaccactcatggaaatgggcaattttcttttcctggcattaatagtagg

SEQ ID NO: 20785 - DNA, 1902 bp, Oryza sativa
  ref <308>: DATABASE ACCESSION NUMBER: AK071090
  ref <309>: DATABASE ENTRY DATE: 2001-12-06
gagagctcagctcgacgcaacgcagacgcaggcggcggcttcggcctacctcgatctctctcccatggcgcactagaccaaaaccctaaccctaggtccgcctcctccgtccggcggcaatggacgcgaaggacatcctcggcctccccaagaccgccttcccgtccgtccaggagaagaagccccgcgcgcccaaggagccgcagcggaagcccgatggcgtctcgcgcgaggtgtacgcgctcactggaggggtggggatggctccactcatgccgaccatcgaggcttcgcacctgaagcggcgaccagctgttgagaaggagaagatagcatggcagtggctacctttcacgtcctctgcacggactgacaaccttcaactttaccattgggttagagttgtaaatggtgctccacccactggtgactatcactttgcaaaatacaacaagaaggcggatgttctcaaatacaccgatgaggagtatgagaagtatttaaccgatcctgcatggagcagggaggaaacagataaactatttgaactatgtgaacgctttgaccttcgcttcatagtaatagttgataggttcccaactgatcgcagcatggaggatttgaagagccgttatttttctgttactcgtgctcttctgattgctagagctcggtcatttgatgaagttgctggtaatccccttgtgaaggaaacattcaatgctgctcatgagaccgagagaaagcgtgctttatctgcacttctctcccagacaaaacagcaagaacgaaaggatgctgagattttagcagaagcaaaacgcattatggaaactcgtgctgctagcaaacatactgaggaagcgggagcactggcacactttgataatgttgatggtgtatctcccttgagcaacacacacccattgtcaactgctacacttccagctgcagcagtgaataactccatacctgcttcactgcgaatgcttcgagtgtatttgagaacccaagcgcttgatcaaatggtccaagcagcaagtgcctcggcgggccttagagttatcaaaagggttgaccagactttacaagacctcggggtgaatttgaagcccaaggtcccgacgaaagcagtttgcgtcgagcatcttgaactacggaatgagatacttacactgcttaacttacagaagcagctgcaaaataaagaagctgaagtttcagctaacagagaaaattcctttacagaggcaccaagcacacctaagcgtgctaatagagatgttgatagaccctttgttcctgatactgttgggtttgcaggtgagagagcaggcaagcgggaccacaagcggaagaccactggaagatttatagatgcacctccctcaccaccccagtccaagaggcctcggaagttgaaagcatctgattgatgagtttcagattgagctgcatagaatttcaacaagccaaaacccctgatagtgctatggatcaactccattcttgcttggaagcttcccggcgtgcactttcaccaagagtttgctcccgtcggtagaagccgttcttggcttttgtctgtacagtgcatctgccctgagaaggttttcttcgtactcctcgttggaagatgagacgaatcaggtggaagcagctgctggcgtcactgagaagtgatcgccttgagcccttgacgtctccccctactcaacgaagagtgtaactgtttcttttgtttgtttgagctgtagctaccgtttgtaaaatgagttatctgacaataccgtgtttgttcaagtagaactgtaacacaactgtttacacccaatcaatcctgtaatcttggacaatttaacgaggaaccgcgatcccaatgcaaacctgagcctggtttcc

SEQ ID NO: 20786 - DNA, 1419 bp, Oryza sativa
  ref <308>: DATABASE ACCESSION NUMBER: AK071091
  ref <309>: DATABASE ENTRY DATE: 2001-12-06
gagaagtggaatattgaacggtggaacgcgtacttacccacaagttaggtgcatgccatggcaccattcatggcgtgcgcctcgccaccggtactcacgctggccctgctcgcgtcgtgcggtgcccttctcgccacctccatgctcccggcgcgtgcgacggcgggcagttgcttggacgtcggcgacatggtgatgatggacaggttccgcgcttggcagggagctcacaaccggtcgtacccgagcgcagaagaggcgctgcagcggttcgatgtgtaccgccgcaacgcggagttcatcgacgccgtcaacctgcgcggcgacctcacttaccagctcgccgagaacgagttcgcagacctcaccgaggaggagttcctggccacgtacaccgggtactacgccggcgatggccccgtggacgactccgttatcacgacgggtgccggagacgtcgacgccagcttctcctaccgcgtggacgttccggccagtgtcgactggagggcccaaggcgccgttgtgcctcccaagtcccaaacgtcaacatgcagtagctgctgggcgttcgtgacagcggcgaccatcgagagcctgaacatgatcaagacggggaagctggtctctctgtcggagcagcagctggtggactgcgacagctatgacggcggctgcaacttagggtcgtacgggcgggcgtacaaatgggttgtcgagaacggtggcctcaccacggaggcggactacccgtacacggcgcggcggggcccctgcaaccgcgccaagtccgcgcaccatgccgccaagatcaccggcttcgggaaggtgccgccgcggaacgaggcggcgttgcaggccgccgtcgctcggcagcccgtggctgtggccatcgaggtcggtagcgggatgcagttctacaagggtggcgtttacacgggcccgtgcggcacgcgcctagcgcacgccgtcaccgtcgtcgggtacggcaccgacgcgtcttccggcgccaagtactggaccatcaagaactcatggggccagtcatggggcgagcgcggctacatccggattctccgcgacgtcggtggccccggcctgtgtggcgtcacactcgatatcgcctacccgaccctgaccctgtgaacgaagtcaacgaacggcatgaaaagacgcgcagatatgactatatcactgtacacacgactaccctactataccgtgagtgtctgccgacgagacgtatccactatacatgtataaattgtggaccgtgcctaaataaaatgcatgctgcgcgcgtacaactatgtgaactagaggctggggcgcgccaatggcgcgccgcctgtagacaggtcgatggaaagatgcgatgcacacgttctcttaactaagaaaagctaaaaagcatatggt

SEQ ID NO: 20787 - DNA, 1463 bp, Oryza sativa
  ref <308>: DATABASE ACCESSION NUMBER: AK071092
  ref <309>: DATABASE ENTRY DATE: 2001-12-06
gattcggcggccgcaccctcgatccaaaatccccaattcgccttccacgaaaccctaaccctagttctccgtctccggcgggctctaccggcggcgaggcaagatgccggcgacagcggggcgcgtgcgcatgcccgccaacaaccgcgtccacagcagcgcggcgttgcagacccacggcatctggcagagcgccatcggctacgacccctacgccccggagaacaacaagcaccagcctccctcctcctccgtctccgccaacgccgccgccgccaacgccgccgccgcatccgccccatccgcctccgctccttcctcctcctccgccgccgcctcctccgacaacgcctataccagcttccagggcctcctcgcgctcgcccgcatcaccggctccaactccgacgagacccgcggcgcctgcaggaagtgcggccgcgtcggccacctcaccttccagtgccgcaacttcctctccgtcaaggaggacctcgacatggaggacgatattgatgccgggattcgggccgcctcgcaggccaacgcccaggccaagttggacgagttcaggaagaagacctccggaggcaaggacgccgacgagggctccgatgacgaggatgaggacgacgaggaagacagcgatgattcctctgattcggacatcgatcctgagctggaaaggataatcgctgagcgtgagcgtgccaagagtggcaggaagcattcaagggatgaagagaagaagacaagccgccataggagcagcagcaggggaaggtccaagcacaggaggagcaccaagaggagtgataccgaggacgacttagaggaagagaggagcaaggacaagaagaagaagagtaggcgcaagaggcatgaaagatcagatgaggacagcgagagtgattctgacaagaagaggcataggaagagcaggaaggacaggaagaggcgtaggagccatcgcaggagtgatgacacatcggatgaggatgagtctggaggtgaagacaggaggcgtcgtcgccatcgcaagcgccagcaccaccacaggaagggtgcatccgacggtgattctggaagtggtgccagtgactctgcagatgataggaagcgatctagcaggcggagaaggcaccgtaagtcagaaagtagtggatcagatggtgatgaacgacatggtcagggggcaaagcggagcaaggaaaagaggggcaaagaagagtgctgaagtggtaatttgctctcaagtgatattatttacaccctctattttaccgacaatgcttatctttgtcctctgtcctggtgtatgttgttatttcaagcatcatgattgatatgtataagtgtagtactttgttccagtgagtgaacttcaaacttaatatgcatagaacgttttaccttgaacttgatagtttgtctgtattttaatgaattggctttgtttctcg

SEQ ID NO: 20788 - DNA, 1983 bp, Oryza sativa
  ref <308>: DATABASE ACCESSION NUMBER: AK071093
  ref <309>: DATABASE ENTRY DATE: 2001-12-06
ggttcatggagctcagtttggccgaaatttcaggaagtatcagggttttctgccgggtccggccatcgatttcggccaacaacttcatgaccaaatcgccggttaccgtcgaaaacgagaagatcgtggttcgagcagtggggatcaagaaagaattcagtgttgacagggtgtttgatcaggagtcaacgcaagaggatgttttccaagaagtgaagccaattctcagatctgcacttgatgggcacaatgtctgtattcttgcttatggtcaaactgggacaggaaagacctatacaatggaaggaaataatggtaagctcggtatcgtcccccgagcgattcaagaactgttttctcatgcttctcaagacagttcatccacatattccttctccataagcatgcttgaggtctacatggggactgtcagggacttattgacaccaaggcagcctctcttcaggtccacagagtgcaacacatcgtcaatcatcagcatactagcaactaaaagtggagctgtagaagttgagggtctaacagatgttgcaattcaagacctcaagaaggccaaccagtggtactgcagaggacggcgtgcacggtcgacgtcttggacaaatgttaacgatgtttcgagtcgatcgcattgctctgtttgtgtgtagcttgacaagaattaccataaagagaagtagtggaggtaccactgaagaatgcagcaagctatggcttgtcgatcttggtggaagcgagcggctgctgaagaccggtgcatctgggttgacaatggatgagggtaaggccataaacctctctctgtcagcccttggtgatgtcatcgcggcacttaggcgaaagagaagccatgttccttacagaaacagtaagcttacccagattctcagtgattcacttggtgatgggtcaaaggttctgatggtagtacatatcagcccttctgatgatgatattggtgaaacagtctgttcactgagctttgcgaaaagagcccggtcaatcgagtccagcaaagaactttcagaagacataaagaagctgaagcagaagcggatcgcagagcttgacaaggaaatatgcgacgccgagcaagagctcaaggatctcaatgaacagataaagagagctgaaacctcacttgaagagaggaagaagctctcttcatctgcctgtcaggctctcagtgatgagaaggggtcaccaagaagcactctagtggtagtaggacacattgattctgcagagagccctcaagccactgagaagacaaagagcagagcatctcatggatcagttcctcacttcatgtccccaacagtttgcagcaggcaaagacatagttcagcaagccactctgctactaaaacaaggctgacaaaatcagtgaacaggtatcctgcagctgagctcagtgggagccattccttcagctactcaagctgcaagaatgcagccaaggctaggtcagtggcattctcatctagcatgcccaagatgaaatgtttgccactcaagtctgatcagatcaacatgagcaacaacagcatcgattcgacggcggcgtcagcgcctcgaaggagggagagcttcatttctagaccagctcagagagctcccttgcatcaacacaggagaaggatgtctagcctgacataatattacagaaatactgattgaacagttatgtttttaacaccctgtttagtggtgatgaaatgtttatgaaatatgtttttggttttgtgggtgcttgatggtttgcttgttaccggagtagttcttaacttctgtaactaattcagggccttccttcgttgtttttggtttggaatggaagggcaaaagggtgtggggggttcatgttaagtataactgtaatgggtttaactgatgcttttgattgctctctgactatgtaatcttgacaaaagaaaagaaaaactatacacatcaagaatt

SEQ ID NO: 20789 - DNA, 1616 bp, Oryza sativa
  ref <308>: DATABASE ACCESSION NUMBER: AK071094
  ref <309>: DATABASE ENTRY DATE: 2001-12-06
ggtgcctgtcgtcttctcgcctcttcgtctcctcgtccgcccaaatccgagctccctccgctggcggcggcgccggcgattcctcgcgcgcgctcctgtttcacgagggtggcgccgacgcccgccgcctgttcggcggaatgtctgcgcggaaggaggccaagggatcggccggcggagaccgcataggggccctcccggacgaggtgctccaccgcgtgctctccttcctaccggcgcaggatgctgtccggacgtgcgtgctagccccgcgctggcgccacctctggaagtccgccacggggctgcgcgttggcgaggacgagagcaatctggggagtgtgaaggagcagcaggagttccttgaccatctgctggtactccgtgatagcgcgcctcttgaaacctgcgtgctaaggttcaattggtatgacgacgatgacttcgaggacatattccggctgaacgtctggttcaggtatgctatccaccgcaaggttcggttccttcgactcgatgtctggcaggaagaggaatttggcaacccggttccgatagatgagcagcctattgtctctcagcacttgacaaggctacagctttatggtatagtgctaaacgacggcttgcttgacttctcaagctgcccatcattggagcatctagtgtttgagtcatgcgtatttgagtgtgccaagatctcatctaactccgtaaaacatctgagcatcacgttttccaatttccccgctgggacctcacgggttcgtattgatatcccgagtcttgtttctctgcggctggatcgcatctatgaccgtaagccagtgcttgagaggatgccatcattagttgatgcatttgtcagtgtcccaagctctagtgaagacttctgtggtgaatctgactctggggattgtggtcgtgacggctgtgaatcttgttatggtttcacgaacaaaaattgtgtgcttttggaaggtttgtcggaagctaagatgttggtgctgataaacgaagatgaatcgtttattttcaaaagggatttgaaatggtgcccaacatttagcaagttaaagactttgatactcaatgggtactggtgtgtgcctgatgattctcacatgctagctcgcattcttgaacactcgccagccctagaaaaactcgttttccagcttggttaccaggcatataaacgtacaaataaaattaaaggaattctcaatccaatggagagatcagctggaatatcagaacacctccagatagttgaagttcaatgcaatgcgattgatggtcaggttcttaaagttttgaagtacctgtcaacatttaaaatatatttcagtttggaggaagcgacgattgagagttagatgatcatgatgatgacgaaaaaggcttgatgcacaagttcttgacaattagaagtttgagctgggaactacgttatctttcctctatgtgtttcttcaaagaactttagctttgccttgtaatgggccgtttacattgtctagtgtctacctagaaatgggtttctcatatgcggatggtttgaaattgattgtaaaaggacctatttcaccaagtagtgctaatttatccctttt

SEQ ID NO: 20790 - DNA, 1460 bp, Oryza sativa
  ref <308>: DATABASE ACCESSION NUMBER: AK071095
  ref <309>: DATABASE ENTRY DATE: 2001-12-06
gagtccaactgttcaagtcccctcctcttctttcttctctcctctgcttcctcctgaagcggatgacgtcagcaatggcgatgagcttcctctccaccaccgccgcctcctcctcccagccacccctacccgcccgccgcctccctcgccgcaatccctccctccccttccctctcagaccaccacaccgcctctctcccttctccgctccccctcccgagccccatcgcctcacctaccgaacccactccacctcctcctcttccaggacacccaccgccgccggcctcctctctccggtcatctccacctcgagaaccctcatcttcctccttgtcgcctccctcctctccctctccggcgtccgccccctcccttccctcgcatcccctcccccacctacccaacaaccgcaagaaacggaagagcaagaacagcagcaagaatccgaggagaagcagcagcagcagcaggaggaggagggcgtggaggcggaggtcgaggaggcgtggctgcggcaagacgaggaggaagaagtagaagagaaagaagaggaggaggaggaggccgatgacgaggtgcagatgtacatggagatcctgagccgcgatccgggcgacgtggacgcgctcaagtgcgcgctgttcgccaagatgaggcgcgcggagtggggcggcgcgctggggttcgcgcggcggctgcgggaggcggagcccggcgaggtggagtggcggctcatggaggcgctgctgcacgagctcaaaggcgacctcgccgaggccgagcgcctcttcaacgaggtcctcgccgagaagccactcctcgtcagggcactccatggacttgctctgtgtatgcataaaagatcagaaggacctactgtttttgagatgctggagaaagctttgcaacttgcaatttctggggaaagggttccagaagagcgcaacattaagcttttgattgctcagatgcatgttgtcaagggccagttggatgttgcatcagagaaactgcaaaatcttatcaatgaggatcctcgagatttccgacctcatctttgccagggcatcgtttacgcacttttagacaaaaaggaagaagcagatgagctgtttgatacatatagaagtcttgttccagatgaatttccagacaagagttttattagtgatgttatacaagcagccagagtggagtccaaggaccggctacaaaaggattttggatctgaatttttatctaagaagtgactaatcaggatttttctacacctgaacggctaatagtttttgtagtggtaggtagctgcatattgatgtgcacacaagtgcaaaaatgttacaagtgaattgaaataaatagtgagaaatggaaggagatgtgtatctcctaccaccaattttctcctaacattgaaataaaatagagataaatggagatgtgtttctcccattacc

SEQ ID NO: 20791 - DNA, 1398 bp, Oryza sativa
  ref <308>: DATABASE ACCESSION NUMBER: AK071096
  ref <309>: DATABASE ENTRY DATE: 2001-12-06
gagcgaaaaagaaggctcgatttggtcatcaaatcgctcgaattgatgcggacgacgaggaggcatccactgcacgatgccatcgacgccgcccggtgggacgccgagcctcccctcggccgcctcgtcgtggtcgcccacgccgccttcctccacgccggcttcgtcccctacagcgccggcggcagctcgtcagcgtctcgtcgtccactcccggatgagatcggcgcggtggcttcgtcgctctcgctccgctacaccgtcccggagctcctgcgacggacgacgacgcaaaggcgccgtagccgcgccgagaccgccgtgctgaggctatgcgcgcacggcgaccacgtcgtgttctacgggtacctcaccggcgacgccaatcaggtccagagactccagacaaccaggcactgggcgtgcatcgacgcgctaagcgtcgcgtccgtcctcctctccggcgaccttgatgcgacggcgcacgcgctggccgacgacggcgccggcctctggaagaagctcgccggcgggctggcccggcgactcttcgtggacatgtgccggaagaacagcaggctcctgccgccgcgcctgacctcgctgccgcctgacctgcaggaggacatcctgcgcaggctcgccgtggaggacatcgcggcgatgtacttcacctgcacggggctccgcgacctcatcgccggcagcgaggtgttgaacaacaatttccagtggggggagctgtggatgaacttcgcatggagccagggttatctacggcggtggctgccatcaccggcgagggtggtcgtaggtcggcgaagtcaaacaacgtcgtttgtcgccggagacggtgaggataggtgcaggtggcgggatccaacaaagcagatgatagagcgtttcgtggagaagaggagtaaggttctcgcagccggcggggacggtggccggcggcggccggtgatggcggcgcgaggccggaggaggggagacaaaggcgccgcatcttcccgtcagaaatggatgcatcgctgattcgtctacattggccgcgaaatgtgatttggtatattggactgaatgactaccacgacgacaacgtacacgaaattttacgagattttctctggtccaacaacaaaaagttcctcaaggtaccagcacctcgaggtaatttttgttggacctgagcaaatctcaaatattttagttgttacgattgataatcttctgttttatttgaagttgtgcgggtaattgttcacatgttgcagtcagggatcgaaatgtctgtaatttcggaccacggtaagcaactatctcgtccatttttttttcaaattcgtgtgaatttgtttaaactttgttcaaattaaaaaaattgttaacatttcg

SEQ ID NO: 20792 - DNA, 1518 bp, Oryza sativa
  ref <308>: DATABASE ACCESSION NUMBER: AK071097
  ref <309>: DATABASE ENTRY DATE: 2001-12-06
gttatccggcttccagacgcttctctcctcctctaatctcaagtctctgtctcgtcgtcctcgcatctccactcgccatgggcaagattaagatcggaatcaacggtttcggaaggatcgggaggctcgtggccagggtggccctccagagcgaggatgtcgagctcgtcgccgtcaacgaccccttcatcaccaccgactacatgacctacatgttcaagtacgataccgtgcacggccaatggaagcacagcgacatcaagatcaaggactccaagactctgctcttgggcgagaagccggtcaccgttttcggcatcaggaaccctgacgagattccgtgggctgaggctggtgctgagtatgtcgtggagtccaccggtgtcttcactgacaaggagaaggctgctgctcacttgaagggtggtgccaagaaggttgtcatctctgccccgagcaaagatgctccgatgtttgtctgcggtgtcaacgaggacaagtacacttcagatattgatattgtctcaaatgctagctgcaccacaaactgccttgctcctcttgccaaggtcattcatgacaactttggtattatcgagggtctgatgacaactgttcatgccatcactgccacccaaaagaccgttgatggaccgtccagcaaggactggaggggtggcagggcggccagttttaacatcattcccagcagcactggtgctgccaaagctgttggcaaggttcttcctgatttgaatggcaagcttacgggaatgtccttccgtgttcccactgtcgatgtctcagttgttgatctcacagttagaatcgagaaggctgcctcatatgatgctatcaagagtgctatcaagtctgcatcagagggaaagctcaagggaatcataggatatgttgaggaagacctggtttctactgactttgttggtgacagcaggtcgagcatcttcgacgccaaggctggaattgctcttaacgataactttgtcaagcttgtcgcctggtacgacaacgagtggggttacagcaaccgtgtcatcgacctgatccgccacatggccaagacccagtagaatccttttgcttgccatggtattccatggccgccgagccggagataccggtatgctttgtctatgctgagaataaaacgtggacggtgttcatcaggacccaccccctctgttaatgctagttgggataatgagttgcattttgttttccaatctacctacttgtaagttgtaacgatgctgatgatatggacctgagtctacttttttgcttgtgaagaatataagccgtccagtgcagttgtaattttgttatgctggttgcatatatgggctttgtgtttggttcgtgctacctcttcacttctgcttgtttgtttggtcgtgtagggcaacgtctcatgatcagcttagtttgctctttcgtagttgctctcaatgtttattactccagaataacgtggcctttgcgattcagttgtgttgg

SEQ ID NO: 20793 - DNA, 1505 bp, Oryza sativa
  ref <308>: DATABASE ACCESSION NUMBER: AK071098
  ref <309>: DATABASE ENTRY DATE: 2001-12-06
ggaacgaaacacgccttcttccccaacgaccaaaccaaagtttgggtgaagaaaaaaaaatatcgccgcgtttttatcccccacgagacgagtcgagacgaccaaagcctaactaatcgggggcaagacgaggaggagagcggattctcgtcggcttcggcgaccggaagaggagaggagaccgaccccgcgccgtgttccgccgccgccgccgccgccgacgacgacgacggcaagtaggaatttgattctcctggggaattaacttgttaggagaaaaggaatttgggatgggcgaccatgtggtggtgaatgtggaaggcttgggaaacgatggaggggctgtggagaagccatctgaggccgtgaacagctcagtggtggctgctgcgtcgctttctacgactgttgatacggtcgaggagggcggtggagaggaggagccgctcatccaggcggcggagtgccgtatatgccaggaggaggatagcatcaagaacctcgagaagccttgtgcttgcagtggcagcctcaagtatgctcatagagcttgtgtgcaacgctggtgcaatgagaaaggagacattacatgtgaaatctgtcatgagcaatataagcatggatacacagctccacctcgtgttgaaccagacgataccatcatagatatcggtggtgattgggcacgtgacccaagaattattgctgtagcggctgcacaacgtcgtcttcttgaaactgagtatgatgaatatgctggtactgatgctagtggtgctgcattctgccgttctgctgcacttatactaatggccttgttgctattgaggcatgctttgtctatctcagacaatgaaggagatgatgatgcttctaccatgttctcgctctttctacttcgagctgctggatttctgctgccatgctatatcatggcttggatattcagtattttgcatcgccggcgacaaagacaggaagcggctgcaattgctgcagcagaggtggcattcatcctgcaatcagcccaaggccatgcccttcagttcaccatcgctccagactcccccgccactccacagcatgagccacagcagcagcagccgcagccgcagccgcagcaatagctagttacttcagtagcgtctctcaactactgactcgcacatgcagaagaagaggatacctcagctagtggccgctttgttgtttcctgttgcaactggcccagggacgctaagaacctggcctcgccttgtgtggccgggtagaaaccttgtaaaacgccagagattcatttgttgcaagcgaccgcagcttaagccccgctacccttcgatttgtctctgtgtaactcaagcattgatttattgtaaatttgtcgtctgttggagtccatttttttagttcctttgccaagtgttttactgccatgtacagtattattacatgggagcttttatctttcaaagaattaatctgagtgagtgtgaaactgttaggcc

SEQ ID NO: 20794 - DNA, 1682 bp, Oryza sativa
  ref <308>: DATABASE ACCESSION NUMBER: AK071099
  ref <309>: DATABASE ENTRY DATE: 2001-12-06
ggatccccaatccccaatccccaatcgatcaatcctcacttccccagccagcccgtctgcggagaaatcgatcccgcacttcctgcagccgccgccgatcccgcatcgctccaccggctactgccttttctcatctccaaccttcgctcttcccccacaatttctgcctgtctacggctgtggggttgcctgctgctggttgtcgttcagcgtccatcgggcaggcagcagcgttccagtggatctcattgacgccggccacaacgcccggttcaacaccgcattccccttggctcaccctctccggcgatgagctcgagcgggcgaggcggcaagcggcaaggggcgccgcccccagcgccattcggggctgcggcgaagagggcccaaccccacggtgggcacctagcagatgactccatccgcgctagcggtgacctctcatctcctatcggttcagcgcctaacggtcgctgcctcctcttccacaggtgtttttcaggaacatcaaatttatgtatgcttttgttatgctcgatgaaatggatgaatcggctgtacatgatttgtcagctcgctgccacactatgatcagcaaaggcgcaagttgatccaatttccatctgcatctggtccttggtctctgatcagttatcaatttgcaagagtgcttgattttccaagtttcgataccggacaatcttccttgctatgacaactaagatgttctttctgtacatctatgttctcccactgtactttagttcgttgttagttgagttagatttagtgtgaagcaaatagacccgactctctgtaaagttagtattgtatatgatttcctgtttttagggcattcagcaagtgcttatggttaagaactacactacattacaaagttgccaagaaaatgcaaggtgacaatatcttgtggccatcaaaaattgagattttcagtgactgtcaattttttcttgtgttctacagtgtgctacattgctcaggactgcctcaggtaaatagaaaactataatatagcgcaatatcgtcttacgtttcccatgaggccatgactgttttctgcatgatctgctgctacctaccgggcaagcactggtgttatgttttggactgaccatttgtaaatctatttaacctttaatatgtactaaaagagaggattcttcagcggtgttttactgtacatctgtattaatatatttctttgtgcatagcatttcaggccagggacaggctgcccaggacgagtggaaataattatgtaatatttgctaggtattacttcctactcttacttctacgcttctcgcttcatttcagttgaagccatcaagacattgtccagaccgaaatcatatattgttattatccagtagattatcaagattactgtctgttttagttcaagatgttccctgaatagcagaactggatggtagctgacagattcggtaaagttcaatactctaatcaaaactggatatggacatcatttagatcaagttgctttctaggttcaggagatcaagctgggtgagaacatcagagtataatggttgtgatggtgagagcaccatagtatggtggatagggctaggtgaggtttgtacaattcattctacgatgcatatcttgcagttgggagtcatgatctttctttc

SEQ ID NO: 20795 - DNA, 1152 bp, Oryza sativa
  ref <308>: DATABASE ACCESSION NUMBER: AK071100
  ref <309>: DATABASE ENTRY DATE: 2001-12-06
gcccgtcgcccaccccttccgctttccgccgccgccgccgccgcagcagcagccatgtcgtcgtccgccaccggcgtgaacgtctccgaccgtccgatttccccggacaccacccgcgtcgcctgggtcgggacgggcgtcatgggccaatccatggccggccacctcctcgccgccggctacgcgctcactgtctacaaccgcacggcctccaaggccgaggggctcgtctcccggggagccaccctcgcggaaagcccgcgcgcggccgccgccgcagccgatgtcatcttcctcatggtcggcttcccctccgacgtccgctccacctccctcgacccctccacgggtgccctcgccggcctcgccccaggcggattgctcgtcgacatgaccacttccgaccccaccctcgccgcggagatcgccgaggccgcggccgccaaaagctgcgccgccgtcgacgccccggtctccggcggcgaccgcggggcccgcagcgcgacgctctccatcttcgccggcggcgacgcggccgtggtcgcccgcctggcgcccctgttcaagctgatggggaacgcgctgtacatgggcgggccgggcgccgggcagcgcgcgaagctgggcaaccagatcgcgatcgcgtccaccatggtcgggctggtggagggcatggtgtacgcgcacaaggccgggctggacgtggcgaagtggctggaggccatctccacgggcgcggcggggtccaagtcgctggacctgtacgggaagcggatgctggagcgggacatggcggccgggttctacgtgcgccacttcgtcaaggacctcgggatctgcctgtcagagtgccaggccatggggctggcgctgccggggctcgcgctcgcgcaccagctctacgtgtcgctgctcgcgcacggcgagggcggcctcggcacgcaggcgctcatcctcgccatcgagcggctcaacaacacctgccttgacaagaaaccggagtgagctctgctcaggctcagctcggttagatgtgttcgatcgtgtaatggaatggttggatgattgcttcgctctgtctgtttacagtacagtggttaaaagattcagatcaataaaagaagcatacgtggtgtttcaccgtttgggact

SEQ ID NO: 20796 - DNA, 963 bp, Oryza sativa
  ref <308>: DATABASE ACCESSION NUMBER: AK071101
  ref <309>: DATABASE ENTRY DATE: 2001-12-06
gttatccatttgttccaggctcgagcactccgttctcccgggtctccggtgctgctcccgccgcagccggacacccgaacgcgaagctccaactctccaatgctcccctcgtctcgttacctcctcgccccggccccacttcccgccatggtggtacggccaccgccgccgcatccaccgagccgcggaacttcccctctcgctcggccaccattgtgccgcgccatggcgcgggccgccccctcgctctctgccgcggcctcgacggctgcctcctcctcgacgactcctgccaagaagaaggttctcttgcccatcgccatgggcacggaggagatggaggcagtcatccttgccggtgtactccgccgagccggcgccgacgtgacgctggcatccgtggaggacggcctcgaggtggaggcctcgcgtggctcccacatcgttgctgacaagcgcattgccgcttgtgcagaccaggtgttcgacctcgtggctctcccgttgacaaaggttgacgataatcttgaaagaagtattgaagtcaacgaaattgagtggtcttctgatcacaatcctcatgttctcattccaattgcaaatggttcagaagagatggagataataatgttgacggatgttttacggcgagcaaatgtaaatgtggtgttggcatcagttgaaaaatcaacaagtattgtcgggtcccaaaggatgaggattgttgctgataaatgcatttcagatgcttctgccttagaatatgatctaattatccttcctgtgagctatttctcatttcatattttcatttagatatcataaatgccgacatataagttcattgttgttcctacaagatattttgcatatagctggttcatggactggtacaaatccccatcttatcatcatcatgatgcttgcttttaaccttatcttgaatgtagctgcatattactg

SEQ ID NO: 20797 - DNA, 1310 bp, Oryza sativa
  ref <308>: DATABASE ACCESSION NUMBER: AK071102
  ref <309>: DATABASE ENTRY DATE: 2001-12-06
gaaagggaaagagggaagagaagagaagagagggagccaaagaaagctctcatcttcctcttctcaaactccatctctctctcttcttcttcttcctctcctcctcctcctcgcttggaccccggattttttgcaagggggtaaggaggcgggaggagatggggagggaggagaggttcccggtgtgggaggcggcgctcggcgccggggtcgccgccgccttcgccaccgggctcgtcggagtctacctctccatgccggactccgactacagcttcctcaagttgccgcgcaacctcgaggagctccaaatcctcactggacatcttgagaactataccagtgattacaccatacaagtgttggtgggttactgttctgtgtacatcttcatgcagaccttcatgatcccaggaacaatattcatgtcattgcttgccggttctctgtttgggcaactccggggtgtggccctcgtggtatttgcagcctctgctggtgcttcttcgtgctttttcctgtcgaagctgattggaaagccattggtgttctcactgtggccagataagctcatgttcttccagaagcaggttgccaaaagaagagaaaagctgttgaattacatgctttttctcagggtcaccccaacattgccaaacaccttcattaacttagcttcacccatagtagatgtgccctaccatatattcttactggcaactctcatcggtctcatcccagcttcctatgttactgtcagggctgggattgctctaggagagttaacatcattgagtgacctgtatgatacccaatcgatagcgctgctgttcttgatcgggattgtttcggtcacaccaacattgttgggcaaggacgaagcgcaagaaaaaacaacggaaattgcagttaccgcgtcatgatcaccgaagcgccgatccgcatgccctcacctgtacatatgaagctccagcatgcagggttgcttcagaagtagtaggagcatcaaaggcctgacaacaccatggtttgcaaagactacacagcatgacaggacctccaaccccaagtgcttccctgacccctctccattactggaagcctgcttgggttgccatcgaaacatttacgaagtgaagtgtttagccacccaaattatggagtctggggaggcacaatgcccatcaggcaaagctgctttgatgtgtaagcattaagccaagtagtgttgtttagatgggacaagcaaactgatctgatccctgtatatattgatcagattcattcaatccatattcagtggttcaatc

SEQ ID NO: 20798 - DNA, 883 bp, Oryza sativa
  ref <308>: DATABASE ACCESSION NUMBER: AK071103
  ref <309>: DATABASE ENTRY DATE: 2001-12-06
gatacaaccatactagctagtgatctctcgatctccatcatctcttcgtctactaacaaagttataatatcaaattaaggtatatatatatatatatagtagctagcttcgattaatggcgagttcgtcgagcaggttatcctgctgcttgctggtgctcgcggcggcggccatggcggcgacggcgcagaactcggcgcaggacttcgtggacccgcacaacgcggcgagggccgacgtcggggtggggccggtgagctgggacgacacggtggcggcgtacgcggagagctacgcggcgcagcggcaggggcaatgtcatttcaactccagcagtaaaaggaacaatattgccaggcatcacaaggaaaagtatcattgatgttgctctgagcaagggtttccaggtcgaggagcgacttgtgtcagtagatgagctgcttgaagctgatgaggttttctgcacaggaactgctgtcgtagtgtctcctgtgggtagtattacctatcaagggaaaagggtcgaatatgctggcaacaaaggagttggtgtcgtgtctcagcagctatatacttcattaacaagcctgcagatgggccaggcagaagattggctagtctggactgtgcaactgagttaggaagtaataaaatgttcatcaacatcaaaagatggacatgattatgatcatgtgtatccttcagttttgtagttttgttggtgtgacatcctgctgtatatgtatagacggcagtgcattagcgcgaagcagttttgctaaggaacgacaccatgcatccagcttttatgccttttgcatgagaaatcaaacgtggaaggctttcctgactgaaatatcgacaattataaaactattttgcc

SEQ ID NO: 20799 - DNA, 1961 bp, Oryza sativa
  ref <308>: DATABASE ACCESSION NUMBER: AK071104
  ref <309>: DATABASE ENTRY DATE: 2001-12-06
gatctctttctctctctcactctctctctctagtgaagttgccttccctctctctctcactctctctctagtgaacttgcctttctttcttcctccacaacctcatttacacctttagggctagatgcacacacacacacaagacacaactactttacctctccatctctctctatttataactgtagtttgccttcttctccatccattatgctatctcctcttctccttctcctcctaccttgagctagctccttactaccaatcctcttccatgggagatccctacaccaacttcttgagaggctaccaccaccaccaccgctcccaccaccccctccacttccctccgccgccgccgccgccgcctccgccctacgccgcctccttctccggcctctactcctcctacctccacccaccacctcccccttcctcccctccgatcagggaagccctccccctcctcagcctcactccctccaccacccacgacgacgatcaccaccaccgccgccatgatcaagatcatcaccaccatcacaagcaaggccaagaaaagaacagccatggcggcggcggcgccgcttcttgcagcaacaacgacgacaaacgagaatcaccatcagcagcagcagcagccgatgatcaggcggcggaggtgaccgtggccctgcacatcggcctcccgagcccgagcccctccgacgccgccgccgccgccggcaaccaagctgcagcagcagcagcagcagaagcatcggcagcaggtggaggaagcagcaggatgcaagtggaggaggaaggaggagaggaggaggatgaagacgaggcggcggcggcggcggcgacggcgacgctgccgctgggttgcgcgtccatagggatagggaagctgaccaaggggcagtactggatccccacaccgtcccagatcctcattggccctacccagttctcctgccccgtctgctacaagaccttcaaccgatacaacaacatgcagatgcatatgtgggggcacgggtcgcagtacaggaaggggccggagtcgctgcgggggacgcagccgacggcgatgctgcggctgccgtgctactgctgcgcggcggggtgccggaacaacatcgaccacccgcgggcgcggccgctcaaggacttccggacgctgcagacgcactacaagcggaagcacgggatcaagcccttcatgtgccgcaagtgcggcaaggcgttcgccgtccgcggcgactggcgcacccacgagaagaactgcggcaagctctggtactgcgcctgcggctccgacttcaagcacaagcgctccctcaaggaccacatccgcgccttcggccgcggccacgccgcctgcggcatcgactccttcgacgacctcgacgccgatgacgacccctcctccgacctcgaccacgcctccgcctccgcttcgcgagtagggtgagtgtttgatcgatatcgagatcgagatcgagctgagctaattaatttccatgataattagttaaccgtgctgctactactactatgtctgtgattctgtgtacaccacgggattggaatggagaggatatgggggtatagatgatgcatgatactgcgaattttcaagggttttttttttaattttgggggtatattaatgaattagttgatgatgaggaacaaattaattactacatttgcagcaagctagcagatgtgtgtgtacgtactttgttctctagaaagtactacgtacgacttgagttctaatcgtttggttggatggagatacagaaccctatagcggcttcattgtatgtgcagacttttcatttgatttggtatatggtcaaattggtgatacgggttaattaagattaattatctgtgtcattttgagaagatttatatctatacatatatatatattagagcactatatatgcatgcattcaagc

SEQ ID NO: 20800 - DNA, 1212 bp, Oryza sativa
  ref <308>: DATABASE ACCESSION NUMBER: AK071105
  ref <309>: DATABASE ENTRY DATE: 2001-12-06
gttgcgtcgtggggcggcggcggcggcggcggcggtggaggaggagggtggggtggtgatgcgtgtggctttcgacgcgaagcgcgcggcggtgggcgtcggcgcgcggatgctgttctacccgacgctggtgtacaacgtcgtcaggaaccgattcgagccgcacttccactggtgggatcaggtcgacgagcatgttctgctcggtgctgttcctttccccagcgatgttctacggctgaaggagcttggagtttgcggtgttgtgacactgaatgaatcctacgagaggctggttcccaggtgcctgtatgaggctcatggaattgaaaacctggtgttaccaactagagattatctttatgcaccatcatttgagaacctttgccgggctgctgacttcatccacagaaatgctttgtgtgggaagttgacatatgttcactgcaaagctggacgtggacggagcacaacagttgttctttgctacttggtgcaatacaaacaaatgactccggctgaagcttatgaacatgttcgcttgcgcaggccaagggtgctattagcttctgcacagcggcaggctgttgagcaattctaccagcttagggtgaagaaatctgggaaatccatttgcctggacagcccaataatgaaaccaccgctgttccttgccactcgcaacctcattgcatttgacgagaagacattcgtcatggtttccaaatcggacctcgaagggtatgatgcggataccttggccgttaacgtgggcagtggcttgtgggagataagcctagtataccgcgtgcagtttgcgagccaggcggcctttgcagggttctcatacctgtgggtacgatgccgtgccccccgtaagaacaaggaggcactccctgtccctgagagtaacaatagcgtggggagcgagagctgctcccttgaggcagagcaactcgccaaacctcacccatgtttgcttcaaggtgtcatggttaatccatgatcgttcgacttgcattcgccgcgacctttcttttaactttttgtctggcatgtcatccgtatatattaaagccaagaacatgcaaatgcaatgtgaagtccttaactccagtctcctcagcaagcaaagagtgcagttgcttgggtatgtacatatctgtaataagttgacttctacatgtacagaggtaaatgacaaggtatccc

SEQ ID NO: 20801 - DNA, 712 bp, Oryza sativa
  ref <308>: DATABASE ACCESSION NUMBER: AK071106
  ref <309>: DATABASE ENTRY DATE: 2001-12-06
gaggctgtggccgaggaggcggcgcccgccgaggccgaggtggcggagaccaaggaggcggagccagctgcggccgagccggcggcggaggaggtgaaggaggccgagcccgagccggccgagccggaggccgggcctgccaaggaggaggtggcgccagagcccgccgccgccgccgaggcggaggccaaggaggccgagccggcggcgcaggtggccgaggaggtgaaggtggaggaggcggcgccggtcgcggagccggaggccgagaaggccagcgagtgagtgcatgccggggaaggctggctcgccgtcgtcgtacaccgtggagtacatgcatggcccgcgcgcgccgccgccgccggcgactcgccggagttgtacgtacgtgtgcgtgtagcgagtgatgagttgagtgagctggagtggtagtactcgactccgtaggtgtgtgtgggtacgcgtgacgtggggctaaataaaagagtttgtcatcgagggcggtggggcccagcgtcagtgacgcggtgcccctctctggcccccacatgcctccgtcgtcgcaggcgttgtttgtcggtcttttgtgctttttttttttcgtgtttgattggttttcatcgtgtaatgggtgcgtttctgagagtacattgtctgtctctatgtgtgtgcgatctcagccgttcatggccgtgtgccaaccatttctcgc

SEQ ID NO: 20802 - DNA, 1112 bp, Oryza sativa
  ref <308>: DATABASE ACCESSION NUMBER: AK071107
  ref <309>: DATABASE ENTRY DATE: 2001-12-06
gatttttcttccccgtcaccaccacctccacctcctcgatcgacgcatccctccgccgctcgcagctctcctccggcggccatggcggcggcggcgcagaggctcctggcggccagcacgaagatcgtaggggtgggccgcaacttcgtcgcccacgccaaggagctcgggaaccccgtccccaaggagccggtgctgttcctgaagcccacctcgtcgttcctccacgcgggcgtggccggcgccgccatcgaggtgccggagccggtcgagtcgctgcaccacgaggtcgagcttgccgttgtcatctcccagcgcgcgcgcgacgtccccgaagcatccgccatggacttcgtaggaggttatgcacttgctttggacatgacagcaagagaacttcagtctgcggctaagtctgcaggtcttccttggactttgggtaaagcacaggacaccttcactccaattagtgcagtgattccaaaatcagatgtagctaatcctgatgatctagagctctggctaaaggttgatgatgaacttaggcagaagggatctacaagtgatatgatattcaagataccatctctaataagttatatcagttccatcatgacattaatggagggtgatgttatactgaccggtactcctgagggtgtaggcccagtacgaccaggacagaagatcaaagctggtataaccggcctcattgatgttgagtttgatgttcagaagcgcaagcggtcattttctacttgatgtgatagagcttcgagagcatttgtatcaagaaaatcctggatctgttcttgggaaatccagaccgtactttacccccacattgttatcccggatctgtttatagcaaacagacctttcatgaactataccggtgctgtatttttgtccatgttgatggagctctaagctctctgcaataatagcaaatctcttgtcgccaagcacacttgatttgtctacctgtggcaaaatacgcagcggtagtaatacccatgtaaatattatgctgccgattccatctaacagctaaactgttaatgttgtgaatgtcttgttgaaattataagcacataatgatttaatttatt

SEQ ID NO: 20803 - DNA, 956 bp, Oryza sativa
  ref <308>: DATABASE ACCESSION NUMBER: AK071108
  ref <309>: DATABASE ENTRY DATE: 2001-12-06
gagcttcttcagttcttctccaaacccaacccccccaagaggccaaaaccctctcctatatagccacactcatccttgcaattagctcaactcagctcaagttggcaattcatatcaaacagataacatcagtagttcgcagctagatcgatcgtcacagcaacacaatcaccacgacgacgatggcggcggcggcggtggagaagaagagcgggagcgagatgacggtggtgcgggggctggacgtggcgaggtacatgggccggtggtacgagatcgcgtcgctgcccaacttcttccagccccgggacggccgggacacgcgggcgacgtacgcgctgcggcccgacggcgcgacggtggacgtgctgaacgagacgtggaccagcagcgggaagcgcgactacatcaagggcaccgcctacaaggccgacccggccagcgacgaggccaagctcaaggtcaagttctacctgccccccttcctccccgtcatccccgtcgtcggcgactactgggtgctctacgtcgacgacgactaccagtacgcgctcgtcggcgagccgcggcgcaaggacctgtggatcctgtgccggcagacgagcatggacgacgaggtgtacgggcggctgctggagaaggccaaggaggaagggtacgacgtcgagaagctgcgcaagacgccgcaggacgacccgccgccggagagcgacgccgcgcccaccgacaccaaggggacgtggtggttcaagtcgctcttcggcaaatgatcgagaaattctcagcggccgatggatggatcagaggacgacgatgtatagctatagtatgaatttgccttcagtagcagtggagaataaaatggacttttggtgtgagtgtgttcttgaggtgattgtgtgtttgtaatgctgtgctttacaggaattaatggaaatgaactcttacacgtgctt

SEQ ID NO: 20804 - DNA, 1142 bp, Oryza sativa
  ref <308>: DATABASE ACCESSION NUMBER: AK071109
  ref <309>: DATABASE ENTRY DATE: 2001-12-06
tgttcacgagctagcgagcgcgagcatcgaggcgccattcataattccatctccagatactgatcaagcagatcagagctcgagttatcatagctatttgatcaaatgggaggtgtccacggtgtttgctatggcatgaacggcgacaacctcccgtcgcagagcgaggtcgtgcagctgtacaagtccaatggcatcggtgctatgcgcatctacagcccggatcagaaggccctcgacgcgctccgcggcagcggcatcgccgtcatcatcgacgtcggcggcatcggcgcggtggccaacctcgccaacaacccctccgccgccgccgactgggtgcgtgacaacgtccaggcctactggccgaacgtcatcatccggtacatcgccgtcggcaacgagctcggccccggcgacatggggaccatcctcccggccatgcagaacgtgtacgacgcgctcgtgtccgccggcctctcgaacagcatcaaggtgtcgacggcggtgaggatggacgcgatcaccgactcgttccctccgtcgcacggcgtgttccgcccggacctgcagcagttcatggtgcccatcgcgcagttcctcgccaacaccatgtcgccgctgctcgccaacgtgtacccctactttgcctacagggacaacccgcgcgacatcccgctcaactacgccacgttccagccgggcaccacggtgagggacaacgacagcggcctcacctacaccaacctcttcagcgccatggtggacgccgtgtacgccgcgctggagaaggccggcgagcccagcgtccgcgtcgtcgtgtcggagagcgggtggccgtcggcgggagggttcgcggcgaacgtggagaacgcgaggaatcacaaccagggcgtgatcgacaacgtcaagaacgggacgccgaagcggcccgggcagctggagacgtacgtgttcgccatgttcaacgagaaccagaagcccggggatgagaccgagaggcattttgggctcttctaccctgacaagacgccggtctacccgattacgtttcctccgaactagcggctgaccatgccagtgcaaataaggatttccagagacgaataatccatgattaaataatgttggttgaacgttaatgc

SEQ ID NO: 20805 - DNA, 1741 bp, Oryza sativa
  ref <308>: DATABASE ACCESSION NUMBER: AK071110
  ref <309>: DATABASE ENTRY DATE: 2001-12-06
gagacgtcaccactactgactcgtcttcctcccacctcggtcgcgccccacgattaactccgccccttctcgcctcttccttcgtgctaactactaccgccgccgccgccgccgccgacgccaaatccccaaaccctagctccgccctcggcctcgccgccgcccgccgccatggcggagaccgtcgacgacaaggtcagctacttccaggcggtcaccggcatctccgaccacgacctctgcaccgagatcctcgccgcccacaactgggacctccagctcgccgtctcctccatcaccgccaacccctcctcccccgacccggccccctccgcgcccctgcccccgctggcaccgagggaggcggatttggtcgcgccgcacctgcctccgcctccgcagcagcagcagcagcagcagcagccggggatcgcgtggaagctcgtgacgctccccttctacgtggtctccggtggggttgggctcatcgccggttcgatccgtctcggtgcctgggtcgccggaggtgtgctgtctcgctccctctccatcctcggcctcgcgcagggcgggggcggaggaggcgaccggcttctcgagctgcccccgtcggcggccgaggcggctgacttcgtggcggagttcgagcgcgagttcggcgccggccgtggcccccacttcgtcgccgagggcttcgcggatgcgttgcagcgtgcgcagcgcgagtacaagcttctcttcgtgtacctgcactcccctgatcacccggacacccctgccttctgcggtggctgcctctgcgctgagccagtcgcggccttcatagatgagaacttcgttgcgtggggtggtagcatcaggaggactgaagggttcaagatgagcaacagcctgaatgcatcgaggttccctttctgcgcggtggtcatggcgtctacgaaccagagaattgtgttgttgcggcagattgaggggcccaaatcacctgaagagatgataacaactcttcaaggggcagttgaagaatgcagtgcatcactcgttgctgctaggattgatgctgaagagaggctaaacaatcaacgcttgcgtgaggaacaagatgctgcttatagagctgcacttgaagctgatcaggccagggaacgccaacggagagaggagcaggaaaagcgtgaaagagaggctgcagaggctgagagaaagcgcaaagaagaagaggaggctcaagaaagggctgcccaagaagcagctgagaaagaagccgctcttgcaaggaggagacaagagaaggccatggctcttggagcagaacctgagaaaggaccagatgttactcgagttcttataagatttccaactggagagcgcaaagaaaggagattcaacagttccactaccatcacttcactgtatgactatgttgattctttggactgcttgaaagcagagaagtacagcctagtttcgaacttcccgagggtgacatacggtccagaaaaactctcccaaacgctggaggaagcaggtttgcatccgcaggcgagcttgtttattgagatagaacaatgaggtgttaagtttgtaagttctgaacggaaacctgcaggtataggtgctccttttacaatttatttaacaacagtgaggaacttcttgtatgacattatactgagaaatgtcttcgatgcaaatcttcttttgtgcttctcatttatattcaataaattcaccttcaccc

SEQ ID NO: 20806 - DNA, 971 bp, Oryza sativa
  ref <308>: DATABASE ACCESSION NUMBER: AK071111
  ref <309>: DATABASE ENTRY DATE: 2001-12-06
gatcagcttgtaattgacagctgcaaatgtggatggagaacttacccaagtttaaaattattattggcagggatgtgacggatcggtgttgctgaacgcgacggcggcgagcgggccggcggagaaggacgcgatgccgaaccagagcctggacgggttctacgtcatcgacgccgccaaggcggcgctggagaaggagtgccccggcgtcgtctcctgcgccgacatcctggcgctggcggccagagacgctgtctccatggctgccgggaacatcaatggcgcgagcctttggcaagtcccgacggggcggctcgacggccgcgtgtcgtcggcggcggaggccgtggccaacctaccgtcttctttcgcggatttcgctaagctcaaggagcagttcggttccaagggcctaaatgtgcaagacctcgcgatcctatcaggtgctcacgccataggcaattcacactgcgtctccttcgccaagcggctctacaacttcaccggcaagggcgacgccgacccgacgctcgaccgggcgtacgccgcggcggtcctccgcgccgcctgcccgccgcggttcgacaacgcgaccaccgtcgagatggtgccggggagctcgacgacgttcgacaccgactactacaggctggtggcgagccggaggggcctcttccactccgaccaggcgttgctccaggacagggaggcggcggcgacggtgcgcgtcatggcgaggtcgagcaggcaggcgttcttccggcgattcggggtgtccatggtgaggatgggcaatgtcggggtcctgacgggagccgcaggagagatcaggaagaactgtgctctgattaattgatgggcagagatttgatctttgatataagttattactaagtcatgtactaatgatgttctattgtttggtgtctaattaagttattactactactacaaggtaaatttcatgaggg

SEQ ID NO: 20807 - DNA, 2091 bp, Oryza sativa
  ref <308>: DATABASE ACCESSION NUMBER: AK071112
  ref <309>: DATABASE ENTRY DATE: 2001-12-06
gggtaagtggtaactggcgacgcggtggtgccgtggtggtggtggtgcagcttctctcctcttctgaatcttctcgacttctcgtcctccctgttgcagaggcttctccggcgaggccgcgaggcttgatttcaggtgagcaagcggctgtgatttgtgtttttcgccttttgcttttgagttttcttctgccctgttaaatcccttctcttgatgtgtgtgaggagctgaactgtaattcagtcagttcagatatgtttgtgatttataggtttctgacccatgccgtgatgtttgttctgcttgagaatacttggaagttcagaaccatcctcagaattcagaaagggctttgctcttttcgctagatgcttctttaagcgtcgattcgtcatttatgcatgctttagctcttgttcttttttttttctctctcttttatctcggataatttcacacaatcgcagattctttggagcaaaaaggaagaaacatatttgctcttggatttgtttcttggaagtatcgcacaactaggatccaacatcaaagcaatttatttaatatataactacatcactttttactctgtttcctgttctgttcatttttgtcccactgaacctggcttgaacaaaaagctactatcactttttgctgaagttgtgttttgagcaaactattttctttgctttcattagtgcatagttgatggcatgtcttgagctggattcttcacaattcctactgaatggggatggcagtgtgatcggcagcccatttgatatccagcttgagtgcaatagcttcacaggctccaaagctgttcaagatcatagccgatatactcttccttcacagtgcactaatgcccctgatccacctccattacccggaacttcttatggcacacacagaacttccaggaatgcaaaggcttgcaggtgtgtccctgaagagatccaggatttctgggacaggatgttcttcgaagcgtatcaatatgatctccgtgttttgacggaagatggcaatgagatcatgtcacattcctgcgttgttggtattaaatctcctgttctaagagctatgttggaagaagctaaagtacaaggtggcatccgacacatcctgatacctggtgtaccatcagaagcagtacatgttttcatcagatttctttattcctcgcgttttgagcagtatcagatgaagaggtatgtacttcatctgcttgtactctcccacgttttctcagtaccatctctgaagagagtctgcatcaaccaactggagacatctttgctttctcctgagaacgtggtagacatactacaacttgctagactgtgcgacgcgccgcggctctccctcgtatgcactcgtatgatcatcggagatttcaaggctatcactcaaacagaagggtggagagtgatgagacaagccaacccaagcctggagcaggagctgcttgagtccctcgtcgaagaagatacaaaaaggcaagagagagcaagaaggctggaggagaataaggtttatctgcagctacatgaagctatggaagctcttattcatatatgtcgagatggatgcaggacaattggccctcgagatcaaacgctaaagagcagtcaggccgtttgcaggtttcctgcctgcaagggcatcgagctgctcctgcgccatttctcggcgtgcaaaatgcgggtgcctggtggctgcgctaactgcaagcgcatatggcagcttcttgagctgcattctcgcatgtgctctgcacttgaaacttgccatgttcccctctgtaggcatttcaaggagaaaatgcaacatctgagcagaaaggaggaggccaagtggaatcttttggtgtccaaggtgttggagagcaaagcaacaaccagttccatctcagaaaggagaaaatttccatccctgaaaacatagtgctacgttctaggttcacaagttacaagaattatgcactaacacataaactcgatgtaaactgtgaacatttgttgtactgaagattaaaaggtgtctcaattctaacatgacaatctgaagaaaggagaaatgagg

SEQ ID NO: 20808 - DNA, 1434 bp, Oryza sativa
  ref <308>: DATABASE ACCESSION NUMBER: AK071113
  ref <309>: DATABASE ENTRY DATE: 2001-12-06
gtccactccttctagaggaaaaggatcgattttttttcttccccaatttcttcctggtgctcacctcctcctcccccgggatcttccagaagcttccagaactgaccttggtgcgggcgagatccaaggaggagggtttcctgccatggtgaaggataccgcgtactacgacaccctgggggtcagcgtggacgcctcccccgccgagatcaagaaggcctattacctcaaggcgaagcaggtgcatccggacaagaatcctgggaaccccgatgcggcgcagaaatttcaggaactcggagaggcataccaagttttaagcgatccttcaaaaagggaggcttatgataagcatggaaaggaggggcttcctcaggataacatggtggatcctgctgctgtctttgggatgctttttggaagtgactattttgaagattatgttggacagcttgcactggcatccatagcatcagtggaagtcgaggaaaacttaaacagtcaagaagcaagagggaaggttcaagagaaaattaaagagttacaaaaagaaagagaacagaagcttattcagagcctaaaagatcgacttcaaccatttgtggatgagagaaaggatgaatttgttaactgggcaaatggggaagctcagcggttatcccatgcagcttttggcgaggctatgctcaccactattggctatatttatgtgcgacaagcagcgagagaacttggaaagagtaagttgtatatgggtgtaccattcatagctgagtgggtcagagacaagggccactgcattaaatcacaggttaatgccgcttcaggcgctatcgctctgatgcagctacaagaagggatgaaaaagatggaggaaagtgacaataaggaggaccagattatgaagagtttcgaggagaaaaaagatgccatgcttagttacctatggaaaattaatgtggttgatattgagtcaacacttacacatgtttgccaagcagttttgaaagacgccagtgtcccaaaagatgttctgaagttacgagcaagagcattgaaaaagcttgggacgatattccagggtgcgaagtctctgtaccatcgtgaaaacagcctacaggtggaaaccagcccacggcagggagcagcaacatcgaactgaagactgcaaaagtacaaaaaggaaaaaaaaaagtacacctgacagacgcaatttctggttttttggaggtgtcgtctctcgtgtccgtttattcatttttgtaagattttagacgacgcgtatcgttctggataaaatttgctgtttgatttggtctccgttttctttgtaaaaatggtgatgctgtcgtgagctctgaacacgaagattttgttggtgctctgcaacctgcatattactagcttgggctatctcgttgtaagatttgcacc

SEQ ID NO: 20809 - DNA, 1739 bp, Oryza sativa
  ref <308>: DATABASE ACCESSION NUMBER: AK071114
  ref <309>: DATABASE ENTRY DATE: 2001-12-06
gacgcgacccaagccgatccgcccgcacccgcacacacatcgctcggtcgaaggaggaggttctagaaacttctggaagcggtggaggtgtggggagagagagagagagagagagagagagagagaggcagagagccatggcgcggaagaagatccgggagtacgactccaagcgcctcctaagggagcacctcaagcgcctcgccgccatcgacctccacatcctctccgcccaggtcacggaatcaactgatttcacagagctcgtcaaccaagagccatggctctcgtctatgaagttggttgtgaaacccgacatgctatttggcaaacgtgggaagagtggccttgtggccctcaacctagatcttgctcaagtccgccaattcgtcaaagagcggttgggagttgaggttgagatgggtggctgcaaggctcctattacaacattcatagttgagccatttgttccacatgatcaagagtactatctttctattgtatcagagaggcttggttccaccattagcttctcggagtgtggaggtattgagatcgaggagaactgggataaggtcaagacagtttttcttcccaccgagaaagcaatgacacctgatgcgtgtgctccattgattgccaccctaccgttagaggttcggacaaaaataggtgatttcatcagaggtgtatattctgttttccaagacttggatttctcattccttgagatgaatccgttcaccatggtgaatggggaaccatatcctctagacatgagaggagaattggacgacacagctgcctttaagaactttaagaagtggggaaacattcagttccctctgcctttcggaagagtcctcagcccctctgaaagctttatccatgaactggatgagaagacaagctcatcgctcaaattcacagtcctgaacccgaaagggcgcatttggacaatggttgcaggtggtggtgctagtgtcatatatgctgatactgttggagatttgggatatgcgtcagagcttggaaattatgcagaatacagcggcgctcccaacgaggaggaggttctgcagtatgctagagtggttttggattgtgccactgctgatcctgatggccgtaagagagctcttctcattggaggtggtatagcgaacttcactgatgtcgctgctacattcagtggcatcattcgagctttaagagagaaggaatccaaattgaaggctgcacggatgaacatttacgttcggagaggtggtccaaactaccaaactggccttgccaaaatgcgtacactaggtgcagaacttggtgttccaattgaggtatatggaccagaggcaacaatgactggaatctgcaagcaagccattgattgcatcatggctgaagcataattcagacaactatttgcgctgttcccagcttgagtccattttgtttcagaaattgtcagtgtgaggtgttgcctttctctctgagggaatgtgtgctgttgttggtgtaaaacaaaacaaagaaagatcgtattgttagaataaactacatctgtaagtttgtaacgtaattacgcaataatgttaatgtttgtttctagttctgaattctctgtgccttggttggtggccttatccaccaaactcaaagagggttcttgattttgtcatgtatgagagacagtgaaatggagggcttagtgacaggaactgcgttgttgtggcttgatt

SEQ ID NO: 20810 - DNA, 1186 bp, Oryza sativa
  ref <308>: DATABASE ACCESSION NUMBER: AK071115
  ref <309>: DATABASE ENTRY DATE: 2001-12-06
gcggagcgagccgcgacgacgacgacgacctcgcgagtccgcaagaacgccgcggcgactgacctgctctgctcggctgctcgccattgattttctctgtctgctcggctgctcgcttgcttgcgctgtccagtttagctctgtctagctaggtagactgcggccatggcggcggcggtggcgtcgtcttgctgcgcctcgaccagcgctcgcccactggttcgccgcgccgggagcaggaacgggaagctgtggtgggcgggtggtgtcaggaaggcgcggctgctgtccatctccgccacggccgcggcgccgtcgggcgtggactacgcggcgggcaccggcgccgccgccgacgacgacgccgtggctgcgctcaaagtcaagcttctgagcgcggtgtccgggctgaaccgcggcctcgcggcgagccaggaggatcttgaccgcgccgacgcggcggcgcgggagctcgaggcggcggcgggcggcggccccgtcgacctggagagggacgtggacaagctgcaggggcggtggaggctggtgtacagcagcgcgttctcgtcgcggacgctcggcggcagccgccccggcccgcccaccggccgcctcctccccatcaccctcgggcaggtgtttcagaggatcgatgttgtcagcaaggacttcgacaacatcgtcgatgtcgagctcggcgcgccatggccgctgccgccggtggagctgacggcgacgctggctcacaagtttgagatcatcggcacctcgagcataaagatcacattcgacaagacgacggtgaagacgaaggggaacctgtcccagctgccgccgctggaggtccctcgcatcccggacaacctccggccgccgtccaacaccggcagcggcgagttcgaggtgacctacctcgacggcgacacccgcatcacccgcggggacagaggggagctcagggtgttcgtcatctcgtgatcggacggacgcgttcgcgacataggtatgcggcttgcgattctgaaactgaaactgaagcgcacacacggttttgtgttctttctctgctactagtagatcctcactctcttgatctgaccatctttgtactatacttcagtattgttcgtgcgttctgtattgttatagattttgcagatattcaacaagtagagggaaatatgtc

SEQ ID NO: 20811 - DNA, 2129 bp, Oryza sativa
  ref <308>: DATABASE ACCESSION NUMBER: AK071116
  ref <309>: DATABASE ENTRY DATE: 2001-12-06
gagacgcgctaatccacggacgagctgtgacgagcttgaccgcgagtccgcgacgcgtgggctcgggggtgagacatggcttccccggcgccgccgcccaccgcccggctccggccttctcaggccgccagcagtgcctcctcctcctccttccctacatccatctgcggccttggctcgctcggcgacgcctctagggtttcctccgtctccttccggcggcgtccaccagcatcgcctctcgtccggtgctcccaagaccctggcaagattgaagtgtttaatactgaaggaaccgagcagtcacaaggaggctccactggtatgatgtttgcgctgtgcacttattgggtgtgtttggctggccaactacaacggctgtgcagcgctgctgctgcagcggctacagtagaaattgtatattgctactgtagctgctggctgccaagtcacaccgaataggcccaattttattcttcaacttgcatgtgttcttttagagctgaactatttttttctgtcgtacaggttcgataaatcatggcaaatactcaacaaggagtttctcctctaaagagtattcacagctaactgtaaatccaatgactaataatgataccactgttgttcgctatctaaatttctatggcatagcatttaggcacatttgtttcatgaaatgcaatgtctcattagaaattttggctggagcttgcactttgcaccaaattgtattgcatgagtgaatacctcactgaagtcgatgatcttgggtctatcttgcttcttgtgattataagcaacaatctgctgttaatgtttaattgaaataactgttggcagaaggaaacaccttacagagcttatgagcaaaacttgtattggcactgggttaatgatttcagatgcaaactggatatagaagcattttgcatgcacacttcttgttgagaatgaaactaatatatttgaaattcaggctttcagatattttcgtgaattatgataactgtgcttggaatggcatattcattttacagtgctaatattacaacttataaccattatctacactgcttctgtgtcagcttgcttgaaagactaaagaggtatggtgctgctggtgttttgtcatatggactactaaataccgtctattatgtcacgacatttttattagtttggtaagtaagtcagtgattggtactgtgatggatcattaatttttatcttggtgttacacatctggaacgttcacctgtgtaagaatgttggtcaagtgtaaagtggttgatatgttggtcatgagaaagagggttcagtagctcagcatttccacagggtcaaacgactgcacatttattcgggccatcagatggaaaagagaataactgaatgacttactttttcaggtttattttttctcctgctcctggtgagatgggttatgctgcggcagtagagagattcctcaagttgatggcaatggtatgggctggcagtcaagttactaaaatttttcgagcaggaggggcacttgcattggctccttttgttgatagagggctaagatggttcacagtcaggttcaacttcaaatcagaaggaaaggcatttgctacaattgttgggttctgttttgcacttgctgctctactgttctttggattaacaatactttgggcgtaatacacctgtcgctgctgaagaatcacatagaagaccaagaacactggtgaaataaaaagattgggttcctcctcacattgcggaagtgaacctttatgcaatcagtaatgtggcttccactttactattaattggcttagctcttcaaaactatggttctctcggtaccatgtgtttgtttttggaaacaggtttccatgtattcttgtatgagtagctattctcaattctcatttacataattcacctgcaagtctgcaacctggtgcttcattcgttaatcgttcataatctggaacatcttcagtgtacaactgtacatattcctgtaacatgatccttggggagttgtgtgtgttttcatgttccttggtgcgtgcagacattgtaaaacaaagaaagtttgttctggaatcttgacaaagaaaaccttttgaatc

SEQ ID NO: 20812 - DNA, 1314 bp, Oryza sativa
  ref <308>: DATABASE ACCESSION NUMBER: AK071117
  ref <309>: DATABASE ENTRY DATE: 2001-12-06
ttggccgccgctgtagtagcaaacatctccttcgtcttccctacgcgtccacccgaaaaagaaaaaaaaaagaacaggagaattatccccacttccagagtccaaacctccccgtccatggcgacggcgagctcgatccggccgccacgcgcggcgctagtcctcctcctgctcgcgctgtccttctccctcaccctcgccgcccacttcgagggctttggctccgacgacctccactccgcccacgccgacgcggcctcggcagacgacgaagacgacgaggggctcgacgtcgagctcccgccgccgccgcgcatctccctctccacttcaactccttcccctcccgtcaccaccaccaccaccaccacctccgctccaaaccctaaccccgatcccaacccgacgctgaccccgccgaaccccaccccgacgctcgatctctgggacgaggacgagttcgagggcatccctgtcccggaagcggcctcctccgacgaatcctccacgccggcggaagccgccccgtcagatcccgcggccgatgccgcggccgaggcggcgccagccccgccccggcggcccgcggagctgctccggcgtacaccgtcgagatcgcgtgcgtcagcttcctgatctgcttcctgctcaactacttcaccgggaagcggcagaacgaggcgatcgcgctcgcctgggccaccaggttcgccaccagggactccatcttcgacaagaacttcagcctcctcggcaccggcgacggcaaggacacgccgctcctgatgaaggaagggcaggacgtgttcaagttctacgcgagcgggaggcggtactgccaggggatgctcgccaccatggagatgcgcgcgcggcacgacctgctgtccaagctggtggagctggtgttccccaggaaggacaccatcacgttcgaggtggtgatgaacgaggaagccatggaccacgtcatgttggccgtggcgaggaagaaggcggccaagacgatgcagaaggaggagagggatctgcagaaatttgccggggttctgacctcggcacccgccgggaggagatgggttgcggatgagcttgcggtagtggccgagtcaaaggaggttgctggggatatgattactgaagccgtgctggaccaggtgatgatttaacctgcttacttatttttagaattgctgtttttagcttcggtggtactgggtaaatggttcttctggtaagattgtacagatgatatagtgaggtgtcctgttgatgttgattcttttatgaaagtaatataggtaagtgccttcc

SEQ ID NO: 20813 - DNA, 1514 bp, Oryza sativa
  ref <308>: DATABASE ACCESSION NUMBER: AK071118
  ref <309>: DATABASE ENTRY DATE: 2001-12-06
ggcgattcccccatctctccgacagcgagcttcgtcgtcggctgtgcgcggccgcggcggcggcgctggtcgtgtgcttcccaaattctctcattccccagcgagcgatcaccatggggctccacaaggaggcgagctcgtcgtcgtcgcggctcgacgcggcgccgctgctgccgcaccacggccacggcggcggcggcgcggggcaccacctgtcgtcgcagcccaagacgttcgccaacgtgttcatcgcggtggtcgggtcgggcgtgctggggctcccctacaccttctcccgcaccggctgggtggccgggtcggtcctcctcctcgccgtggccgcgctcaccttccactgcatgatgctgctcgtcgcctgccgccgccgcctcgcctacgaccaccccaagatcgcctccttcggggatctgggcgccgccgtgtgcggccccgcggggcggcacgtcgttgacgccatgctcgtgctcagccaggccagcttctgcgtcggctacctcatcttcatctccaacaccatggcgcacctttacccggttggggattcgtcgccctcgtcgccgctcctcaccgccaaggcgatcttcatctgggtcatgctgccgttccagctggggcttaactccatcaagacgctgacgctcctcgcgccgctcagcatcttcgccgacgtcgtcgatctcggcgccatgggcgtcgtcctcggccaggacgtgtccacctggctcgccaacaagccccccgtgttcgcctccgccggacccacggagatcctctacggcctcggcgtcgccgtctatgccttcgagggcatcggcatggtcctcccgctggaggccgaggccgccgacaagcgcaagttcggcggcacgctcgcgctgtccatggcgttcatcgccgtcatgtacgggctgttcggcgccatgggttacctcgcgttcggcgcggccacgcgggacatcatcaccaccaacctcggcaccgggtggctgtccgtcaccgtgcagctgggtctctgcatcaacctcttcttcaccatgccggtgatgatgaacccggtctacgaggtcgccgagcggctgctctgccgcaagcgctacgcctggtggctgcgctggctcctcgtcatggtcgtcgggctcatggccatgctcgtgcccaacttcgccgacttcctctccctcgtcgggagcagcgtctgcgtcctgctcgggttcgtgctgccggcggcgttccacctcaaggtgttcggcgctgaggtcgggtggcccgggctcgccggcgacgtcgccgtcatcgtcgtcgggaccgcgcttgcggtgtccgggacatggacatcgctcgcacaaatcttcagttcttccgatgtgtaagcggttgacagtaatgcagacaatgcgcaggcaacgcagctagtagctcatgtgtatacattgaatttagcagaaaagaacattcagctggcatgctgattttgggcacggttcacgtggttc

SEQ ID NO: 20814 - DNA, 1309 bp, Oryza sativa
  ref <308>: DATABASE ACCESSION NUMBER: AK071119
  ref <309>: DATABASE ENTRY DATE: 2001-12-06
gagtgagggagaggtagctggaggagagctgctcggcgagggcgaggatggcgatgggcgacgcgaagccctcggcggtgcacatcccgatgcccgcgcgcgaccgcgaccgcgaccgggaccgcgagctgctgctcgtcccgcccgccgccgtcgccacctccgcctccgcctccgcctcggccgcgggccgcgactccgactccgacgacgagtccaagccttcctccgcctccgccgccgccgccgccgcgcagaccggccgtgaggcgtttcacaaggttgtgcatagctgggcgtccaagaagttcatgaccggatgtgtaatcctctttccacttgcagttacattctatatcacatggtggttctttcgctttgtggatgggtttttctccccaatatatgctcatcttggaatcaatatatttggacttggttttgtaacttcaatatcattcatttttgtggttggtgtgttcatgtcatcttggctgggggcatctattctcggtctgggagagtggtttataaagagaatgccatttgttcgccatatttacaatgcatccaagcagatcagtgctgccatttcacctgatcagaacaaacatgcattcaaggaagtggtcattataaggcatcccagaattggcgaatatgcatttggattcatcacttcggaagttctacttcaggattattccagtgaggaacaaatgtactgtgtatatgtaccaaccaaccatctctacattggggacatatttctggtcaactcaagtgatgtgattagaccaaacttatctgttcgtgaaggcatcgagattgtcgtttcaggaggcatgtcaatgcctcaagttctatccatagtggaaacggagcagaaccaatggagcaggatgagatctagtcgaagctaagataaccctcctacgtgtgcccagatttcgcttgtaatcccgtgtttactggtttctgtaagtacaagggtaggatccaatagtagaatgtacagttctcctggctgggaatgcaaaatcacgctgtgcacgcacttaagctgtcactccattcaaatgcgcgcgtgtgaacttcgttccttaggttggagcttcatgaggtagagtttgtcctgacggtttagatgacacagtttattcgcttcatttatttggttaagagggagttctagttctgattgtctgaaaaatcttttccagttgccactggcttactaatgacatggttaagtgcatgtgtttgtgtatgacagtacgagatttgtggcctgaatgttgtacgcatg

SEQ ID NO: 20815 - DNA, 1489 bp, Oryza sativa
  ref <308>: DATABASE ACCESSION NUMBER: AK071120
  ref <309>: DATABASE ENTRY DATE: 2001-12-06
gctttttctatcccctccgcctccactcccctctcccctcctctcaacccccacagctcgcgccgccgccgcagctagggtttctctccgccctagcctacctcgcggagacctaccacccgaagcttcgggaaccctcgcatagccgccatgagcgacggcaaggactccctcgacctctccggcctcggcgccgccgtccccaacgccaaagagctcagcgcggaggacaaggccaacctcgtggagtcgattaagaacacgctgcagggattggcggcgcggcacacggacgtgctcgagagcctcgagcccaaggtcaggaagcgcgtggaggtgcttagggagatccagagccaacacgatgatctagaggcgaagttctttgaggagagagctgcacttgaagctaaatatcagaagatgtatgaaccactttactccaagcgttatgaaatcgtgaatggtgtggttgaggtagatggtgtcaccaaagaagctgcagatgaaacccctgcagagcagaaagaggagaagggtgtaccagagttctggcttaatgccatgaagaaccatgaaattctgtctgaggagatccaggagagggatgaggaagctcttaagtacctcaaggacatcaaatggtacagaattagtgagccaaagggtttcaagcttgaattttacttcgatactaatccattcttcaagaactcggtgcttaccaaaacataccacatgattgatgaagatgaaccaattctggagaaagccattggtactgaaattgaatggttccctgggaagtgtttgacacaaaaggttctcaagaagaaaccaaagaagggctcaaagaacactaaacctatcacaaaaactgaaaactgtgagagcttctttaacttcttcagcccacctcaagttcctgatgatgatgaggaaattgatgaggatacagctgaacagttgcagaaccaaatggagcaagattatgacattggatctaccatcagagacaagatcattccacatgctgtttcatggtttactggagaggctgctcaagatgaggacttcgaaggcattatggatgatgaagatgatgacgatgaagatgacgacgatgatgaagatgaggatgacgagggtgatgatgaagacgacgaggatgaaaagaagggcggacgagttcctgcaggggaagggcagcagggagagcgacctgcagaatgcaagcaacagtaagatgcttcctacctgagcgtttccaaagtccggtcctggagtgaagaagaatgtttggttcggcttgatgcaatgtctcgtccatttggtttggagagccagttggggaagtgttgggattgagttggtttagtggaactggcgggggatatttttttcgggacatggtattatatgtttggtagctttttccattgttgtattgggtcgacatatcttgtgcgaagcttatggttgagtgatg

SEQ ID NO: 20816 - DNA, 1726 bp, Oryza sativa
  ref <308>: DATABASE ACCESSION NUMBER: AK071121
  ref <309>: DATABASE ENTRY DATE: 2001-12-06
gtaatcttttttttgttctccaactgatcatagaatttcccggcaaaaagtactctggatccaaatgtgtacggtgaccataccagcaagatcaccgaagctcacattaagcacaacatggagggcctcacggtgcaaaatgcactgaagggcaacaggcttttcatcctagaccaccacgatcacttcatgccgttcctggacaagatcaacaagttggacggtaacttcatatatgcgagcaggaccattctgctcctgaaggacgatggcaccctgaagcccctggcgatcgagctgagcctgccgcaccccgatggccagcagcacggcgccgtcagcaaggtgtacactccagccaacaccggcgtcgagagccaaatctggcagctcgccaaggcttacgcctccgtcaacgactctgcttggcaccagctgatcagccactggctgaacactcacgccgtgatcgagccgttcgtgatcgcgacgaaccggcagctcagcgtggtgcaccccgtgcacaagctgctgagcccgcactaccgcgacacgatgaacatcaacgctctggcacggcagacactcatcaacgccgatggcatcttcgagaagaccgtcttcccaggcaagtacgcgctcgagatgtcctccgtcgtgtacaagaactggaagttcaccgagcaggctctccccgtcgatctcgtcaagagaggggtggccgtgccggacccgacgagcccgtacaacgtccggctgctgatcaaggactacccgtacgccgtggacgggctggtgatctggtgggcgatcgagcggtgggtgggcgagtacctggccatctactaccccaacgacggcgtgctccgcggcgacgaggagctgcaggcgtggtggaaggaggtgcgcgaggtcggccatggcgacctcaaggaccaggactggtggcccaagatggacaccgtccaggagctcacccgggcgtgcaccatcatcatctggatcgcgtcggcgctgcacgcggcggtcaacttcggccagtacccgtacgcggggttcctcccgaaccggccgacggtgagccggcggccgatgccggagccgggcaccgaggagtacgcgaagctggagcgcggcggtgacgaggccgacctggtgttcatccacacaatcaccagccagttccagaccatcctcggcatctcgctcatcgagatcctgtccaagcactcctccgacgaggtctacctcggccaacgcgacacgccggagtggacgtcggacgccaaggcgctggacgcgttcaagaggttcggcagccggctggtggatatcgagaaccggatcaaggacatgaacggcaactcggcgctcaagaaccggaacgggccggtgaagatgccgtacatgctgctgtaccccaacacgtcggatgtcaccaaggagaagggccaagggctcaccgccatgggcatccccaacagcatctccatctgagtctcgcgtgcatttctttagatcgatatacgtgtgctattgctagtgttgcgcgtttgccgtcgtcgatttgtttcattgtttgtatcagtgtgcattaccgtgattcttcgtagttcagggtctcagggataagtcgttgcaaatgtgagtaaccttgaggcatggataatttcattaggaattattcacatggaataatgaaagttaataaaatcattttgcttcc

SEQ ID NO: 20817 - DNA, 1708 bp, Oryza sativa
  ref <308>: DATABASE ACCESSION NUMBER: AK071122
  ref <309>: DATABASE ENTRY DATE: 2001-12-06
gctcctagcttcactctctccgctgctgctgctgcgttcggtagctaagcttagcttagcttgcgagctgcgtcgcctagctccgattggatctcgctctcgagctcgagctcgagctcggattccatggcgaattggtgactcggtggcaaggtcccgtctcctggtgtctggaattgggcggcggcggcgggatgaggaagagctgggggctcgggcggccgtcgggtgaccggcggtggctgctccccttcgccgcgagcctcctcgtctcggcgaccctcttcctcgccgcggcatgcggcctcttctccccgccctctctcgccgacggcgacgacgactccatcctcatcgacgtcgccacctgggacaccgcctccgccgcagaatccgagatcaagaaccgcctcctcgactccaactccgactccgacgacggcgacaacccggacgacgcggcggtgaactcggacgcctcctccgcggatcccccgcggatcgcctacctcctggagggaaccaagggggacggggcgcggatgaggcgggcgctgcaggcgatctaccacccgcggaaccagtacatcctccacctcgatctggaggcgccgccgcgggagcggatcgacctggccatgtacgtcaagggggacgccatgttcagcgaggtcgggaacgtgagggtcatcgccaagggcaacctggtcacctacaaggggccaaccatggtggcctgcacgctgcacgccgtctccatcctcctcaaggagggtctggagtgggactggttcatcaacctcagcgcctccgattaccccctcgtcacgcaggatgatatacttcatgtgttctcttccttgccgagaaatcttaattttatagaacacatgcaactatctggttggaaagtgatttcaagagcaaaacctattgttgtggacccagggctctatctatcaaaaaagttcgatcttaccatgactactgagcggcgagaattgccaacatctttcaagttatatactggttctgcttggataatgctcacaaaaaccttccttgagtactgcatatggggatgggacaatctcccacggacactccttatgtactatgttaacttcatctcctctccagaaggttatttccacaccgtcatctgcaactcggacgagtttcggggcactgcggttggccatgacctgcactacattgcttgggactaccctccaaagcaacatccaaatatgctctccatgaaggacttcaacaagatggtcaagagcggcgcgccgtttgcacggaagtttcccaaggatgacaaggtcctggacaaaatcgaccgtgagctgctgcaccgctccgaaggccagttcacccccggagcatggtgcgacgggagctctgaaggaggagctgatccatgttcctcaaggggtgaagattcggtattcgagcctagtcccggtgccgagaggttgcgaggcctcatgaagaaggtgctttcatgggattaccgcaatggcagctgctcgtcgctcggttacgatcagacaaaacgagattggtatgttccaaaaggtagaggataattcatgttgtcctggtaccttttcttgtaaattcagatagctgaacttgaccccttccattgaaatgaacaaagctgatgaatccaacattctgaccaagaaaaaagatgttg

SEQ ID NO: 20818 - DNA, 1605 bp, Oryza sativa
  ref <308>: DATABASE ACCESSION NUMBER: AK071123
  ref <309>: DATABASE ENTRY DATE: 2001-12-06
gacagcgccgctccctccttcctcccatctcctcctctcctctcctctcctctcctccgctctcgcgaagctcccaagtttgactccctcgagacccaccaccaccaccacgccgcgagcacgcgagcgaacgcgcggcggcgggggggatgggaggggtgacgtcgagcgtggcggcgaagatggccttcttcccgccgacgccgccgtcgtacgcgctggtggacgacccggccgccggggtgaccaccatgacggggcaaccccacagggagaacgtcgaggtgctccgcctccggacgcggcgggggaacaccgtggcggcggtgtacgtccgccacccggacgccgccaccacgctgctctactcccacggcaacgccgccgacctgggccacctctaccagctcttcctccacctctccttcaacctccgcgttaacgtcctcggatatgactattcaggatatggacaatcatcaggaaagccaagtgaacacaacacttatgctgatatagaggctgcttacaaatgcctcattgagaactttggtgccaaggaagaagaaataattctttatggacaatctgttggaagtggacccacagtagatttggctagtcgattgcatcggcttcgagctgttgtcttgcacagtcctatactgtcaggattgagagttatgtatcctgtgaagcgtacatactggtttgacatatataagaatatcgataaaatccctcaggtcacctgccctgtgctcattatacatggaactgctgatgaagtagttgattggtctcatggtaagcaactatgggagctttgcaaagagaaatatgagcctttatggctcaagggagggaagcactgtgacttggagctcttcccagaatatcttcggcatctcaagaagtttgtcaacacagtagagaagtcaccatccccaaggaatgcctggagggaaagtttggaccggattgaaccctctcggaaaagtgtcgattgctttgaaccctcgaggagaagtgttgatttctttgaaccctcgcggaagagcacagaccgaagggagaaatcaaggccaacccgtgataggatgagaggtgttgaacacagatatagcaatgttgagaagacggacaaattaaagttctcattcgaccatatggagaaatcgaggagaagcattgacatctttgagaggccaaagaagaacattgaacagctcgactgtggaaggaagagcgtggatagattggaccggatttgggccagttaaaaacttttttaacatcttatacaaggtatacatggggcttggttgttttgggggggttttacttgtgtatttatttgtattcacccatgtgctggaaggtgtggcataagagttggttcgccgaatctaaaggagagaagaagaagagctagctaattgctgacaatgttgtttgtctctgtttagaacttgtactggtttgtgtggtggaagaagtgtatgttggtcctcagcaaatggttgttctgttagggttgttaaaaagttgggactagtccatggatggcagcattgtgtataaatttactatctgttgctctgc

SEQ ID NO: 20819 - DNA, 1805 bp, Oryza sativa
  ref <308>: DATABASE ACCESSION NUMBER: AK071124
  ref <309>: DATABASE ENTRY DATE: 2001-12-06
gtatcgcccgtcgcagcaatgctcggccgccgcggcggaggacggggacgactacgagaggccatgcccatggatccccgggaagaagaagaagaagaagatcacgtgcctcgccatttgcctcatcgcgtcgccgatcttgatcctcctggttagccggcgaggctcgccgttcccgtccatgtccggctgggcgtcgccgtccaggatgtacgcatcgaaagggtccaagagagacgtgctcatgggcggcctgctcgtcccgggactcgacgagcggacgtgcgccagccggtacagctcggcgatgtaccgcaagaacacggcgcgatcaccgtgccgtcacctcgtcaagcggctgcgggagcaggaggcgctgcagcggcggtgcggcccgggcacggcggcgtactggagggcggcggagcggctgggctcccggcggaacggcacggccggcgccgacgacgaagggtgcaagtacctcgtgcttgtgccgtacaggggcctagggaacaggatgctggccatggcgtcggcgttcctctacgccatgctcaccggccgcgcgctgctcgtcgacaggggggagtcgctggccgacctgttctgcgagccgttcccgggcacgtcgtggctgctgccgccggagttcccgatcaagaacctccaggacttgaccggcgaggcgccggagagctacaggaacctggtgcagagcgaccggccggccacgtcggtgtcggagctcccctacgtcttcgtcgacctcgaccatggctgcacctaccacgacaagctcttctactgcgacgacgaacgccatttcctccaccgggcgccatggctgctgatgaggaccgacggctacttcccgccggcgctgttcctcaacccggcgtaccaagacgagctcgaccggctgttccctcggaaagactcggtgttctacctcttggcgcactatcttctccatccgacgaacaaggtttggggattgatcacgaggttctacgactcctacctgagggattcggacgaacggctcggcatccaggtcagggtgttcgacggggacaccccgttcaagcacatcttggatcagatcaccgcttgcacgtcacaggagcggttgctaccggaggtggtggagcaagaaccgtcgtcgttcccagctccggcggcggcggcgacggcggcgcggtccaaggccgtcctgatgaccggcctgaactcgtggtactacgacaacatccggtccaggtactggcagtcaccgacggccaccggcgaggtggtgcgcgtgcaccagccgagccacgaggagcaccagctgtccgggagcacgacgcacgacatgaaggcgatggcggagatgtacctgctgagcatgaccgacgccatcgtcaccagcgggtggtcgacgttcgggtacgtcggccacggcctcggcgggctctcgccgtgggtcatgttcaagccggagaacctcacgacgccggacccgccgtgccggcgcgccgtgtccatggagccgtgcttgcacgggccgcccttctacgactgcagggtgaagcgtggcgccgacacggggaagttggtcccacatgtcagacactgtgaggacatgagctggggactgaaacttgttcacccagagtgaagaagggtgaagaggttatgtaaaaaaaagacagaaatttttggacaattgggatcaagctctgctgttagacatttcacctttataccatctttgttgatgaactgctcaagggcggcagccattgactggtaacagtttt

SEQ ID NO: 20820 - DNA, 1114 bp, Oryza sativa
  ref <308>: DATABASE ACCESSION NUMBER: AK071125
  ref <309>: DATABASE ENTRY DATE: 2001-12-06
gagtatcgcgcatccccaaccccaacccctccccgccttgcgccgccgccgccgccgccaccggcgccggcgatcctccgatgggcgcctcggcctccgtcctctcccttcccacggcggccgccatcccgggagccgccaccgctatagctggcgccgcgggctgcttcgccctcggctacttcctcgccctcagccgcttcccccgccaggtcgtcgctgcctcccccgcttccggggagacctcggacgaggattccgaggaggattcggaagaagatgatgatgacgaaaactccggccgcagccgggcggcgaagcgggcgcccaagcgcgccgggctccggctgctgttctgggcgcgcaacgtggtgaccaagtccgactcggcgaaggaggccgagagggccaaggcacggaccgcggctagccccctggaggtcgagaatctcgctgagattatagaggatttcaagatggtgctggttgtgaggaatgatttgaagatggggaaggggaagattgccgcgcaatgcagccatgcaacgttgggtctgtttaaaaaactccaacagagagctccaaaatcattaagaaggtgggagaggtgtggtcaagttaaggtggtcgtgaaaattgaaagcgaggaagatatgcttgttttacaaggaagagcaaagtctttgaatatcccaacacacataactattgatgctggaagaacacagatcgcaccaaattcaagaacagtcatggctattcttgggccagctgacatggtcgatgatgtcaccggtggtctgaagcttctataaattcttgttctcggtatcctcagacataggaatttgaagacaaacgcttaaatttgacaaaccacattggctgctgaagaacgaaccctgaaactcatcggctcactcaatcttgttgttcgagtatttaccagtgaagaggcttaatttcacttttacttgtatgaactgtcttcggagcaatggttttttctttcttcagttttccactctgcatttgttgctgtggacgtctgaactcttaaatttttctgtaacatattagataacaaaagggtaaaagacttcctacttatctt

SEQ ID NO: 20821 - DNA, 1163 bp, Oryza sativa
  ref <308>: DATABASE ACCESSION NUMBER: AK071126
  ref <309>: DATABASE ENTRY DATE: 2001-12-06
ggcaagttcaaacggagctggaggcagagctagagtgagactgtgagagtgaacaagagataagctaagctagtacagcaaccagcaagaacaaagaagagtggccggagtgggcgggggagatgagctcggcggcggcggcgacgaggttcatcaagtgcgtcaccgtgggggacggcgcggtggggaagacgtgcatgctcatctgctacacctgcaacaagttccccaccgattacatccccaccgtgttcgacaacttcagcgccaatgtctccgtggacgggagcgtcgtcaacctcggcctctgggacactgcaggtcaggaggattacagcaggttgaggcctctgagctacaggggagccgatgtgttcatcctgtccttctccctgataagcagggcgagctatgagaatgttcagaagaagtggatgccagagcttcgccggtttgcgcctggtgttcctgtagttcttgttggaaccaagttgggtatgctatgctattcattaattcaccctttaccttctgaaatttcttaattttttgaacgccattcaaccccacgaagatatttgatacagtaaccacagcccagtgacattctttgctgatgctgcattaccgatttcctgtctgttcagatctccgtgaagatagggcctatcttgctgatcatccagcttcttccataataacaacggagcagggagaagaactgaggaagctaataggagcggtcgcctacatcgaatgcagctccaagacacagagaaacattaaagctgttttcgacactgccatcaaagtggtgcttcaacctccaagacataaggatgtaaccagaaagaaactccaatcaagctccaatcggccagtaaggcggtacttttgcggaagcgcttgtttcgcgtagtcaataaccaagaagaaaaaaatgtggtttttgttccatcaccatgatgttcagatggccccatggatctactcagaatgggatagaagatcatggttgaatcaacattgcttgcagctaggaggaacttctagttctctttttttctgcagtggagctccttttgtttctcctttctctttttttcttatgttgtaaaagctccagaaagttttacccttggtaataagatgtgctcttctgg

SEQ ID NO: 20822 - DNA, 1584 bp, Oryza sativa
  ref <308>: DATABASE ACCESSION NUMBER: AK071127
  ref <309>: DATABASE ENTRY DATE: 2001-12-06
gatcagcagcacgcacacggcacacctactcccgcttcacatcgccaggtgttcgaccgaggccaccaccggcaatgccgagctctggcgacgcggcgggcaggcggccgcgtgtggtgctcatcccgagcgccggcatgggccacctcgtccccttcggccgcctcgccgtggcgctctcctccggccacggctgcgacgtctccctcgtcacggtgctccccacggtgtccaccgcggagtcgaagcacctcgacgcgctgttcgacgcgttcccggcggtgcggcggctcgacttcgagctcgcgccgttcgacgcgtcggagttccccagcgccgacccgttcttcctccggttcgaggccatgcggcggtcggcgccgctgctcggcccgctcctcaccggcgccggcgcatcggcgctcgccacggacatcgcgctgacatccgtcgtcatacccgtggcgaaggagcagggcctcccgtgccacatcctcttcaccgcctccgccgcgatgctctccctctgcgcctacttccccacatacctcgacgccaacgctggcgacggcggcggcgtcggcgacgtcgacatccccggcgtgtaccgcatccccaaggcctccatcccgcaggcgctgcacgatcccaaccacctcttcacccgccagttcgtcgccaacggccggagcctcacgagcgccgccggcatcctcgtcaacacgttcgacgccttggagccggaggccgtcgcggccctgcagcagggcaaggtcgcctccggcttcccgccggtgttcgccgtggggccacttctcccggcgagcaaccaggcaaaagatccgcaggcaaactacatggagtggctcgacgcgcagccggcgcggtcggtggtgtacgtgagcttcggcagccgcaaggccatctcaggggagcagctcagggagctcgccgccgggctggagaccagcggccacaggttcctgtgggtggtgaagagcaccgtcgtggacagggacgacgccgccgagctcggcgagctgctcggcgaggggttcttgaagcgggtggagaagcgaggcctcgtcaccaaggcatgggtggatcaggaagaggtcctgaagcacgagtccgtggcgctgttcgtgagccactgcggctggaactcggtgacggaggcggcggcgagcggcgtcccggtgctggcgctgccgaggttcggcgaccagcgggtgaactccggcgtggtggcgcgcgccgggctcggcgtgtgggcggacacctggagctgggagggggaagccggggtgatcggcgcagaggagatatcggagaaggtgaaggcggcgatggcggacgaggcgttgcgtaggaaggcggcgagcctcgccaaggccgccgcgaaggccgtcgccggcggtggatcgagccaccgttgtctggtcgagttcgcgcggctgtgccaagggggaacatgtcgcactaattgagtactgagacatgggttctaatttaaataattcggatggaatccttgttacagattttaaattggaataagaaatgaagccatatgaaatttgg

SEQ ID NO: 20823 - DNA, 2186 bp, Oryza sativa
  ref <308>: DATABASE ACCESSION NUMBER: AK071128
  ref <309>: DATABASE ENTRY DATE: 2001-12-06
gaatagacgctaagctgattacctgcacttctccctagcagggaggaaggaatggcagaaccattggagaattggatctttggctcatcgttggggggtttcaaatatcggttcaatagatgaatttaatagattctaaggcaaatagtaaaccatatactaatcagagcctttgagaaagatggcagaaactgaagatactcagttacaaaaagcaatattcgcacagtacattatgatgaagaagttattcatggagttggaagaggagagagaagcttcagcaacttctgcaagtgcagccttgtcaatgattcgaaagcttcagaaggagaaggaggagcagaggatggaagcatggcagtacaagaggatagctgaggaaaagattagccacagtgacaaagcactggagattctacaggaagtccttcaacagaaggaactggagaatttttatctgagaaaccaattgctggtgtataaacacaagctattggatgttggtattgatgagtgtgatattgcagacgagacgataactaacaatataccattatttgaaagcaaaaccgtggagaatctttgtcgtagcatcaaaaggaatttctctctgccaactttgcagatgaagaaactttttgccgaaaaggacaccgacagaaatgttgaatcaacaaagagcagattaggtggctttgtttgtaatttgagtgaagatgaattgaagcatatttctggaaatgctagtgacttcaaggctctagaggttcagaaaagcttgctgacagatggggatgccacagaagaacatggagaagaaccaaatcctccaagcagtgatctttctcaacaacctcatctcttggaagagtcaagttgttcctcctcgttgttgagtaatcatagagatacatccagtgaaagagcaatacaggttggggaaaatgcggaagatacacgacatggtgatcaactcaagcagtcacattcaggcattggaaaggaagaagtacaatcacatcccttggaagagtcatcaagttgttcctcgttctccacatcgagtaatcacagagatatatgcagtgaaagagaaatacaggttggaagaaacgcagaggatgcaccacatggtgatcaaaccaaagagtcacattcaggcattgaagcggaagaggttgcagttcatcctataagtgacatcgttgacacaatcaagattcaagaaagaagccaaggagtagaagaatcctcatgcactgcaaatgaaatcatcacaaaggagtcagaactttctcccaaggacgttccgaaagagcggcggcctcaggctctatccaagttatctgcaacaagaaaagttggctccatgaacaacctctacaggaatgtccatgtaatcaccgataagagttcgacgccacgaggaaagaattcaacgccacgagctggcactgagaggaccagatcaaggctgaagcgggtgcagagcgagaagatggttgagatgaatgacaccaggaaaaacaaggagcagatcataatgctcaaggaggtgtacgagcagcttaacatgatagaatcgcacatgaggccttcgacttcacaggagacccctcggaatgaccaatccttggaatctgtcttggaggcggctctgtccttctccttatagctagacccttgtggcctctactctaccatctgaacttctgaagcatatattcagaggccacctccagttttgaggcggccatctatcaggaacatctcttccatgaatacccaacaggggaaatgcatagagtttttatatgcagtgtaaaactgcaaactcccatggtggcgttctttgagaagtctcatacacacactcatctatcaaggcctccttcgagcggaggattttcgaagaaattctgcaggaattgaactaattcctgtaaaattctgtgaagttttcgcgttcgggagtccaaatagaaagaaatctaggtgttgggtctgtgggctgtggcctgacgccccacttcggcaaccaggcatccgttgtagcaacgttcttttcacagtggcagcggccaatgcagccgttatgttacttgtgtgagaaagttttacggttctacagagacaattttttttaccttatcacactaaatatagttaatgccatttctctg

SEQ ID NO: 20824 - DNA, 1004 bp, Oryza sativa
  ref <308>: DATABASE ACCESSION NUMBER: AK071129
  ref <309>: DATABASE ENTRY DATE: 2001-12-06
gccttttctccccgtcccccaaattcgcatctctaccctcgccgccggcggccaagcgccaccgccgaccaccgccgtcccccgcgacctcgccgtcgtcgaccacgacgagcggtggccgccgccgccgccgccctcctcgagttcgaccccgttcatctcatccgtcgtcctccgcgagataaccctccatcgctgtctcgggcgatgtcgaagcagctggtgtcgcggctgctggggatgttccgctcgcgggcgcaggtgggcgccgacaagttcggcaaccgctacttcacccgcgtcgaggaggtcgacggcgtcatgaaggagaaacggtgggtggagttcaaggggagcgaccaggatccgaccactgttccagttgagtggatttgctggttgaatggacaaaggaagaaagctccgacaccagaggagttggctgagctggaagcaaggcgtgaacgtgtcaagcaaaatattgaattgctcaaaaagaaagaagaggaaaagaagaccggtgtccgaccagtcaagacggttgggaagtttgaatctccaaatctcaaaagttttattcagcagtttcctgatacttcgctagatcagagaaaaggacatgatgaggtatctagatcaaaggatggaactgatacagaggatgccaccatagatactgacaggtcttctgaaccgacaggaactggtgctaccttcaaaccagggacatggcagccaccaacttgaattacaacaaacatataattgtagcaggtgaaatggtgctgcagtcagcatcagcattttcctttgagagtgtactatcttccagttatttgatgaagaaatggagatttatttttactgtgattaccactgtacactccgggagttacatcaacaaatgcagtatccggatgacaacagatatatacttaccaatcttatcaaatacatgatcattcatgtgcctgactaattagttttgttattgagaaatatgg

SEQ ID NO: 20825 - DNA, 1711 bp, Oryza sativa
  ref <308>: DATABASE ACCESSION NUMBER: AK071130
  ref <309>: DATABASE ENTRY DATE: 2001-12-06
ggctcgcgagagaggagccatggctggagcctcgccgtcggcgcgcgccgaggtggtcgtcccgccggaatgggcggcggctaccgccaccgccgccgccgcctcctccgagcccgcgccaccggtcgtcgtcgtctgcgggcccaagaacgccggcaagtccaccttctcccgcctcctcctcaactcgctgctccccaggtatgggagggtggggtatctggacacggatgtcgggcagccggagttctcgccgccgggatgcctctcgttccacgtcgtcgacgaagctctcacagatttgctcaacccaactctgcgtgagtgtgaaaggtgttgcttcttcggtgatatttcttcaaagcgagatccagaaacatatctgaattgtctatttcatttgtatgactattttgttgaaaaatatcgatctggtgccagtgaacctctacctttaattgtcaacactcctggatgggtgaaaggtgctggttttgatatgctggtagagatgctaaggtatatctgccccacaattgttgttcagatacgcatctctgcgcagagcaagaatctccctgatggaatgttttggttagattgtgggcaaacaggaccaaacatgatcaatattgatgctccatttcatgatgctttgaatagatcgttgttaatccagaaagattcttatggaatgcgtgagcgccggcttatagagtacttcaagcaatgttttccaagtgacatatcactgacaacaaataaggagcttgcctatggcctaacttcacttccaccctatgaagtatcaatttcagatgttatggttatacatcttcattgccaggtacctcctagtgaggtatggcatagtctaaatgctaccatagttggtttggccattagctgtggcacgatcgaggcaggccgttcaatcccttggtgtgctggtcttggtattatcagaggcatcgatgtgcaaagaggcattttatatgtaataactcctgttcctctagagcatcttcaaagagttgatctcttgcttcagggactcattgagatcccaaagtctcttctgcaggtccgaggatgcgtctcaccatacatgccaacgaatgtgctgcacaggatttcggagagggacataaacacctgagttgacgtcgaacgcccttctcctttgccaccaccgttcggggagatgatcctgaacctgttcagaacagagcagagcagttctgacccacagatggagacttgtaacctgtgcagtactgccatgcttgtttgtagcccttgctggtggaaacgatgatatatcattatctgcaattcgttggagacatcggaaaatcaaaattttgaccttttcttgtcctctgcaaaaattgaccgtcaaaatttagtaatgtcaaatattggcgcatgttagattaccaaaatttcgtagtgttggaatgtgtaggtgtagccttatcaaatgttcacatagggttgggttggtttgagatctaaattgaccttttcaatttttggcaatgccaaaatttagcaagttgtggcatgactaattttgggaaggcaatgttgtgtttggattgaagttaaaataagttaactattgaaatggcctaagaaaaggcctattttcttaggcatgttaagatttggcttcaaactaaatagacaataaatactattgaaattg

SEQ ID NO: 20826 - DNA, 1733 bp, Oryza sativa
  ref <308>: DATABASE ACCESSION NUMBER: AK071131
  ref <309>: DATABASE ENTRY DATE: 2001-12-06
ggcacggcgcggcagcgagacgaggtgttcgacgcggaggtagacgacggcggcgaggtggggagagagaagatgcttctggaggagcttctccggtgccagatccaggagtggtaccccgcgttccgccgccacaccgtccccaccgtcatcctcccgctccccgccgccttcctccgctacctcgccggccggcctgcctacccggacaccggcggtgaacaccccgagggccgcgacgacgacgccgagccgctccccttcttcctcccggccatcacctccgggcgcagcgcgttcccgccggcgcacgcccaccaccccgacccggtctccctcctcgaccgcgacaactccgacctcttcttcgactccgccgacgatgacgaccgcgacgccgacagcccgctcaggccagccttcccggagctcgaggccgcggttgactccgccatcgcggagctcggcggcgccgcgctccccaagctcaactggagcgcgcccaaggacgccgccttcatgtccgccgacggcacaatccgctgcacctgcttcgctgaggtcgccatgctgctccgctcctccgactgcgtagcccacgacctcgcctgcgcgcgcccctcctgcaaggacttcgcgccaccagcaggtgttcgacggaatgctgctactggtgctgacgaaggtgctcgaccaaatgtctacaagaacaccaaggacactactgaagagcaaactgatcaacacgaggcactagagactagtggtacgggtgctccaccgaatggaggcgagagcagcaatgatgcaggttctatgagtgattccaaggagagcgctgataaaggaggcaaccaaagtgctgtggacggtgaaacggatgatgcaccacaagaagacgttggagaagaaagtaattggacgtgggtcgatgatgggttccagtactaccttgcactccgaaagtggtacccaggccttcgtcctgaattagaatttcgatgctttgtgcggcagcggaggctgattgctatgtcccagagagatccatcggcctactacccatcactgcctgggtggagtgctgaggtgcaaccgaagattgaggctttctttgaacaagtaatcgagccacaatttgcttcagagaattatacattcgatgtgtatgtgagagcagatgggtgggtgaagctgattgatttcaatccgtggggtgggtataccttgccactgctgtttacatgggaggaacttgagcaggaggagagagaggaggtggaggtaagagtggtgatgcaacatggtgctgtgaggccaggattaatgacagcagtgccgtatgatatgctggattggggagagggcagtggctgggatgtgttcctgaagaaggctgatgatgagctcaacaaacagatggcttcattaggtgccgattcgtaatcgtgatctgtaggaacatgtttgaactttgaagagtccagtatgtcaataacttgaagtgatgaatgctggtattatttcatcagttaaatactactgtagcaaccactgtaatcatgatgctaccatgttatttctttagagaacttctgctgtactagcttaccaacatgtttgacctctgaatgcttcatgtagcagctgtgacttcgaacatctaagatatgataacatgtagctgaatttacaacaaacttttagaaatgaacacattgtcatttttgtgg

SEQ ID NO: 20827 - DNA, 1187 bp, Oryza sativa
  ref <308>: DATABASE ACCESSION NUMBER: AK071132
  ref <309>: DATABASE ENTRY DATE: 2001-12-06
gagaggccaattccaaatccgccatcgcatccttctctccatccaccgaggcggcgccaccacctctcgtccggcggcggcgcggcgcgacgctccatccccggcgaaaaggccgccggattccctgtgggggcggcggagaggcgtcggaggaggctggcgccggcgcggcgacaagcttaattaagcaaattggattcggatcacaaaggaggcggtgcctgtagaaaagccatggcttcttcggtgttcaaggcgatggcagagaaggcagggccgtctgtccgaaagcaggcccttacgctgaccgatgcagcggcgtcgagggtgcgccagctgcttggcgtacggcagcgtgcttatctccgtcttggcgtcaaggcccgtggttgcaatgggttgtcgtacacaatgaattatgctgatgagaagggaaaattcgatgaacttgtggaagataaaggagttaagatactaattgatccgaaagctcttatgcacgtgattggaaccaaaatggatttcattgatgatccacttaggtctgagtttgtgtttatgaaccctaattccaagggagaatgtggttgcggcgaatcatttatgacatcaaccaaaaacaaaggcccggcatagtccaccaagttttggcagcgatttgttgattatttgatgtatagaagtatgttgctaatttgctatacacttcagtgacccattgtagaggaaaatttcatttcagctccattgagctgattatccttcgtcactcagcatggttggcacttgttacctttcacctctggattggatcatctgcagcaaaggaggatactgccattcccctctagcacgaaacatccaattgcaagatgcctcctgattgcatactctggtgagaacaatggaggtcagcgttccagcaactcgcctgagggatcatataacaggattttcggcattccatccactcgctaagggatcatataacagaggtcttgtttacatcttgtaagatggcatccaaggatagatgtggcattgttttttttcctcttttgcaccatgatctgataatcaccttgctgcatgttcatactgagattttgatctctcatgtaacgggattttatgccatttatgcttttcctggttggaagttgatgttaaatttaaccatgattatt

SEQ ID NO: 20828 - DNA, 1095 bp, Oryza sativa
  ref <308>: DATABASE ACCESSION NUMBER: AK071133
  ref <309>: DATABASE ENTRY DATE: 2001-12-06
gatatcctttcctcttcgcaagcctcccccaccttcatctcctcctccgcctcctcgcctccccaccccttctagaaccttccagaaccccagagaggcggcgagatgcacggcgtcctcacctccccgtgcctgcgcccccctcccctcctccgccgcgccttcccgagccccgccacccgcctcctcccgccccaaaccctagccctccgcccgctccccctcccccgcggcctccgctcgtcgccgccgccgccgcgcgccgcggcggaggcggcggcttcggcggtgggcgggctgctggccccgctctcgacgctggaggtcggcctgcggagcgtcaacctcgcgccgctgcgggcgccggtggccgcggcgatgtcggcggtggtgcggtggctgggggtgtacagggaggtgctgctcgtcggcgtgctcttctcgtggttccccaacatcccctgggaccgccagccattctccgcgctgcgcgacctctgcgaccccttcctcgcgctctgccgcgaggtcatgccccccgtgttcggccgcaagctcgacctcagcccgctcatcgcgttcatggccattgacatcatcatcatgatccttcgcccgcagccacgcatgtgattgctcccggtggttatgggattggaggatgctggttggtaaattaggtttactatcggggcacaggctattttcggtcaatcaacaagggatggtgctgctgaattttgcaagacaagaaatggttggttgagtaaagttgcaaagccaatatagttcttctaaaggtagctcaatttgagtaatttcgagaagtttgttttcaagtgtagctcttctatgtatggcactcgaggattgtacaagtagtatatgtgctagctacattttttttttgttttctttgcaaatcttgctctctgctcggattggcagtacatcctgcacatgcgtttaatgtgatttcaaattattgtatcttaagcgtctaggctcatgttcctcaacggtttgtgacaattcttctggaatctcaattaacacaggcacgagcttatatattcatatacgcttttctgatct

SEQ ID NO: 20829 - DNA, 1576 bp, Oryza sativa
  ref <308>: DATABASE ACCESSION NUMBER: AK071134
  ref <309>: DATABASE ENTRY DATE: 2001-12-06
gaccgtccatttcccctctccccacctccgcgtctcctcaccatggcttccgccttctcccccgccaccgccgcgcccgccgcgtcgccggccctcttctccgcctccacctcccggcctctctccctcaccgccgccgccgctgccgtctcagcccgtatcccgtcacggagagggttccgccgcggccgcttcaccgtctgcaatgtagccgccccctccgccacccagcaggaggctaaggcggcgggcgcgaaggagagccaacggccggtgtatccgttcgcggcgatcgtggggcaggacgagatgaagctgtgcctgctgctcaacgtcatcgaccctaagatcggcggtgtcatgatcatgggagaccgtggcaccggcaaatccaccaccgtccgctcgctcgtcgacctgctcccggatatccgcgtcgttgttggcgaccctttcaattccgaccctgacgatcccgaggtcatgggccctgaggtccgggaacgcgtgctggagggtgagaagcttcctgttgtcacggccaagatcaccatggtagatcttccccttggtgccactgaggatagagtctgtggcaccattgatattgagaaggcgctcaccgatggtgtcaaggcgttcgagcctggtttgcttgccaaggccaacagggggattctttatgtggatgaggtcaatttgttggatgaccatctagtagatgtgcttctggattctgctgcgtcaggatggaacaccgtggagagagagggtatctccatctcccaccctgctcggttcatcctcattgggtctggtaaccccgaggaaggggagctccggccacagctgcttgaccggtttggcatgcacgcgcaggttggtactgtcagggatgctgaactcagggtgaaaattgttgaagagagagctcggttcgacagggatccaaaggcgttccgtgagtcctacttggaggaacaagacaagctccagcagcagatttcatctgctcggagtaaccttggtgctgtgaagattgaccatgatcttcgtgttaagatttctaaagtgtgtgcagagttgaatgttgatggattaagaggggacattgtgactaacagggctgccaaggcgttggcagcactcaaaggcagggacactgtcactgtagaggacattgccactgttatccccaactgcttgaggcatcggcttcggaaggacccacttgaatcaattgactcaggattgctcgtggttgagaagttttatgaagtcttcacctaaattattctggaggtaaatggttttctatcagaaagttcggcaggagggcttttgtttgagtttaatgacattgtttcagaggcttgaacttgatgtctatttgtacatctatcattagtatagattttattccccttcaatcgaaatgcctgctatgagttgcagacggttcgtacatttgaatcttccttgtagtcattgatgcagccaatgattaggaaaggagcatctaagtcaagctaacatcttatatttctttttgaaaaaaaaaaagaatcttgcagct

SEQ ID NO: 20830 - DNA, 895 bp, Oryza sativa
  ref <308>: DATABASE ACCESSION NUMBER: AK071135
  ref <309>: DATABASE ENTRY DATE: 2001-12-06
gggaagcagatcatcacctctccacccgtttctttctcggcccatccaacacgcgctcttgcttgaacgcgcaaagagaaacacgacgggcgaggcgagcgagatgaggttcttcctcaagctcgctcctcggtgttccgtgctgcttctcctcttgctggtgacggcgtcgcgggggcttaacatcggcgacctgcttggcagcacgccggcgaaggaccagggatgtagccggacgtgcgaatcccagttttgcacaattgcacctctgctgaggtacggcaagtactgcgggatcctctacagcgggtgccccggcgagaggccatgcgacgcgctcgacgcctgctgcatggtgcacgaccactgcgtcgacacccacaacgacgactacctgaacacgatgtgcaacgagaacctgctgagctgcatcgaccgggtgagcggggcgacgttcccggggaacaagtgcaacgtcggccagacggcgtccgtcatcaggggggtcatcgagacggccgtgttcgccggcaagatcctccacaagcgcgacgacggccaatagctagccaccacgtttcgcacatacacacgctgtacagtgaatcagtgatagtacaaagaagcctagaggtaataaaaccgcgcggcggcgtccaccggtggccgtggcgtggcggtgcggcaaccagaacgcggcatgcgcgcgcttgctggcagctggaccacctgtggttcgtaggcgtaggcattggacctcggttgttggtgcggcaatggcgttggccactggcgacggggaggagtaacattatgctctgttagtcaataagacggaacatgttacaaaaaaaaaaaagaaattattaaatggaacatggttggttattggtag

SEQ ID NO: 20831 - DNA, 1580 bp, Oryza sativa
  ref <308>: DATABASE ACCESSION NUMBER: AK071136
  ref <309>: DATABASE ENTRY DATE: 2001-12-06
gacactctctgcttctctagcatcacaaggtagacgatggctaagggtcacgtcctcgtgctcccgatgccatgccagggccacgtcatcccgttcatggagctctcccaccgcctcgccgacgagggcttcgaggtcaccttcgtcaacacggaggtggaccacgcgctggtggtggccgcgctgccgccgggcggcgccgcggagctccggcagcgggggatccacctcaccgccatccccgacggcctcgccgaagacgaggaccgcaaggacctcaacaagctcatcgacgcctactcgcgccacatgccgggccactttgagcggctcatcggggagatcgaggccggcggcgggaggcccaaggtgcggtggctcgtcggagacgtcaacatggggtggtcgttcgccgtcgccaggaggctcggcatccgcgtcgtctacttctcgccggcgtccacggcgtgcatcgccttcatgcgcaagatccccaagctgatcgaggacggcgtcctcaacgagaaggggtggccggagcggcaggagacgctgcagctggcgccggggatgccgccgctgcacacgtcgctgctgtcgtggaacaacgccggcgcggcggaagggcagcacatcatcttcgacctcgtctgccggaacaacaagttcaacgacgacctcgccgagatgaccatctgcaactccttccacgaggccgagcccgccgtcttcaagctcttcccggacctcctccccatcggcccgctcgtcgccgaccgcgagctccgccgccccgtcggccacttcttgccggaggacgccggctgcctggactggctcgacgcgcagcccgacggctccgtcgtgtacgtggccttcggcagcatggccatcttcgacgcgaggcagttccaggagctcgccgtggggctggagctcaccggccggccgttcctgtgggttgtccggccggacttcacccctggcctgagcacggcgtggctggacgccttccggtgccgcgtcgccggcaggggcgtgatcgtcgagtggtgctcgcagcagcgcgtgctggcgcacgccgccgtggcgtgcttcgtgtcgcactgcgggtggaactcgacgctggaaggggtgcgcaacggcgtgccgttcctgtgctggccgtacttctgcgaccagttcctcgaccggagctacatcaccgccgtgtggcgcaccgggctcgccgtggcggccggcgaggaggacggcgtcgtgacgagggacgaggtgaggagcaaggtggagcaggtcgtcggcgacggcgagatcagggagagggcgcggctgctcagggacacggcgcgcgcctgcgtcagtgagggtggctcgtcgcacaagaatttcaggaaatttattgacctcctaagtgagtgacactgcaaccgatcgactgatatgcgtccaaattaatactgtacttcctgtttgtacaagcagaactccatacttacctgcattactgtatccgcattggtgcaaaatcaaaacaatttaccatatactgtatttatatctatcttgttacttgcatgatc

SEQ ID NO: 20832 - DNA, 1283 bp, Oryza sativa
  ref <308>: DATABASE ACCESSION NUMBER: AK071137
  ref <309>: DATABASE ENTRY DATE: 2001-12-06
gtccctccttccctcccgccgttgccaaccacccccttcccctcccccctcgccctcgccgccggcggccgtctcgtcgtcggtgagacctagagagccaaacagcgcgttggttgttgagctcggagagggagagagagagagagagaggatggaattggagtcggagcagcacggctgcgagcattacacgaggggatgcaggatcagggcgccgtgctgcggcgaggtgttcggctgcaggcattgccacaacgaggccaagaattcgctcgagatccatctcaatgaccgtcacgagatcccccgccacgaaatcaagaaggttatctgctctctctgcgacaaagaacaggatgtacaacagtactgttctggttgtggggcatgcatggggaaatacttctgcgaaaaatgcaacttctttgatgatgatgtctcaaagaaccagtatcactgcgatggatgcggcatatgcagaactggtggtgtggataagttctttcactgcgacaaatgcgggtgttgctacagtaatgtcttgagggattctcatcactgtgtagaaggagcaatgcatcacaactgtcctgtctgcttcgagtacctatttgactcgacgaaggacatcagcgtcttgcactgcgggcacacgatccatctggaatgcctgaacgtgatgagagcgcatcatcacttcgcttgcccggtgtgctcacggtcggcctgcgacatgtcggacgcgtggaagaagctcgacgaggaggtggccgcgacgccgatgccggagttctaccagaagaagatgatatggatcctctgcaacgactgcggcgcgacgtcgaacgtgaacttccacgtcctggcgcagaagtgccccggatgcagctcctacaacacccgggagaccagaggctgcggccgccctgcagccgcgcgctccacggtttgatttcagcagcaggagcagcagcagcagagacgagttggcatccatctcacaaactaaggatgaaatcgagagcgacaaacaagatgcagagacggcttcctctgaacttagccgtcgagcaaaagctgcaaaatcgatcggcgtcgagtttggtagacacactttgcgccaagaggagtatggtgattttggcgcagtatgcagcgagttgaatagcccatatatgttgtgttttctctctctctcttttttgtgaggatatatgttatgttttgaaactccaactattattattactaaatgatactcctaataaaagagagacatcttc

SEQ ID NO: 20833 - DNA, 1511 bp, Oryza sativa
  ref <308>: DATABASE ACCESSION NUMBER: AK071138
  ref <309>: DATABASE ENTRY DATE: 2001-12-06
ccctcctcctcctcctcccatggcgccgcccggggctccgggacggacagcctctccgacgacggggcgcgccaggtggccgccgcgctgccgtccgcgcggctcgccaggctcaagctccgcggcctccggcagctctccgacgacgggctcgcgtcgctcgctggcgccacgccggtgatccgcaagctctccgtcgcgtcctgcagttttgggcccaaggccttcgtcgccgtcctccggtcgtgccccctcctcgaggacctctccgtcaagcgccttcgcggcctccctgacaccgccggcgccaccaccgccatcaccgaggagatcctcttcccgcccgcctcgtcgctgcggtcagtctgcctgaaagacctgtacagcgccctctgcttcgtgccgttggttgcctcgtcgccgaacctccggtcgctcaagatcttgaggtgctctggctcctgggacctcccattggaggtcatcgccgcgcgtgtacctggccttgttgagctccaccttgagaagctgcaggtgggtgaccgcggcctctccgctgtatcggcatgtgcaaaccttgaagtcctgtttcttgtcaagaccccagagtgtactgatgcaggcataatcagcgttgccgagaaatgtcacaaactgcgcaagctacatattgatgggtggcgcacaaacaggattggggatcatggcctcatggctgttgcacgaggatgtccagacctgcaagagctggtcttgattggggtcaaccctaccgtgcagagtctccgtatgcttggtgaacattgccgctcactggagcgtcttgccctttgtgggtgtgagaccgttggggatcctgagatcatttgcctggctgagcgctgcgctgcgctcaagaagctttgcgtcaagggttgcccagtctcagaccgtgggatgtgggcactgaatgggggctgccccagcttggtcaaggtgaaattgaagagatgccggggcgtatcgtatgaatgtattgagaacctgaaggtggttaggggtggctcattctctatcagcttggatattgtattggagcgtgatgctggaggtgcaattgaaaatggcgggcaagaggctggacaggtgcaaattacagagcttactgatcagatggcagccatggatctcccgactaacgccagcaatgcacaatcatctgcccaggcaagtagtaggatgaggagcgtcatgtcagcactcaggaggaggtttggcaatcctccagctctgtgatgtgagataaaaaaaattgatgaacctatttgctactttatgcattctaatctcatattcatgttccttaggttattaattttactatctagttctcgcaaaatcatcatgatggataattctgtgttaccattgctatttcatcagcagttgttgccctttctctgattaaaaaaaagggtttggtttagctttttgttgatgattaggatgcatctatacaaatttatttcttt

SEQ ID NO: 20834 - DNA, 1296 bp, Oryza sativa
  ref <308>: DATABASE ACCESSION NUMBER: AK071139
  ref <309>: DATABASE ENTRY DATE: 2001-12-06
gaccgggttcacaacctcgcgtaaacacccacgaaattctccgcaaaagataaaaataaaataaaataaaacccaccccccttctcctctcctccatctcctcgcttcgtcccgttcacaccaccaccgtctcgtcgcctcgtcggcggcgtctcctccgcgcgagggtccccccccaaaccctagccgccgccattgccacgcgcgcgccccccaccccacgaatggaaggaggcggaggcggaggcggaggcggtggcggaggtggaggtggaggaggcggaggcggggcaccgtacgccacgcgcacggcggaggaggtcttccgcgacctccggggccgccgcgccggcatgatcaaggccctcaccaccgatgtggagaagttttacaagcgctgcgaccctgaaaaggagaacttgtgcctttatggatatcctaatgaaacatgggaggtgaccttgccagctgaggaagtgcccccagagatccctgaaccagcattgggaatcaacttcgctagggatggcatgaatgagaaagactggttggcgttagtcgcagttcacagtgattcctagttactgtctgttgcattctactttggagcccgatttggttttgacagagaagcaaggaggcgactctttaatatgataaacaatttgccaacaatatttgaggtagtgacaggagccgctaagaagcaggcgaaagaaaagactcccaacagtagtagcaagagcaacaagcctagttcgaaagtgcagtcaaaagctgagtctcgttcgaaatctaagctgtcagcccccaaggatgaagagggaagtggtgatgatgagggagaggaagaggaggatgaccatgacaacactttgtgtgggacctgtggaaccaacgatggcaaggacgagttctggatctgttgcgataactgcgagaagtggtatcatgggaagtgcgtcaagatcacacccgctcgtgccgagcatatcaagcagtacaagtgcccggactgcaccaacaagagggcccgggcatgagtaacaagaagctgtgtcgaactgtgttagagtggagttgtcaatctccggatgtcatgatctcttagatattatcttgccctagcttttctagtttgtaagcttgtctctaatttaattttaaactgtaactttgattaacctacctgtgtttaaagcttcatctttcctgtgttaattctagcattcatagtgtgtaaacttgcacatcttgtgtcaactgaagcctgaaggtacggcggctcccctgacc

SEQ ID NO: 20835 - DNA, 1694 bp, Oryza sativa
  ref <308>: DATABASE ACCESSION NUMBER: AK071140
  ref <309>: DATABASE ENTRY DATE: 2001-12-06
gtcgatttctcgctcgttcgatccgagcggggtatcgtcgtggttatggggaagctgctggacctgaagcggctcatgtccgtgccgaaggagcggaatcgtcgtcggcggtagcggcaaatccgagcccgcaatggttcaattgattcagtggctaaaagaaagggatcactctgccaacaagttgcaaattctgatggcgagagaagaacaagatattcagggcctaaccttccagaggacatctggtgccatatacactccctgatgccattcaaagatgctgcccgtgctgcatgtgtgtctcatgcttttcgtcgttcctggcaacaccgccccaatcttatattttgtattggaacactggggttggatttcatcaacaaaattgatcgtattataaaaaaccactcaggcattggcatcaaatcgctacagttagaatatgatactttttgcaatgctagaaggagcgctagcatcagctatcatctcaataattggcttcagattgctgttacaccatggattgaagaactaatccttacactgtcgctatcttcatacaatgtggattacaatttcccgtgctcacttttatctgatgggagaggaagttcattgcgacatctttatcttggcagttgtttctttcatcctacagttaatcttgaattgagaaacctgacgaggttgcatctggttactgtacatattacaggagatgagtttgggtgccttctttcgaattcttatgctttggagcgattggaacttaaatattgttatggaataatttgtctgaagataccttgcctgttgcaacgccttagccacctggaagtgtttgaatgcagaatgctgcaagccatagagaataaggctccaaatctttgcagttttgaccttggagctaggcaggtacggctcttgcttggtgaatcattgcaaatgaaaacactatccttggactatcctagtgccgtctattatgctcgtgcagagcttccatccaatgtgccaaatcttgaaattctcaccatttgctcggatcacgagatggttgatacaccaatgttgcctagcaaatttttctatctcaagtgcttgactattgatcttgcttggagactttccccagcctatgattatttctctctgatttcttttcttgacgcttctccttccttggagactttttgtctagaggaccgaatggagaatgaattgattattggagatatgtcacatatgaggcaaatgctagaacaccgtcatgacaacctccagagcgtggagattattggcttttgctatacaaagagcttgatcgagctaacatgtcatattcttgacaatacaacgtcgcttaagcaccttaaactggatactactcgtgatgtttttagctgttctacaggcaaacacgacaaatgcttccatatgggtaaggatatgctcaccgaagccaagaaagcagttttggcaattgaaacttacatcgagccaaaagttccctccactgtcatgctaaatgttgtgaaaccttgcaaccgttgccatgttgctgaatcttagttctatttttttcctaacataattcctatgtagatgattatggagttttttaactgatcatgttttctgtcttcacacaactgaattacgagtcacatccaattgaattatgagtc

SEQ ID NO: 20836 - DNA, 1925 bp, Oryza sativa
  ref <308>: DATABASE ACCESSION NUMBER: AK071141
  ref <309>: DATABASE ENTRY DATE: 2001-12-06
gagggagagacatacacatccacaatcggcagctattaattacacagagagctcctagcttgccagcttgattaagcaaaggagtgacgtcgtactgcactgcgcagccatggcgactctggagacgtgggtagggttcgggtcggccatggccggcgtgggcttgctttggtcccggatgccggagcacgtccacgaggaggctaggtacatcatcagtagcgtggtccccatggttatgtcctacttcaacccctacgagcagatcaccgtgtccgagtacggcgaggagcggttccggcggaacaagatgttcgacgccgtctccacctacctgaggagcgcgtgcctgggcagcgcaaccaagctcaaggccaagctcggcaacaacatcggggatgacccgcttgtgattctagacgagaaccaggaggtcgtcgactgcttggatggtgctcgcatgtggtggaggctgtaccccaaggcctccaagaacacagggagcaccatcatcagcatgttccccggggacacggacgagccgcggtgctacaggctggtgttccacaagcgccaccgccagctcgtgctcaagacctacctgcccggcatcatccggcggtggcgcgagctaaccgccaaggaccggcagaggctgctgttcaccaaccactccaaacaaggggagatcagcatgtggaccagtgtcccgtacaatcccccgtcgacgttcgacatgctcgccatggaccatgccaagaaggttgagattatggacgatctcagggcgttccagaaggggaaggaataccactccaaggtcggcaaggcgtggaagcggggctaccttctgtatgggccaccgggcactggcaagaccactatgattggggctatggccaatttcctcgactacgacgtctacgacctcgacctaacatctgtcaaggataacgccgagctgcggaagctcttcctcgatacgacggacaaatccatcatcgttatcgaggacatcgacgccatcgaggtcgagctcactaccaagcgcaagggcaagaagatggacaacagcgacgaagtcgacaacaaccatgtgctggtcgagctttccaacaagactgatgataaaagcaaagtgacgctgtcaggcctactcagcttcgtcgatgggctgtggtcggcgtgcggcagcgagagggtgttcgtgttcacaacgaaccacgttgacaggctcgacccggcgctgattcggccggggaggatggacaagcacatcgagatgtcctactgccgcctcgatgcctttaaggtgctggccaagagctacctggacatcaccgagcactcgctttttggtgaaatcgggagactgctcgacgagaccgacacgactccggcagatgttgccgataacctcatgccgcggggtaagaggaacggtgaaatcagtcgactgatcgatgagatcgacgcaccggcagacgtggccggtaatcacatgctacggtgcaagaggaagagagacgcggacgagtgcctggcaggtttagtggaaacactgaagaaggccaagatggaatcagcaacacctcctatggacacaatcgaggaagaggccaacaaagaggaacaaacctaacacagaagaaagctagacaggggctgatacatgatgagggctgctacttcttggcctcctcggtttgcgtgtcctattttacctgacttccgtgtaatggtgcgtacgggtttattagtcacttaagctagcataagccataccataaaatggcaaaatatataaaaatagtggtgtattacgacttatgttctggatctattatttcacgctccataattcgtctggtcaaccttgtaaattctgataattatatgtttatatatatgtgtggagattatgg

SEQ ID NO: 20837 - DNA, 1775 bp, Oryza sativa
  ref <308>: DATABASE ACCESSION NUMBER: AK071142
  ref <309>: DATABASE ENTRY DATE: 2001-12-06
ggtggccggcgccgtccgtctccgcctacctcccgctccctccttcctcccgtcgcctcatgcccccgcatccgcacggctgaagtcgcctacgcaggggaggagcgaaaccctagctccggattcttctcctctcctcctttcttctctccgatgcacccgagtgaccgagtgtgcggcggcgatggtgacgacgacggtccggcggagtggtgcgcacgagctgtcggctgggggcgcagcgaggtgtgaacggcgcgcgtgcggtggcaccggcgcacccaagagggggcttggagtgcaagccagagcacgcaaggacggagcgtgtgccggcgcgcgaggacggtgttgcatgcttcctggcggtggctgcacagcgagcttatgccttgatgttcttcggtggtttagggctccaattcgggttattgggcttgacgaattttgtgattttgggactgtgcgtgatctgccggcacttccgccgctgacgacaggggaggttgcatgccatcgacattgtgcccccgtagtgtcgacttgaaccggcttggacacaactccaggcttcgtctcaaacaggcatgtgatttcctgatgcgttcttcgtgggaaaaaaagtaagcaaccctgtaggtattgatactttggtagaattgtcataaggtaaaagtgctctgttgtgataaattgagattgtaacaatgcgattgggatgaagtatgtagatttcaataatagctggattcatgattaatagctggatcgaatcattaattgatcccagcgtccaccttttgttgtgcgagttaacacatactcgtagggagggcttatcagttttagtaagcaattttttcaactactaccggcaattgttagaaactactggcaggcactgctcaaatggacatcatacgattcataacttacatgtcctcaccaaaagaattttatatgacaaaaataacattagttaagggtaggatcacttgtttagatacataggtttggccagttcaacctgctccattgtttcagcctgaaaagcattttgctattttttgacctttgatggcctttaggggttgatctagttgatttggccaaataataaggactttaaaatgttgtagcatggcatatagtggtgctgaatatttaaaattcatgtggccgaagtagtttgttggtaggtttgaaatttttgataattttgtttgtaggtttgaaaatccagatactaatgatgttagtgatttgttatagatggctgtggcctgtgaaagtatgaaaactttcagaaaatagtagatagctgtttaatttgctttattatttaatttatttttgtgctcggtttttgtacttgcatagcagatccttgatatttttgaaattgtaatgatttccttacatgccactatgagttaattgttgctagctgttcaggttatttttccaagatgaagtgactgcaacgtcatttgactgaattggaaggatattgcagctagttgcttgcctattgcagctgttctggcaatatagagtgcaattaccaggatgtttttggcagaagctgcatatttttgttgtaggtgcaatattcttctgaagatacaaagcttcatattttgctgaagatagacaagttgtacagatgcatgtgctgatcctagagagaaattgtgtttgtgtagcctacttttgatgattttcgttttctgctggttacttgtatgaatacattatatagatgactttgtatg

SEQ ID NO: 20838 - DNA, 1071 bp, Oryza sativa
  ref <308>: DATABASE ACCESSION NUMBER: AK071143
  ref <309>: DATABASE ENTRY DATE: 2001-12-06
gactccgctcccctcctctcctcctcccttctcgcggaggccgccgcaaccaaaaaaaaaaaagtctaaccctagatccaggccccgcgtctccggcgatctcccggccatggcgactcgccgggccctctcctccctcgtccgcgccgcctccaggctccgcggggcctcgcccgccccgcgcccgcgcgggccgctccaccgaccgtcgccatcggggtacctcttcaaccgcgccgccgcgtacgccacggccgccgcggcgaaggaggcggcgcctcccgcgcccgcgacggggaaggccacgggtggaggtaagatcaccgacgagttcaccggcgccggcgccgtcgggcaggtgtgccaggtcatcggcgccgtcgtcgacgtgcggtttgacgaggggctgcctcccatcctcacggcgctcgaggtgctcgaccacaacatccgcctcgtgctcgaggtggcgcagcaccttggcgagaacatggtgcgcaccatcgctatggacgggactgaggggcttgtccgcggtcagcgcgtcctcaacaccggctccccaatcactgttcctgttggcagggccacgcttggacgtatcatgaatgttattggtgagccaattgatgagaagggtgacataacaacgaaccacttccttcccatccatcgtgaggcgcctgcttttgttgagcaagccacagaacagcaaattcttgttactggaattaaggttgtggatctgcttgcgccctaccaaagaggtggaaagatcggtctttttggtggtgcaggagtcggcaaaactgtccttattatggagttgatcaacaatgttgctaaggcccatggtggtttctctgtgtttgctggtgttggtgaacgtacccgtgaaggtaatgatctttacagggaaatgattgaaagtggtgtcatcaagctaggtgacaaacagagtgaaagcaagtgtgctcttgtctacgggcaaatgaatgagcccccgggtgctcgtgctcgtgttgggttgaccggtttgactgttgcggaacatttccgtgatgccgaagg

SEQ ID NO: 20839 - DNA, 1946 bp, Oryza sativa
  ref <308>: DATABASE ACCESSION NUMBER: AK071144
  ref <309>: DATABASE ENTRY DATE: 2001-12-06
ggcgcacgcgcacgtccgcgccgaggaggagctggcctcgcgcgctcttcgaggagagaccgcgggggaaaccctagaggctgcgccgccgctcgccgccggccggccgcggcgggtggtggggcagggcctgacgacgaccggttcaacaagcagtaagatctgaggttttgggggtgggattagggttgttgccggggtttgtttggtgttgcggcggcgccgcggagggggttcatggcggggtcgaagtttgggtcgttcaagtcggagaaggggagctcggcggggcggcggcgggggccggagcggcggcgcagaggagggacccatacgaggtgcttggggtggggcgtaatgccaccgagcaggagatcaagagcgccttccgccgcatggccctcaagtaccatccagacaagaatgcagacgaccctgttgcctcggacaagtttcaagaagccacattctcttacaacatactgtcagatcccgataagaggcggcagtatgattcctcgggattcgaggccattgaagcagatagtcaggaactggagttggacctgtcaagtctgaacactgtaaatacagtgtttgctgccctgtttagcaagctaggtgtaccaatcaagaccacagtttctgcaacagttttagaggaagcattgaatgggtcggtgggaatttcccaactcgagcttggccagtccgtctttaggaaggtggaaaagcaatcagctcacttttattctgtggacataacagataaagaagccaaaatggggttagtgtgtagagttcaatcaactgctaaaagtaaattcaagttgctatatttcgagcctgaagaaaatggtgggttaagccttgctttacaggaagacagtgtaaagacagggaaagttacttctgctggaatgttctttcttggctttccagtctatcgctttgaacaaaataattcagttgctgctgcaaaggatcctgatagtgcattctttaaaagattggatggctttcaaccatgtgaagtaaatgaactaaaagcagggacccatttttttgctgtctatggtgataatttcttcaagagtgcaacctataatatagaggttgtatgtgctgaacccttttctactgaaaaggagaaactacgatgcgtggaggcaaagatacttgcaaaacgatctgagctgtctaaatttgagtctgagtatagagaggtcttagcgaagttcaccgaggtgaccagcagatacgctcaagaaatgcagacgatcgacgagcttctcaaggaaaggaatgcaattcatgcatcctacaccaacaacacaactctgcaacggagttccagtagcaacaaagggaaaacatcctctaaagagtccaaaagtgatgatgaccaaactgtgaaaaaggaaaagaaatcgaagagcaagtccatggagggatccagaagtgatgatgatggtcctagaaaggaaaagaaacctaaggaacgacttcgaaggaagaaatggttcaacatccatttgaaagtagacaagagaagaccctgctgaggaaggtattccctgcaagttactactcccaggaaatggaacccaagggagttgctccgagaagaaatatctttttctttgtcgtccactccatgggatcaaataggcaggaatctcagtttgacattcggaaagacaccctcgcaaattattttttctcctgtgacgtaacattttgtttcctgaaaagtcaggagcctcggcagtttcagaaatgatgtaaaatattgcatgtagtgttcttttggggatcttactggcgctgtatccgttcacccggaaccaagatggttaatgatgtgtgtatacagcttcaagaaactgtcttatgttgtacactgcagccagaatccaattcagattcgttcaaatttttaggtg

SEQ ID NO: 20840 - DNA, 1369 bp, Oryza sativa
  ref <308>: DATABASE ACCESSION NUMBER: AK071145
  ref <309>: DATABASE ENTRY DATE: 2001-12-06
gtgcagcggcgtctgttgccggtattaggaagccaacgttgagacgtcttccttcggtcccaatctcacacaccatgacaggaaagagatcgacctcgacctcgacctcgacctcgacctcgagtaagcgaggatgcagtgctactcgtacggcgacggcggggtcaatcgccggtgtagatcacaatacgtaccattgtctaatagtcttagttctgtttgagacgccctctggcttcgcaatgttcggtatgagtggggacagactcattcaaccaaatgccctgcaggaaatctgggcaaactttggcgtggactatagggtatccaaattcatttggctgaaggaatttcgagaaatcaaggacaagtccagtgccattaatcatgatactggtgtcagttgcgaccttgctgagatgatcatgaagtggcatcaccctgggcagaaaatggccgttggaaaacccgaatataaagaaatcattgaaagaagcttgagtgtgccctgcatgtttgatgaaattgtgatggaagtgatgtggggcctgaagaatctgatgcatgttttagtaccccaagaaaaaatgaagttgagcaaggacgactacctcccaatgagccaaggattgtacatgctccttaaccgctatggtttggatgtcaaaccagagatggttactgactctattattaagctggcatgcttcttgcttgattgcgaatactgtgatgtgaaaaactccaagcacttgcgctggactggtgaatacattgagaaacggtctggcattaaatgtttagactgggatttgatgaaacttgctacgggtattaagatcatatgttaccccacagaaagatctacagctgaggaagcgatgtttacacaagatgagctgtcgaagttagtgaaggatgcacataagtatgaagggaagatccgtaagagatctttcatgaatgcctacagcgagatggttgaagcccgtcaacttattcctatggcacaaaaacaactggaggacttggtaaaggaggccaaagatgcatgtgaagctgaacaaagcacatgaacgcaataagccagtcagtagcatgagagaagaacacagtcgcatgagagaagaactcagtcgccaagaatatcacatttccttaagggagaactgggtttgaaatcctatcctggacactggatggtgaggctgcctgaagctgccatcctggaccaaagcgttgcattcgtgtgtttttctctgtttaattatcgacaatgggaactcactagtaattcgaccagcgttatctactcttgattgcttttgatgtttcttttcctatcaaatagttaaacttcaggttctcg

SEQ ID NO: 20841 - DNA, 1306 bp, Oryza sativa
  ref <308>: DATABASE ACCESSION NUMBER: AK099166
  ref <309>: DATABASE ENTRY DATE: 2002-08-28
gaagagagaaaaaaaagagagaataatttcccccttttctctcttccgtgccggagaatcgatggagattagggcgccgccgacgagcctgaggctcgcgccgccgccgccggcctccgccagcttccgccggaccgcgctcaggacctccttcctcaacggcagcgtttcacttagacttattcaagtgcgccaatcaaatgtcaacaggtttaagtgcaatggcataagaagtaacctccttgatagattttctagggttgtaaagtcctatgcaaatgcagtcttaagttcatttgaagaccctgaaaagatcctagaccaggctgttttggaaatgaatgacgatttgacaaagatgcggcaagccactgcacaggtcttggcttctcaaaagcggcttgagaacaaatacaaagccgctgaacaagcttctgatgattggtatcggagggctcaacttgctcttcagaagggtgatgaggatcttgctcgtgaagcccttaagcggcgtaaatcatatgctgacaatgcaagctccttaaaggcccagcttgatcagcaaaagggcgtggttgagaacctggtatcaaatactcgggttcttgaaagcaagatagcagaggctaagcaaaaaaaagataccttaaaagcccgtgctcaatcagccaagacttcaacaaaagtgagcgaaatgctggggaatgtaaatactagtggtgctctttcagcatttgagaaaatggaggaaaaagttatggcaatggagtcccaagcagaggcactcggtcagttggcaactgatgatcttgaaggaaagtttgcattgcttgagacttcatcggttgatgatgaccttgcacaaatgaaaaaggaaatttctggaagctcttcgaaaggagaacttcctccaggtagaacggcagtcagcaattcaggagcagcgcgccctttccgagacatcgagattgagaatgagctaaatgagctgcggaggaaggccaatgaatattagattatgcagtttccttgtccctgcaccaggcctgacgaatcctttagactgaagaaccccgggaagatataggatggtcttcaggtttctccaatgcccctttgttgaaccaccagtgcagccttttttccccccaagagtataatggatgcgtaaaaaaaattctacattttgcagtgtgattgacattgactgtacagttagctacatagttatgtaaaagtcatattgctctttctagagctgactctgcatattttagtggaaagccaaaaatttccgtcctcgtgc

SEQ ID NO: 20842 - DNA, 963 bp, Oryza sativa
  ref <308>: DATABASE ACCESSION NUMBER: AK071146
  ref <309>: DATABASE ENTRY DATE: 2001-12-06
gcgagtcagattggggatcgacgaaggtggggaggggcgaacgccatggacgaggaggagcacgaggtgtacgggcaagagatcccggaggacggggacatggacggcgcggacgtcgacatggcctccggcggggacgacgccgcgaagctgcaggagctcgaccagatgaagcgaaggctgaaggagatggaggaagaggccgcggccctccgcgacatgcaggccaaggtcgccaaggagatgcaaggtggtccgccgggaggagatcctagcgcgtctacagctgaggcaaaggagcaggtggatgctcgatctgtgtatgttggaaatgttgattatgcatgtaccccagaagaagtgcagcagcattttcaagcgtgtggcacagtcaatagagtgacgatcttaactgacaagtttggacagccaaaaggttttgcttatgtggaatttctggaacaagaagcagttcaggaggctctgaatttgaatgaatctgaactgcatggtcgtcagataaaggtggcaccaaagaggactaatgtccctgggatgaagcagcgtccaccgcgtggatacaatccttatcatggttacccatatagatcgtatggggccccatatttcccaccatatggttacgggagagtccccagattccgccgtccaatgcgctacaggccatacttttgaagtaagaggttttcatgacgtggaacacaacaccaagcctagtcgctagtcagccaagtcggtcccagaaataattctactatctggtattttagtttcccagcagacatgctgggtgaatgcttccacccccaccatattccattttggtaacgtccgctcactagttatcagtatcttgtatcgttggttctgcagtacgcaaaacgtagtgttatcttattatattatatatacctgcatcatatgatattggtttgccatact

SEQ ID NO: 20843 - DNA, 1088 bp, Oryza sativa
  ref <308>: DATABASE ACCESSION NUMBER: AK071147
  ref <309>: DATABASE ENTRY DATE: 2001-12-06
gatatttatatgtggaaaaaattaaaataaaatcggattcttctcttctcgtggggattccggcgaggatttcggcgagcaggggggcgatcgatcgagagcgtccgccgccgccgccgcggaggtaggagggaggggagagagaccggtcgcgatgaactgcgagacgtgccagctgaaggagctggagctggaacaggatgagatcaaagatgtgcttcgatgcattttacatacgatcttcttccaccgaactcttactcttgttcggcctaaagatgttgactgcgatctctttgagatcacctatgttcaatgcggacttcctgacttagaaaaggaggtggatgaaaagatcaaccagttcattgcttgggtggagaagcatccaaatcgaagaagccaggtctgcctgtccttctttgacgaaaagaacaaaaacccaagctggttcaccagcaaaactgagaggatttactgggaacagtggttcatcaatttgcatgtcataagccctaaaggacatggaaaatcacgtagctccaaagcatcaacaagtattcgagggaaagcgttggaagaggccagctccaagcgtgctgcgctggggttgctgatccaggaagtccttttccagatcatcaacttcgccaatgagaaaaaagaccatattcctccaatctccgataggatattcaatcacgagatctcgatccccaggtgacaccttttccttggacgtgttgacagctcttctgattctgtattcgggtggaacgccgacgtccttagaagagtgttgaatagttgaactgaagacggtgatcatcaagtacgccatgtccagcgttgggatagaagataaccccctatgtggtcgttctgtcaaagatgtcaagccattgtcatgaacagtatcatattgtacagaataatttaggtaataatagaacagacagaaaccaacgattttactcactggagatgtaaatatttcccttgttaatctgtgaccaaaagcagttgttcctaactaaaaactcatgctggcaaatcttactatgagagaaattgagttgtctgcagtc

SEQ ID NO: 20844 - DNA, 2000 bp, Oryza sativa
  ref <308>: DATABASE ACCESSION NUMBER: AK071148
  ref <309>: DATABASE ENTRY DATE: 2001-12-06
ggcgcggcaatcggggcattcgccagccacacctctctccatcctctcgttctctctctgtctcctcttctctctcccccgacggagaggagagaaggcgaggagccgggggagatgggatcggactcgccgcccaagaaatggggcctcagggagcagcgcgaagcctacctccggtggttctccctcgccgacgacgatggagatgggcgcgtgacggggaaagacgcgctcaagttcttcgccatgtcgaatctctcccgccccgagctgaagcaggtctgggcaatcgctgattccaagcgtcagggttatcttggattctcggagtttatgaccgcaatgcagctggtttctcttgcacaagctgggaatgagattagtcaggacacccttgcacatgcagatttggagacgttgctacctccgacaatggaaggtctggacaaaaaactaaaaaataattctatgagcaagagcaactctgatattgtcgtacgtcatccgtcagaattgcctgcatcagccaactggtttaactccaagtcaggaaagaagattcctttaagatcagttacttcgatcatcgatgggttaaagaaatcttacattgagaagttgaggccactagaaaaaacatatcagttcgatgactttgtttcacctttgctgactagcagtgatttcgatgcgaagccaatggtcatgttgctgggtcagtattccacaggaaaaaccacattcataaagcatttactgaagacaaattatccaggtgctcatattggtccagagcctacaactgacagatttgttgttattacttctggacctgatgaaagatgcatccctggaaacacaattgccgtgcaagcagacatgccatatagtggcttgtcatcttttgggacagcatttctatcaaagtttgaatgttctcagatgcctcatccactactggatcatataacctttgtggacactcctggagttttatcaggggaaaagcagcgaacacagcgtagctatgacttcactggagttacatcatggtttgcagccaagtgtgacctaattcttctcctatttgatccacataagcttgacatcagtgatgagttcaagcgtgtaattgggtcactcaaagggcatgatgataaaatacgtatagttctgaacaaagcagaccaagttgatgcacaacaactcatgagagtctatggagcactgctatggtcgcttgggaaagttctggacacaccagaagtcatgcgtgtgtacataggttcatttaacgacaagcccattagggagacagtagctgggccactgggtaaagaactgtttgagaaagaacaagaagacctgctctccgacctgaatgacattccaaagaaagcctgtgaccgtcgaatcaacgaattcgtgaagcgttcgaggtcagccaaggtccatgctcacataatcagccacctgaagaaggagatgccggcgctgatgggcaaggccaaggcgcagcagcggctgctcgacaccctcgacgagcagttcgccaaggttcagaaggagctgcacttgccggccggcgacttccccagcgtggatgagtacagggagacactgagcgcctacaacttcgacaagttcgagaggctgaagcccaagctggtgcagggcgtcgacgacatgctcgcctacgacatccccgatctcctcaagagcttcaggaacccctacgaatgaatgagcaagcagcagcagtcagagaaggcgtgttcgaccacaatacaagcatggatctttcttgttcacaaaaaaagaatgtgatccgtgaatcgtcaatccatctcttttgtgctccacgaaggcgcgatatatggctttttgttggcgattttcttcagtcttctgcagtgatctctgaagaaggcagtgtgacaggaatgtgcaaagtgaagccgattggaaagtttggaacagcgttaaactgggcttgggct

SEQ ID NO: 20845 - DNA, 1149 bp, Oryza sativa
  ref <308>: DATABASE ACCESSION NUMBER: AK071149
  ref <309>: DATABASE ENTRY DATE: 2001-12-06
ggttggcgaaggaccaaccaatttcctctctctaatcgccgcggcgggggatagattgggagtgagcgcgtatggcggaggagcagttcctcgccgtcgcggtggacgccgccaagaacgccggcgagatcatccgcaagggcttctaccagaccaagaacgtggagcacaagggccaggtggatttggtgacggagacggacaaggcctgcgaggacctcatcttcaaccacctccggaagcactacccggaccacaagttcatcggcgaggagacgtccgcggcgctcggcgcaaccgcggacctcaccgacgacccgacctggatcgtcgaccccctcgatggcaccaccaatttcgtccatggcttcccttttgtttgcgtctcgatcggtctcaccgtcgggaaaattcctactgttggagttgtgtacaaccccatcatgaatgagcttttcacagctgttcgtggaaaaggtgccttcctcaatggttctccaatcaaaacttcatctcaaaacgagctggtgaaggctcttctggtaacagaggttggaaccaaaagagataaggccactctggatgatacaacaaacagaatcaacaagttactattcaagattagatctatacggatgtgtggctcgttggccttgaacatgtgtggagttgcctgtggtaggcttgatttgtgttatgagattggatttggtggcccctgggatgtggccgctggagctctgattcttcgggaagctggtggttttgtttttgatccgagtggtggggagtttgatctgatggcacgaagaatggcaggatcaaacagctatctgaaggatcaattcatcaaagaattgggagatacaagttgaacaacatattcctcaacatgaagtagaataagaatataagatcgccctgccaattttattggggcaaattttctttctagtggttctgcataaacagcatgcctgttgcggaaaagttttggacgcagtatggcattgtattgtttgaaacttttttttttttggcactactatccggtgttacttcggaaactagtgcatcgaagattcgaagtagcttaatcagaattttgaaccgaatgttcagatggattgtgcaatgtgcatttccccc

SEQ ID NO: 20846 - DNA, 1810 bp, Oryza sativa
  ref <308>: DATABASE ACCESSION NUMBER: AK071150
  ref <309>: DATABASE ENTRY DATE: 2001-12-06
gataagtgcaactgtctgagcaggagctcgagagccttcagcaccccacgcactatgagaaccagcactgacccgtccggctcaatcgagtcgtttcacggcctcgtacacctccgcacggcggcgccattgctggctgcagctgtggcgttatacatgctcatagagcagctgtcataccaccgcaagaaggggtccatgccaggggcgccgctcgtcgtgccgttcctcggtagcgccgcgcatttgatccgcgacccggtcggattctgggacgtgcaagcggcgctcgctcgcaagtccggcgctgggctcgccgcggactttctcttcggccggttcacggtcttcatccgtgactcggagctgtcccaccgcgtgttcgccaacgtccgcgccgacgccttccacgtcgtcagccacccgttcggcaagaagctcttcggcgaacacaacctcgtctacctggtcggcgaggagcacaaggacctgcgccgccggatcgcgcccaacttcacgccgcgcgcgctctccacttatgccgtcatccagcagcgtgtcatcatctcccacctccggcggtggctcgaccggagtgcttccaacggcggcaaggccgagccgatacgggtgccctgccgcgacatgaacctggagacctcgcagacggtgttcgtggggccgtacctcaccgagaaggcgagggagaggttcgacagggattacaacctcttcaacgtcggtttcataaccttgcccgtggaccttccggggttcgcgttccgccgggcgaggctagccggggcacggctgatgcacactctcggggactgcgcacgtcagagcaggcaacgcatgcttggcggcggcgagccagagtgcctcctggactacttgatgcaggaaacggtgcgtgagatcgacgaggccacggcagcggggctgccgccaccaccgcacaccagcgacgtggaggtcggcgccctcctgttcggcttcctcttcgcggcgcaggacgcgtccacctcctctctctgctgggcggtgtccgcgctcgactcccatccgaacgtgctcgcccgcgtccgtgctgaggtggccgctctctggtcgccagagtccggcgaacccatcaccgccgagatgatgtcggcgatgaaatacacccaggcggtggcgcgcgaggttgtccggtaccatccaccggcgacgctggtgccgcacatcgccgtcgaggcgttccagctgacggcgcagtacactatacccaagggcaccatggtgttcccatcggtgtacgagtcgtcgttccaagggttccaagacgctgacgcgttcgacccggaccgcttcttctcggaggcgcggagggaggacgtggtgtacaagcgcaacttcctcgcgttcggcgccggcccgcaccagtgcgtcggtcagcggtacgcgctcaaccacctcgtcatcttcatggcgctcttcgtctccctcgtcgacttccggcgtgagaggacggagggctgcgacgtgccggtgtacatgccgaccatggtgccgagggacggctgcgtcgtctacctcaagcagcgctgagtcaagttgccatcgttctgagctggttcccgttacccagtcctgctccgctcggtttcttttcctccacctccactgcatgggcattacgtatctcgttcattcttcattgccccgccgctcctttcatttccccagtcatctccctccaaggttctcttcgtcaacacagttattagtactccctccgtttgaaaatatttgacaccgttgacttttt

SEQ ID NO: 20847 - DNA, 1354 bp, Oryza sativa
  ref <308>: DATABASE ACCESSION NUMBER: AK071151
  ref <309>: DATABASE ENTRY DATE: 2001-12-06
gagctcccgcgcgcgctgttccggccgccgccgagctggtcggagtcggaggcgaccgccgatagccctgccggcgagagatcgatcgatcggcgtcgccgatccgacatatccaatggttgagtcggggagcgaggcggcggcggcgacggcggcggcggtgctgacggcgccgctgtccctggagggcggcctcgcggcggagctccggccggcgaacctcgtgcagcgcgtgctcagcctcttccgcaacgtccgacccggctccgatctctctcactttcagctgcctgctacgttcaacctgccgaagtcgcagctccagttatacggcgagggagtgtactgcgtcggaaaagactacctgcggcggtgcgcgaaggggagcgacgccgtcgagcggttcgcggcggtcgtcggctggagcatctcgacgacgaggcctcccatcttcggcttcgcgccgtacaaccccgttcttggagagacccaccatgtctccagcggatcactccatgttcttctcgagcaggtgtctcatcgtcctccggtctctgcactgcatgccactgacgatgacggtgagatcgagctcgtctggtgccaaaacccaatcccgaaattccacggcacaagcgtggaagcgacagtgaaaggcatgaggcacgtcaagcttctgaaattcagcgagaattacgagatcgactgcccaaacctgctcatcaggttgctgcctgctccatcagcggagtggtctgggacagtcaggatcgtctgcaaggagtccgagctcgaagcagagttgatctactacaggagcaacgctttcctgggactaggtggcgatccaagatgtgttaagggtaagatattcagctcaagatcaggagagatcatctgcgagattgatggacattgggatcggatcgtgtcggcgaaggatgcgaagaccgggaaggtgtcggttctgtacgatgctgaatccgccattgctgacctcaagacacctgtggtcagaaaccaagagggcgtgtcaccttcagaatctgtggtggtttggggcgaggtgagcgatgccatcctgaagaaagactgggagagatctagtcaggcgaagcgacgagtggaggacacggcgaggaggctagacagagagaggaacgacaagggagaggtctggattcccaagcatttctcgctgtctcaggacaagaacggcagctgggaatgctcgccgctggagaaatctgtgcctccagctccgatcattgtcccctcatgactgtagattacatgtaacagatgatcctatatatactatataaatctataacatagctgatgatttgatttt

SEQ ID NO: 20848 - DNA, 1570 bp, Oryza sativa
  ref <308>: DATABASE ACCESSION NUMBER: AK071152
  ref <309>: DATABASE ENTRY DATE: 2001-12-06
gaggcggcgcaccagtcgcgcccgggctccgtcgcccagaagaaggccttcttcgaggcgcactacgcccggaagcgcaagaccgacgccgacgccgacgccaccggcagtgacgtcgaccctgacgaggacgccgccgccgctgtctcctcggcgcgctcctcctcctcttcgtgtatgacggacgagcccgccgcggaggagacgacgagctgcgtcgttggttcgggcgttgtcgctgctgggccggtggaagagatggaggagctggatgtcatcgccgatggtggggttggctcctcttgcggagtggatgcggatggagccgcgcatcacaagcaggatggtgtccatgctggtgaatcgagagaggtgttgcaagcgatggagaagcaggaggctgctactcccgatccttgtgctgacaattccgtgcctgctgatgcagacgacaagcaaccattgaaggagagttccattgttaatcagggaagtgccgagtctgtaaagagaagacggcttccatctctgcttcagaaaccggccaaattcagctctccttcctctggtagcaaagggcctacctcatcggcgaaaagacggtcacgcctgcattctgcaaaggagaacagctcacctcctaacaacgaaagcgaccagcaggcaacaagttcggtccctcaaaatcggtccatcttggaagcgtttcagaagtcaaagaactttggtaggtgcgaaacaggcaatgctgcctcgagctcaaaaaatcttggcaccacaattgctgcaaggattagtcagctggaatctgcaactgggcctgtgaaacacactgattctgcactgagccaagtcaagccaccaatagaggcatttcccaaagatgtgccagaaattacctcgagaacatcccaactggaagaacaaaggtcctcacatgtaacgagggtgaaagaaaagttatttggttttacctcacaatcggcacatcagaaagccaatacaccacgtaaagagaagggaaaaacccaaaatgaaagcttcaaggctcggccactaccaaatttttatcgtagaaataagcaagcaaaggattcaattcaccagagttcacaagatgtcaacaacagtcatgcacacccaacaaacaaagaagcatccaaagacaaacaaatatgttgctttccactcagaaggctgggttagattatatggtctcttttatttttctccggcgattttagggcttagtaaataatagcttattcgtttgattcttatcttcgctgtgttgcctttgtagtacttccaatctgtattaatgttgttagttatgtttgcccttccaatctgtattagaggatgcctttctctacgcatctaattctcgagttaggcttgctgattgtaattgggactatcattttctagcttggaaaataaagcagaggtgttgttgagcagtgattttttttttatctcaatagtacgagcacatgtaacatgttcaaacaaccctttttggggatggtaaacatgtaatccgagtatcctatgatgttcattttct

SEQ ID NO: 20849 - DNA, 1108 bp, Oryza sativa
  ref <308>: DATABASE ACCESSION NUMBER: AK071153
  ref <309>: DATABASE ENTRY DATE: 2001-12-06
gtccccacgtcgccctccccgatcccctttcgctcccccttccgatcggcgatttggcggcggcgttggagccgtcaccggtttccccgctccccccttcttctcccttccctcacggcggcgtcggggcggatggcgcgttcgagctgacgccgatgtcttccctccccttttttctccctctcctctccctcctacctcaccttgtggcagcaccgccgagggcaggacgggcgaggcgcccgtcggagccggcacaggtgctcccttcctccttctcccttcacttgtgccggcggcggcggttgcgacgagggaggacagatgcggcgcccgtcgttgctgttgtcgccgtgtcccctcccttcttctccctccccttctgtcagcggcggcagccttctccgttcgtctctctcctatccgtctcccagcgtcgtcgtcctccggccaccgccgtcctctgccagcacctcctccggccccctccactctgcccatccgctccactcttccctcctacccaaatctacggcgccgctccgtggtcggcagctcaattcctcgccggatctgacagtttgaccggtggagaaagaagaagcgggcggcccgcgaggatggaggaagcggattggcagaagttggccgttgagatctccatcaaacctgtccccttcaagcatccgggtccgacgtcctctgcgcatggtctgtgacagcttggtataatgaagaattagaaaggattcagttctctccttcctgttctattctttcagcaatggtttaggtcaacacaaaaaatttggtcgagttaagcaacaaaggttcagggcctgttcactttgatgccattttcaaccttaccaaattttggtaacttatataagaaatcttgccagttgccaaaattttggcatagttgccaaaatttcggcaatgtcaaaatttggtaaggatttttttggcatcaaagtgaacatgccctcagttcttatccttccagttctccttttgtcttgaatgttcttgaagaagctataagtggaacagatacattgagatcactcccagttggatcatcagcaccaggaaaggttccgcc

SEQ ID NO: 20850 - DNA, 688 bp, Oryza sativa
  ref <308>: DATABASE ACCESSION NUMBER: AK071154
  ref <309>: DATABASE ENTRY DATE: 2001-12-06
gcaagaccagcttcatggttaagtatgttggggacgacgaggagcagaacggcttgcagatgacgggcctgaatctgatggacaagaccttggcagttcggggagctcgaattgccttcagcatttgggatgtggcaggagacagccagttcctcgaccacgtcccgatcgcgtgtaaggacgccgtggcgatcttgtacatgttcgatctcacgagccggtgcacgcttactaatgttatagattggtatgagagggcaaggaaatggaataagacggctattccaatcctaattgggacgaagtttgatgacttcgctcagcttcctcttgagatgcaatggaccatcgttaacgaggccagggcatacgcgagagcgatgaaggcgaccctcttcttctccagctcgacgcacaacatcaacgtgaacaagatcttcaagttcatcacggccaagctcttcaacctgccgtggacggtggagcgcaacctcaccgtcggcgagcccatcatagacttctgaagactctacacccttacactgacaaaatgctaggcaaaaaaacgtacacgagcccttccttccctccccttcgtcgtcttcctcctgacctttctctcccggtaatggaggccggccatggccatggctgagcagaactgagctcttgcatgtacatataggtg

SEQ ID NO: 20851 - DNA, 218 bp, Oryza sativa
  ref <308>: DATABASE ACCESSION NUMBER: AK071155
  ref <309>: DATABASE ENTRY DATE: 2001-12-06
gggttttcatttttaattttttttgtgtacccatacatatacgtatacgtgtactgcatacatactagagcacctgatggtgcttgtcgtcgtcgattcttttgaccgatttgaagtttggtagggtgtaatagcacttacttttgagttttccacattgagttgattcggtgtaataggagtcaaatttgagtttcttatgatggttgttcatgatc

SEQ ID NO: 20852 - DNA, 1451 bp, Oryza sativa
  ref <308>: DATABASE ACCESSION NUMBER: AK071156
  ref <309>: DATABASE ENTRY DATE: 2001-12-06
ttggggcacagcagtagcagccaacggccgcgccgccacaacatggcgtcgtttctttcccgcgccgccgccgtctccctcctcgccatcgtcctcgtcctgactgccgccacgtccacctcccctgcggccgcggccgctcggttcccggaggaggcgcgccccacgaggtcggggtacctcaacgtcacgtccaccaactcactctacttcgccttctacgaggccaccgacccggtcaccacgcagccggccgccgtgccgctcctcgtttggctccagggcggccccggctgctcctccctcatcggcagcttcgccgagctcggcccctacctcctcctcgactccacctccgccctcgcccgcaacgacaaccggtggaaccgccgcttcggcgtgatcttcatcgacaacccgctcggcgccggtttcagcgcgcctgcctccggcgacgacatcccgaccgacgagcgcaccatcgccgcgcacctcctcgcggccctgcagtcgttcatggcgctcgatccggccttccgcgcgcgcccgctgttcctcaccggggagagctacgccggcaagtacatccccgcggccgcgtcgcacatcctcgacgccaacgccaagctcacggacgaccgtagggtgaacctccagggcatcgccatcggcaacggcatgacgcacccggtggcgcaggtgaccgtgcacgccgaccaggcctacttcgccgggctgatcaacgccgagcagaaggccaaggtcgaagaaatgcaggacaagacggtaagcctgatcaaatccaagaagtgggccgcggcgaggagggagaggaacaggatcatagcgttcctcaagaacgccaccggcgtcgctacgccgttcaactacgcgcgggagaaggggtacccgacgcggccgctccgggacttcctcaacaccggcgaggcgaaggcggcgctgggcgcgaggagcgacgtggagtgggcgcgctgcagcgaggccgtgtcggcggcgctcgccgacgacatcatgaggagcgccaggggcgacgtggaggccgtcttcctggcgccggatggcgtccgggtgctgctgttccagggcgtgttcgacctgcacagcgggccggcgtccgtggaggcgtgggtgagggagctggcgtggcctggcctgggcgcgttcctcgccgcggagcgcgccgtgtggcggctcggggacgagcagctcgccgggtacgtgcagaggtcgggggcgctcgcgaatgcggtcatcgtcggggccgggcacatggcggccggcgacaaccggccggcggcgcaggcgatgatcgagggatgggtgttgcagacggggccgttcgacggaagcggtcaacgagtcgttggctccttattctgacttacgggtgggcttgattttgactgaaataaatgctttttggtactcgt

SEQ ID NO: 20853 - DNA, 721 bp, Oryza sativa
  ref <308>: DATABASE ACCESSION NUMBER: AK071157
  ref <309>: DATABASE ENTRY DATE: 2001-12-06
gggctgtatattcctaaaatgccctttcatccaaactagcggagagagaattctccgccaccacaaaaaaccaatcccccaccaccaccggatcgtgacggcgacctctcgctccaagcttcctccaacgaggtcgggcgacatcgacgaggaggagaggaggactcgagcacaccggagagagtgaggagaaagagtggggcgacggcggcggggtgccttgccaccagcccggctgagtaccgtcgtcacctccctagaagcggtgtagccggcattgccgcgccgctcggggccttagccgagcgcttgcgccaccgcaccggcgccgaggttgtctccttgcttgaggacgccatgcgacgactatgaacagcgcctcgttgaaggccggtgcaccagctcgctcatcccggccgcgttctccacgcggatctaggcgcagcatccatctctgccacgggagcaagccgccatccacaatcgctgatatgagctttgtttgttcccttttgctggtgtgcatagccatcaagtttctcgattctgagatgtttgttctaccggtggtgatgaattgagttttcatctaaaattttgcttcctctatacttgaagcagatgtagggcaaagtaaaaaacaaaaatcccaattttgcttcctgtcctctaaacattccttcgtgtctggaatggccatttcgttgccttttaatctctg

SEQ ID NO: 20854 - DNA, 1569 bp, Oryza sativa
  ref <308>: DATABASE ACCESSION NUMBER: AK071158
  ref <309>: DATABASE ENTRY DATE: 2001-12-06
gacctgtcatcgtcactcctcatttcctcctcttctctcggcatcttcatctctatcccctttcctctatctcttctctctacagcagcgccaccaccacggactccgccgccgctcccgccaccgccacatcccttgccggtgatccagatgaggttccgcggcgtgcaggtggatctcgtgtacgccggcgtgtgcctcccgtggtgcccgacaacctggagtggacctcagtgcgaccggtcggtgctccgcggccttgacgaccttgccacggcgcgcagcctcaacggcatccgcgtggccgacgagatcctgcggcttgtcccggagaccgccgtgttccgcaccatgctgcggtgcgtgaagcactgggctaaggcgcggggcgtctactccaacgtcgcgggcttcctcggcggcatcggctgggctatcctcgtggcgcgcatgtgccagctctaccccaacacatccccagcatgctgctcccgcgcttcttccgcggctttgcgcggtggaagtggcccagcccggtgatgctgcgcgccatcgagcacgacgacggcgagctcggcctcagacgccaccctgcgcgtcatcaccgagcagctcgccgtcggcgacgacgtctgccaggagatcgtcaaggccgacgccatgtgggtggtgattagttaagtactgcttggtcttaatgatcggtaactgtatgtgttgcagcttgactaacaaatcactgagtctgagaaataagagtggaagtgtagctagttcgccgcaagctcgtgtttgtccactgaagtatttgcatcacttgtgtattccttcgtgcgtgtgtgacctcgcgtgtgttttgttgtttctctgggccaaagctcacagggctgggtggagtcgcggttgaggcagctgtcggccagggtggaggcggacacgtccgggatgctgctctgccaccttcacccgcaagcgtacgccaccgagcaccacaaggagccgcggcggcagggggagcgggaagctgtctccgccgcggccgcctcgacgccaaggatctccgggcggctcgccggcgctgcacggatggccttgaggagagcagctagctcgctcagatggccttgaggtggtcggcagcggcggcggcggcgatgtccttgccgtcggcgtctcagcgagggcgacgatgttgggggagtccatggccacgacgtcctccgtggtgaacccatcctcgttgcggaggagctccttgctgccggcggcgaccatccccggcgtaggcgtggcagtgcacggagcatgcggcagcgtcgacggcgaggtccgcctcctgagcgccgtcagccttcagccttcccgagccttggcacggcggacctcacgtggtcctctcccaccggggactgagagagaggatatagataactgataagaggggagaaatagggtgacaggtggggtccacgtgggtcccaccattatttttattattttgtatgtgcaactgacatgtgggtcccacgggtttgttatttttccggatcaaattgccacgtaagtacc

SEQ ID NO: 20855 - DNA, 1687 bp, Oryza sativa
  ref <308>: DATABASE ACCESSION NUMBER: AK071159
  ref <309>: DATABASE ENTRY DATE: 2001-12-06
tagcggtagtgcatccccatccatccattctcgcacaagattccatcttttcatccaccaatctcgcgaaatctccgtctaattcaagaaaagatgagctgaggaatgagaggaaatattggtgttgcgaattgtggattgggaatttggagtttggattaggaggaggaggaggaggagaagattaggcgatgtctttcaggagcgtgatccaggaggtgaagggcgagatcggcgccatctcgcggcgggggttcaggtcgcggccggggcgagtccggcgagtggcggcggcggcggaggagccgccggacgagtcgtcggcggcggcgctggtgatgcgggagagctgctggacgcagctgccgccggagctcctgcgggaggtgctggcgagggtggaggagtcggaggggtggtggccgcgccgccgcgacgtggtggcgtgcgccggcgtctgccggagctggagggggatcgtcagggagatcgtgcgcaccccggaggcgtccgggaacctcaccttcccaatctctctcaagcagcctggcccgagggatgctcctatgaaatgtttcattgtaaggaaccggaccactcagacatattacctgtacattggactgactgatgcattaactgatgatgggaagttcctacttgctgcacgcaaatgtcgtaggaccacatgcactgagtacctgatttcgcttgatatgaacgatatatcaaagaggactgatagttatgttggcaaactaagatctaacttcttgggaaccaaatttactatctatgatgcccatccaccttatgctggagatgtgatttcaaagggtcagtctgcacgtgtgattggttcaaaccatttatcccccaggatacctgctgggaattatccagtctcacatatttcatatgaattgaacgttttgggttctaggggcccgagaaggatgcactgcgctatggattctatccctgtatcagcaattgaacaaggaggaacagctccgacgcagactgaatttcctttgagttaccatgaatctttcacatcaattccctttttcaaatcaaaatcagttcgagcgaataattcaactgcttcattactcactcaaaatggaagcaaactggtgttgaagaacaagtccccgaggtggcacgaacatctgcagtgctggtgccttaacttccatggacgggtaacggttgcatcggtaaagaacttccagctggtggcttcagatgagagtaacccaaccaaccaggaacacgatgatgtgatcctccagtttggtaaagttgggaaggacatgttcaccatggattaccgctatcctatctcggcatttcaggcgtttgcgatatgtctgagcagctttgacaccaaaatagcgtgcgaatgagtgaaggtgtgattctttcttccatgatcgaatgaaccgtttcctgatgacccacattgcaagctggccatgcactctgcttagttgcttccaccttttggaagcatgcagaatagagacataaataaaagttgctttaaatctaacattttagttgggtagggatatgtaacctgcaatttagctttcttgaagtatgttcaacctgcaacatttgagtgacttgtaagtcttgagtttaactacaggtgttggataaccacaattgacagccc

SEQ ID NO: 20856 - DNA, 1829 bp, Oryza sativa
  ref <308>: DATABASE ACCESSION NUMBER: AK071160
  ref <309>: DATABASE ENTRY DATE: 2001-12-06
gggtaattaaaaaaaacaaaataaaaaaaagcccacaaaaaaaaaagaaaaaaaaagagagagagaagagaagaaaaagtcgtataaagccgccgcggcgtcgacgtcgacgccgtcgcctcctcctccccaccaaattcctcctccgattcgatcctctcctctcctccatcgccgccgccgacgcccgccgcccgcctccgaccccctcctgctcggcgtcagcattcttgggcgggtttcggtttcttggggtcgtcgtcgtagcggccaccgagaggggatcaagaagctgaggatcgcggtggggcaacgaggattggaggcgcgtctgccctgatcacggcgcattttatgggtgaagaggctccggagtttcgtgtcgagagcgtcgccttggaatccaaggactgcctgcagaatgccatagatataggcgataagacgtatgttatcagcagatcagatgaccccaagtcatcgattaccatcaaaattttggacaaactaactcagacttgggttgtacctacagtacttggggcacctccaaatccaaccagctcacactcagcggttctcgtaaacaatgagaagatactgattattgagaagggtgttcccttgaatgattctatctggttccttgaggtagacactccttttgttaagcagcagagcaaaattaagggcacagttgttgttgcatggagcaagggagtaattggtgagggccaaaagccaattgtgattagcgggccttctggtgttggtaaagggacattaattgcaaaattaatgaaagaatatccatcaaagtttggattttctgttagccacaccacaagagctccaagggagaaagaaatagatggagttcattaccacttcacagaacgaagcaagattgaggaagagataagtgagggcaaatttattgagtttgctcatgttcatggaaatgtctatggcactagcgttgaagcagttgaatctgttactgatgaggggaagaggtgtattctcgacattgatgtccaaggagctcgttctgtgagggcttcttctcttgaagcaatattcatctttgtatgccctccatcgttcgaggaactagagaagcgccttcgggcacggggaactgaaacagaggagcaaatccagaagcgactgaggaatgctcgtgcagagcttgaccagtccaattcaccaggtcttttcgatcatcttttggtaaatgatgaccttgaagcttgttatgaaaatttgaagaagttgctttctttggatgatgaccacgaagattcaaatgattctttcatcaaggacgggaaagaaactgcatgttactcaatcctgtccaaaacaaactcagaaattttgttgcaatctgagactaacgaagcagagaaaggaaccacaaacttgttatcgctcgacttgtctctctcaggaggtgctcctggacgaacaaggggcctcaagatatccccggttaactagataactcaaaacattgttgctgatggcattgcagaagcactgacgagaaacttttgatcaacctgcttgagataacagattcagaaacaccctaggacaaaggaaataaaaaaaacatggaattcatttccatttgttatttgtttgccggagaggcatcagctactaggttcatcatacctgaactaggtgaaatcatagtgaggaattgtaccgtatcattgaggaattgtttgcttcattgttcttgagaggtttttttgttcgttgaacggagtacaatgagggctcctttatcagtgaagtaaaagaattcatgtagtcct

SEQ ID NO: 20857 - DNA, 1740 bp, Oryza sativa
  ref <308>: DATABASE ACCESSION NUMBER: AK099167
  ref <309>: DATABASE ENTRY DATE: 2002-08-28
gctcctgctctccacccacacagccgcccgccagcatctgcatctgcatctccctctgcgccagcgacggccggcgcgccccatcgccgcctccgccgtcgacttgccccatcaccgccaacgaggcgttctgccgcctggcgccgctcgtcacgtacgaggacatcctccgcatcgccaacggcgacacctcaccatcctatccggcaagcctgtcagcgagttcctcaccagccaatattttctcatggacaaggcgctgaagtgagagacgacagacgaagaggtgaaaaaaatggagtcatgttttgtaacgccccacgaggacacgccagagacgatagaagaagaggtgaaagagatggagtcttgttttgtaacgccccacgaggacacgccaaggcaagggctctggctctctcccctcgacatagtcatggtcagcagaggccatacccctactgtgtacttctaccaacgtgacactgccactgttgctgccgattttttcgaggtaggcaggcttaaggaggctatggcaaaggccctagtggccttctaccccttggcaggccgtctcagtgtagatggtgatggtaggcctgaaattgactgcaatgccgagggtgcgctctttgttgtggctcagtcaaaactcaccgttgatgccttcagcgaccttaagccatcaccagagttgaggaggttgtttgccccccgtattgagccagcatccatcatgcttggagtacaggtgactttcttgagttgtggtggtgtggcattagggacggtgttgcaccatgtcgccatcgatgcccttagcgcgttccatttcttccagacatggtcttctttctgccgagatggtgaagccgccatgttggagctgccctgccatgaacgcaccctcctccgcacacgctccccacctatcgtccacccggatgtgcactcaatgttcagtctaaagctcaacttctgtgagccatcagaccctatatccaccaagatattcgtcatctccaagaaccagctcgatgcccttaaacaaatatgtggtggattgagcacattttgtgccatgagcgcccttgtatggcagtgcatgtgcattgctcggcaactccctctagacgccgagacacgcgtcatcttcccagtcaacattcggcgccgtgtgaagccacctctcccagatcgctacttcggcaatgcacttgtcgacttgaaagtagcctccacagttagggacattgtcttggggacactggatgtaactgctgcccagataaagaacgcattgggacgccttgacgatgagatgctgcagtcggcgatagactacaatgagatggcagggatgcccaacaagcataccaagggaaacctgccagatacagaattacgaatggtctcttggctaggcatgccagtttatgatgcggattttgggtgggggaagccggagatgatgtctcgtgcggagtctgtgcgtggcggatttgtttatatgatggatggcattgacaacgatgggggtggcgtgcgtgtgctcatgtgtatggaggcacgaaagatggaggagttcgagcgactgttttatgccaagtttgcacaatgaagaaactacctagctagaacatgatgcatgttttctgttctattatcaataatggatgtttcatgtaataatataaccgaatacctccatatattttggtggcatggttgtttcag

SEQ ID NO: 20858 - DNA, 1343 bp, Oryza sativa
  ref <308>: DATABASE ACCESSION NUMBER: AK071161
  ref <309>: DATABASE ENTRY DATE: 2001-12-06
gagatcttcctccgcatcgccacgcccgccgacctcgcacgggcctccgccgcctcgtcaccggccgctccttcctccgccgctaccgctccctccacaagccggctcccctcctgggactactcggccacgacggcttccaccccgccgagccgccccacccctccgccgccgccgccgcccgagccctcgctcaggccgccgacttcaccttctcgttcctcccgtccccctgccgctggattcaacaggattgccgggatggccgcgtcctcctcgaacgcagcctatccgacaacgacgacgccggtgaaggggaactcgtcccgttcgacaccaggaacatggcggatctcgccgtctgtgaccccgtatccaggcgttacgtcatcctccccccaatccccgacgacctgatcacctccggtgagcaggagggcctcctcgttttcgagaccttcctcgctcccgccgccaaggaggaggaggagatggtgggcacgacgtcattcagagtggtggcgagggcgaactacgaaagcaaggtggtcatcttcgtcttctcttcactcaccgaggaatggcacagctccagatctgtcagttggtctctcttgaccgccgatccctggttgtcgtcgacagctcaggcgcatctatggtttttcccgcgttactacgcgcacttcgtctactgggtgatgcatctggtggatatgttgctcgtgcttgacacatccaagatggcgttcttcaccatcaacttccagtgggatcgagactttgctattctggagacagaggaagacatgattggagcattctgcctgaagggagacttatccggaagaactcacctctgttatgggactaggcgaatcgatgctgattttgccgatagtccaccgttgaacttagacaagacaatccccttgcccttgcccttggatcattgctatcacattataaatgcaacccaggatacttgctcttgcaagggcggcgactacactcgtccagacgcactacggaggaggatgatacagatatgctatatttcacattggagcccaaaacaatgcttctcgagaaggtttgcggaatgagtagaccaaatgtcactgcaaagatatataccagtttcccaccatccttgtcactgccaagtctgaatactgaatatggtaagctttttattatagcatcagtaacatcttgccaagtctggccttggggatcagctcttgtgatgtggattcaatgttgataaagtgtttaccttcctggttgttcccggattgctggtttttgctgtgccaaaatgacctcatatgtgcttgtgc

SEQ ID NO: 20859 - DNA, 1890 bp, Oryza sativa
  ref <308>: DATABASE ACCESSION NUMBER: AK071162
  ref <309>: DATABASE ENTRY DATE: 2001-12-06
gacaaaacggccaccaccacaccacagagagcccgagagccctactccccttctctcctcttcttcctctcccgcaagcaaagcgcacgccgcctttgccttagatctcctcgactccgccgccgccgccggcgcctccccacggtccctccctcgccatggagggtaacagtaccaacctcgatgcggcgatagagtcgctcctcaacgtggagaagcagatgaggctggccggcgatgtcgccggcacgaggaaggccgccatcgacatcgtcgagctctgctacaaggccggcgcctggaagacgctcaacgatcagatcgtggtcctctccaagaggaggggccagcttaagcaggctatcactgccatggttcagaaagcaatggagtacattgacttaacgccagacatggacacacgtattgagctaatcaagacgttgagcagtgtatctgctggaaaaatatatgtggagatagagagagcaagattgatcaaaagacttgcaaaaatcaaagaggagcagggacagattgatgaggctgctgatttaatgcaagaagttgctgttgaaacatttggctccatggcaaagacagaaaagattgcattcattctagagcaggtccggctgtgcttggatcgtcaagattatgtacgcgcacagattttatccaggaaaatcagtcctagggtatttgatgcagacccgtcaaaggaaaaaaagaaaccgaaagaaggtgataatattgttcaggaagccccagcagagataccttccctcctggaactgaagcgcatctactatgaactgatgattcgctattactcgcacaacaatgattacctggaaatctgccgttgctacaagtcgatttatgaaattccatcaataaaagaggatccatcaaagtggataccggttcttagaaagatctgttggtatttggtgttggcgcctcatgatccgatgcaatcaagccttctcaatgccacactcgaagacaaaaatctctccgagataccaaatttccggttactgctgaagcaacttgtaaccatggaggtgattcagtggacaagcttgtgggaattctttaaagatgaatatgcgaatgagaagaattttctcggaggagctttgggtgacaaagctgcagaggatctgaaattgaggatcattgaacataatatcttggttgtttcgaagtactattcaaggattaccctgaagaggctcgcagatcttctttgcttgagcttgcaggaggcagagaaacacctttcggacatggtaaactcaaagtcgctgattgcgaagattgacaggccaatgggtgttgtatgcttccgcacagcacaagacagtaatggtatactcaattcctgggcggcgaacctcgagaaactcctcgatcttgttgagaagagctgtcaccaaatacacaaggagacgatgatccataaggcggtgttgaaagcttaatctgtaaaccattttgcattggctggcttgcttaggttctctgcctggccttctatggtcaaattttacaatcacaggacgtcaagcttttctcagctcaagcatcacctgtttgctttgggaactcgtgcgtgaatgatcttaaatactgtgaccacagaatgatgacatattatttgttgttggggttcaatcgctgtcctccaatttgcttaacatgtgtatcttcccgaatattatttgaattctagattattcaatcagatgcctggcttgttttaggttctgcagatgcgctggttctcaatatgatctgatctgtaacgcgttcgttgtgattttaagtttctggagatgcatcatatgtggagaagataaaactggagatcttgtcgtttgc

SEQ ID NO: 20860 - DNA, 1238 bp, Oryza sativa
  ref <308>: DATABASE ACCESSION NUMBER: AK071163
  ref <309>: DATABASE ENTRY DATE: 2001-12-06
gatcggcctgattatttttcgtatttttctactccacctttcgtcttcgaagtcctcctccagatcgtgagtgaattggggaaaacaaacctctctccatcaccggccgcagcagccgcctccgcctccgcctccgcccgcaccagatgcgacgctgaccggctcaccggcggaagcgcggcagcggcgcggccttcggttcgagcggtagcatgcagcagatgtctcgaccatcagtgattatcaagctgattctggggttgctttggttcatcgtccacttagcaatcagcctttgcagtttatggtttgatctgatctacagtatagaatgctatctcatttcattcgggctgattccaaagtatcggaaattccaactggataggctcaaacacttggctgttgtggtagatagcagagaagctaaaaatgttgcaaagatcaatcagctcttatgttggctctcaaatgttggtgtgaagtatgtatgtctttatgacattgatggagtgctgaagaaaacatttgcacctgctatgaatggttcaagatatgggaattcaggaaaatatctggatgtgggtgcaaatacaaaagctttgacctgttgtcataaagagatgacaatagagtgtatttctggttctgatggcaaggatgggattgctaaagcagccagcttactttgctcaacttgtgtgaacggcaataggaatacttgtggaaatggtgaaatagtatttacagaagctgacatgtccggtgcattgaaagcaataggttgtggtggaccagaacctgatcttcttcttgtgtatggccctgctagatgccatttaggttttcctgcatggagattgcggtatactgagataatgcatatgggaccactgaattcaatgaaatatggcgccattgtgaaagcattctataaattctcgaagaaataccaaaattttggtaaatgagagctgatactgagatagagaagacaacatgtcatgtgtagaaagccactcctggagctggaagcttaacaatagttttgcctttctttttctttttatcccatgttgctgatcactatactaaacgttacgagcaataattcacagatacaccttgtacttgcttttgcaatattgtaagtgttgctgatagaacatacgggaaattatatcccattgtataacttgctcccattctaatgtgtgatgaggcagttcttgaccacg

SEQ ID NO: 20861 - DNA, 763 bp, Oryza sativa
  ref <308>: DATABASE ACCESSION NUMBER: AK071164
  ref <309>: DATABASE ENTRY DATE: 2001-12-06
ggaaaaaccgaaacgccagttcaactcccagcacggaaaccgcccaccaactttcgccgcatggccgccggtcgccggggcggcgtctgagagggcgcccgcgcggcgcgcggcgcgggtcggaagcggaggagggcgatcgagatgagggagctcgccggcagccccgggacgtggagcggcctctcgctgcgggtggggcagctcgtcttcgccgccgcgtccgtctgcgccacggcctccgccctcggcttcgccgcatacaccgccttctgttacttgattgcatcgatgggactacaggcactctggagcttgggacttgcttgccttgattgctatgccttgaaattcaagaaagatctccacagtgctgttctcctgagcttatttgttgttggcgactgggtaacagcaatcctgtcgttcgcggcatcatgctcagcagcaggtgtagttgttctcttcgatagggacatatacgcttgcaggaatccccaactcccttgtggaagatttgaactagccatagcatgtgcttttctttcttgggcgtttagtgccacatctgctctcgtaatgttttggctcctcgcttcattgtgaataaatttgtacaacctctgtctgtagctcccctctgtttgatcccttctctgtatacgaactaatttttgaagacgacaacacaacagaagttctgaaatgtcatacaagctccatgaactctgtttccgagaaactaattgaatggaacatctgc

SEQ ID NO: 20862 - DNA, 1229 bp, Oryza sativa
  ref <308>: DATABASE ACCESSION NUMBER: AK071165
  ref <309>: DATABASE ENTRY DATE: 2001-12-06
gattgcaaagccaagacgagcagcgagacccaaagctgcacaagcccacgcccacgcctacgcccatggagaccgccctcttctccgccgcctccctcttccgcgacgccgacgacgaccaggatgagatgcaggtggacgccgatgagcaggtgcagtcggtgcagtacgaggaaagagcccacaagttccccggcgtggaactgaaaataagggaattctcaagtcatcagctgaatgctaacatgctatggcctgggacgttcttatttgctgattggctggtaaagaataaatcgattctgcatggacggcggatcctggaattgggaagtgggacgggagctttggccatcttcctgcggaaggcatttcaagtagacatcacaaccactgattacgatgatggggagatccaggagaatatagcttacaactgcaaagctaatgatttgggtgtccttcctcatatccggcatacatggggagatcagtttccagttctcataccagattgggacattgttatcgccagtgacattttattgtatgtcaaacaatatccaaacctaaccagaacattatcctttctcctgaaagaatacaagggctgcagtcagaatgctggttcaagtgccagtacagccatcacgaacaaatcaggaactcaagtgcctgttaagtttcccatttttctgatgagctgccgtagaagaattggcaaggaccagtccctcttcttcgaagaatgcgaaaaggcaggcctggaagtacagcatctgggcgctcttgtgtacctcatctacaccaagcagtagcgaaaatccagtggatcatcattagggttagattgctcaaatggcaacaaaggcataaattcagtcacaagccagtaaaatggaattttctcaaatggcaacagaggaaggcctaaattcagtcacacgccagtaaaatggaaaggaaacatggatttttttggtagagcatgaaactggtatttcgtcttattttccgttgacattagttttgaccgagaatttatcttctatacaccccttgtcgctgatgggtttatactgctttcctgtacacattcttatatgtggagaaatggtgaaacactgaaatgctatacatcgagaattatggatggattagaaaccaggcaaatgcgcttgaccatgtattgatcaattgatgcttttttttttctttttgaacaatgc

SEQ ID NO: 20863 - DNA, 1542 bp, Oryza sativa
  ref <308>: DATABASE ACCESSION NUMBER: AK071166
  ref <309>: DATABASE ENTRY DATE: 2001-12-06
gatcgcccattagaagggcccgccgcccttgccccactggccaccagccacgccgccccgcttgcccgcgcctcccctccaccgtccccgccgcctcgcctaaccctatcgacggatcggtggcgtgatggcgtcgcatctccccgccgccgtgttatcttcccctatccagaatcgagtttttgagcacccaccctgctctgttccccgctggcgactgcgacccccccgcatctcctctcttctcgtcggccctgtccccagatatcgcgggcaatggactaagcacaagtaccaaaacctgtttgacttggtgaagttggacttgcaggtaaaagcttatcaaaattatgatgctggtaatcgtcagatacaacattgtctgggaggatattagtgagaaattgacaacccgaaatcgcaagaattgctgcattaagtgttgatttcagacagaagtgcagtgatcgtatcattatccatgtatttcatcggatttgtccatacaataataatacttacagtgtcctcaaaatgggaaaagtacatgcattttggttattttaggtgataaaagttgataggctcggtctccgtaccatagtaatctatacctatatttaaaaaatatgtaagtattccgtatttcttttttcgccctctttttctttttttccgtcattttttcctcctttttttttgccatccacttttttcttgctgtttcttcgctattcggcgcgccctttttggtcatttttctcttttttttcatccgcttttttgccgatatttttaagttgctgttttttttcacgcgttttttcagtttttttcatccgctattttttgcatggtttttttcgtcctttttttttctttcatccgctttttcgctatttttttacgtcatatttttttggcacgtggtaagaattcagtttttttttatccacttggttttttttcctgtcatcgggatttaatcttcaacagccatccaggccgaatcctagcgtcgctgccacgttaatctgcctccccattcgtttccttcttcaatttatttgcaaaaattgattctgcactacttggtcatcattttctccttcattttctattattatttggttttacttcaccggatttaatctccattttaacaatcgccgtttttgtcccatgttttacggaataaaaccgggaagagaagatcgagtggataaaaaccctcaaccattaattttggtgatgggaggatcgagaaagattcgaccggatttgatgggaggatcagctcctgcatcgtaggcacttcagacggctgttagttgtgcgagctagacctacagctccacttatgggtttagctggcttaaaaggaagaaagtaatgggtttgtagtcgaaaaccatcgaaaaccaaggaagtagtgtaatgcatagcgataaaaacggttttacccgttgcttcgcacgggcattatttctagtatgagaaataaacaactatggttctataatacatgattatatttttcct

SEQ ID NO: 20864 - DNA, 571 bp, Oryza sativa
  ref <308>: DATABASE ACCESSION NUMBER: AK071167
  ref <309>: DATABASE ENTRY DATE: 2001-12-06
ggggggagctcgagcaatccgccgtccgtgtcgtcgtcgtcggcgtcggcgaggtcgtcgtctccggcagggggtgggggagccaggtcgaggcgaggcggggggagcccggaatcaggaagatgactcgcggcaaccagagggaccgcgaccgcgagcgcgcgcaggcgcggaagcccaacgccaagggcccccaggacgggctcaccccggagcagcgccgcgagagggataagaaggcgctggaggagaaggccgcgaagaaggcggcgcaggccgcgggcggcgggacctccacggacaacaagaataaggccggcggcgcaaagaagtaaccggcaccggcgacacgtctgtacgattagtaatgccttataagctttgtacctcatgcatctgcgtatccgtgtgccttaactcttgttactctgtctcgttagatgcggtatttgttgggtcataaatctgtctcattagatgcggtatttgttgggtcataaatctgtcatctgtaagcttcaaatactgaatatgatgataataatatgcgtgttctggtggttttctgggc

SEQ ID NO: 20865 - DNA, 1821 bp, Oryza sativa
  ref <308>: DATABASE ACCESSION NUMBER: AK071168
  ref <309>: DATABASE ENTRY DATE: 2001-12-06
gagccgaatcctgattgccgctgcaacgaccgcgactcgactccgcgaggtgcgacgcgactgcgcgattcccctgagcgacgccgccctcatgccctcattcctcccgcgcgatgcgagcggctgctcgatggagataggcacctcgccaagctgatcgacgccgccgccgcctccgtgccgaccccgtacgtgagagctccaggcgctgttctccccgaggcgagagtagcccctggcgccacaacactgtccggcggccatggacgccgcgacaggaaccccggctgatcagagcccgaacgcgcccctgcctgtccgcgtcagtgaggatggcgtcgaggtgtcgcggccgctgacagcggtggcgtaggcaaggtgttcgacggaatgcgtcctggcttctgaggcgccatggctcgacgacgcgcgaggccggccgtgggcggacctcccggcggacatcctcggcctcgttgtcggctgcctccccctcgtcgaggacagggccaggctgcgctccgtctgccgcgcgtggcgcgtcctccaccagcggtcgccgccgccgctgcccctgctcgtgatggccgacttctccttctccagcttctgcgcaggagagaccatcatgggagtgcgtggccgtgtcccgctgccggagagggagagggagatggcggctggtggcagcgtctgctgcgtgggctcgttcgagggatggctcgttggcgtcaaggccaacaaaggtcgctacttcggtgaccgccggcgtttcttgatgaacagtttctcccgggatgttatccgactcccgctaccttcgggagcctcccgctccgctgatgcctacactaggtctctccccatcatcaatggctctggtgtcttgcattgcacgatcaacgcagcgaagtgcgtgatgttgttctggaaggtcgtcttgtcctcgtcgcctgactctggctccaagtgtgttgtggccgccacctccatggtcaaggatgcagttaagcttgctctctggcggcctgggatgaagtcgtggagcgtgtgtgatggtgatactatcattaggtccattgatattgtcttctgccatgccaagggaacctccacatgctcagtttcggcaaattcaccactaacctcttagtctttgagatctgtgaagatgacaatggcttgatggtttctcgtgttgagtcttgtgtgatcaaactgcctggggtcatgggtaccgctaatgagacttggagcatagtagagtggcgcgggaaactactgatagttgtgacatactttggtgaatttgggcacaacattattgagattagagtatatgaggtggactgcagcacaaaccctgccacattcactgagatcaagagcttggatggcgactgcaactttatcagccaactcagcagcaagtcttttcgtttatctcattatgatgtagtcaaagattatcttatctattttatgcatgaccgctcttttgataaatctgtgtacaacatgaaagatggtacaatgacaccaattactgcagacatgtcagaggacaaaatttagacaccagatggaagactgatgaattcgacatggttatttcctcctgaatgaactgctgcatatcaaccccgatcctactgagtcttaatgtatgaagcactgatttttatagtagaaaaacttatgcatacttaatttgttttcatgtacctatgtgaacaagtggatttttagttgctttcgcactcttggttgtgggggtgttttaagttcctgtctatatgaaattatgaacaatgtttctcc

SEQ ID NO: 20866 - DNA, 2055 bp, Oryza sativa
  ref <308>: DATABASE ACCESSION NUMBER: AK071169
  ref <309>: DATABASE ENTRY DATE: 2001-12-06
gactttttcggtcctagcaaccggcagtagtaccaatgatgcacctttgcaccagtttacaacaataatggacgtcaattctactgaaccgccctggtgccagcatttaattcgtatcatgcattcatgcgtagcgtaggccataggctcaagcgcacgtcagttgccataaattggcctcgccggcccgaggctttcttcaactttctgcttgcaaagtttcaatacactggagtgagtcagtgaggttggtgaagcagagtgaggaaaggaggatgggaagggtggcgcctagcgtcgaggaggtcgggggcgagcagccgccgcccgcgcttgggcccggcgagaccgtgagcgggacggtggccgagctgagggcggcgtacgagagcggcaggacgcggagcctggagtggaggcagtcgcagctccgggggctcctccggctcttggcggaggaggaggccgccgcgttccgggcgctccgcgaggacctcggcaagcaccaagccgaggcctacagagacgagatcggcgtgcttgtcaagtcggcgaacgccgcgctgcgtgaggtcgggaaatggatggcgccggagaaggtctgggtgccgctaatcgcgttcccggcaagggcgcagctggagccgcagccgctcggggtcatcctcgtcttctcttgctggaatgtcccgttgggcctctctctggagcctctcgttggagcattggcggccggcaatgcggtcgcgctgaagccatcggagctggcgccggccaccgctaagttcctcggcgacaacgtcggcaaatacatggacgccacggccgtgaaggtcatccagggcgggccggaggttggcgagcagctcatggaacacagatgggacaaggtccttttcaccgggagcccgcgcatcgcgcgcgtcgtgatggccgcggccgcgaagcacctgacgcccgtggcgcttgagctcggcgggaagtgcccctgcatcttcgacacgatcggcggcagcgcgcgggacctgcagaccgcggtgaaccgcgtcgtcgggggcaagtggtcgtcctgcgccggccaggcctgcctggccatcgactacgtcctcgtcgaggagcgcttcgtgcccgtcctgatcaaggcgctcaagtcgacgctgaagaagttcttcgccgactcggaccacatggcgcggatcgtcaacgcgaggcacttccagcggctgagtgaccttctcaaggacaaatcggtcgcggcgtccgtcctccacgggggcacattggacgccaagaacctgtgcatcgagcccacgattctgctgaatcccccactcgactccgcgatcatgacagaggagattttcggccctctcctgcccatcatcacggtgaagaagatagaggacagcatcgccttcgtgagagcgcggccgaggccgctcgccgtctacgcgttcaccaaaaacgccgcactgaggcgccgaatcgtcgaggagacgtcgtcggggagcgttacgttcaacgacgcagttgtacaatacgggatcgattcgctgccgttcggcggcgtcggcgagagcggattcgggcagtaccacggcaagtactccttcgagatgttcagccacaagaaggcggttctgacgagaggataccttatcgagctgacggccaggtacccgccgtgggatgacagcaagatctccatgatgcgacagctctaccgttacaattacgtcggattcgtcttaaccttcctcggtctaaagaagtgaaaatttggtgggaaggaattggtgatcgcttttgtggagttcaaagtgagtgcatttagcccaagagactactgatgagaataaatatagacttatatcgcttagtgaataagaacaagatttgcagttgctagtataaagcagcaaaaatgtactgcctgcattatataagaaaaatgcgctacctgtaatttacgtttcgtcaagaaaccaccttttaagtaaggtaaatgtaaggtactaaggtgcaatttcagtagttttgggttgaatttcagcc

SEQ ID NO: 20867 - DNA, 1468 bp, Oryza sativa
  ref <308>: DATABASE ACCESSION NUMBER: AK071170
  ref <309>: DATABASE ENTRY DATE: 2001-12-06
gaatgggggagtcaggggaaaaccctactccgtctcgccaccccacacccaaggccggcgactccttcggctccatagcgggtaagaaagggtgcaccaagatcgccggcggagatcgtcgccttggtcttgacgaggctgccgtgaccccaggcgaccggaacgtgaggagccggaccagggacaccgagagagaagcccgccgtggagacgactgccaagttcttcgcctgctccatatgtcgacatcccctccctcggacatgtcggagatggtcactgtgcaatttctggatctgagaattcatcgcatgcccgccaacgacgtcctacaacttcgtcgccgtcttcctcctctggagttgaactgcgtccaatccgtggaccaattcaaaagattccaggcgtttgtaagaaaaaatgaggagaaggagaaaagggatgaagaagaggccgagctcaacacttccctaccgatctttcttctaccgttgattcttgctaactgattaactttgctatgtgcgtgtgtttataatgtgacgaattgacactgttcttgtatccagttggcaattgtcacgagtcaaacagatctagcgcgcatatgcgctacaagaagtgaagaactggatgagcttggtatagtggaggagtacgacgacgacgacgacgacgacgacgacgacgacggcgacgagcactatgtgtatggaggcttggatatgttcgagccagccaccaccgatgaagaggacgccaacgcgcaggtggatgctggtgatctttactacctgggggtcagtgacgacgagaatgaggaagtgggaagcgacggcgggactgatgacgacggcggtgatgatgctggaggcgacggcggacgggctggacccctcaggtgggacaacctatgggacgacgacccaccacagtgagtcagtgacggcgtgatgccctgatacaccgatcgaaatcctatcttatttattgcggagtagcagaattgacgaacaaacctagagcttatttatttccttacgactgacttgtgcaaacattcagcatgtcttgtgcaagtcatgttttaaattgcatctggatgacaatgagctatggttaatgcagctataatttcctccaactgtcactgctctttgcctgatgattttctagagacaagaggcagaagatctcgcaaattctgatagtgcataattaattgtttctagatatgatctgtatatataagtgcacttacagtatgtgagactgattgggtactctagaccatttttactggaatcacaagctcatgcatgcattcagcgcatcgaagcccatagcattctacatctacagcagtaaaagggactttatttttgtccctgactactgatgaacagatggttctacacttctactaagtttcatactctccgaaacaatggtattatacatgtattgc

SEQ ID NO: 20868 - DNA, 1199 bp, Oryza sativa
  ref <308>: DATABASE ACCESSION NUMBER: AK071171
  ref <309>: DATABASE ENTRY DATE: 2001-12-06
ggtggtgagcagagcacagcacgggttgtccccggtttaccacaatcctttcgtgctccgctcaggttgcgtgtttggccctagggtttacttcgccgtcctcctctcgtccctctcctcccgcggtcccgtcgtcggcgaggccaggggatcgagcggccggcggccgatcgaggcggcggcggcgatggcgcacaagatccccctggaggtggcgcacacgctcgtggagatcgcggaggtggctcgctacgccatcgagcaccgccgcggccacggcccggcccacgacggcgtctcccccccggcggtggacggggaggaggccgagcggctgcgggcggagaacgttatcctccgcgctcgcctcgccgacgacctctccatcctccgcgagctccaaggcgagccctgtgtttcccaggagtgccctgccgatctgcataatcgtcttgtagcagcagttaacaatgctagcttcttggctcagcttgagaaaattcgagatgagtcaaggcatcaacaaacagagctatctcctgataacatgacagatattccatacactgaaggtggcgggaagaatggatcttgggtcttggttgcctgtgataaacccggggcaaatatggaggaaatcagtggaattgataatgaaaattatgtacttgttaatgatgatgacattattgatggtatgacctcctttattgctaggtgcattcttgaagatccaaagtccaagtcaatatcaccagtggagctgcaaaaggctgttgcaatggcattgagcacccttaatgataagtggaaatggatgagtatttgggaggctggaaaagtgctttacatattggcaacatggggaatcacaatagtggggttgtataggagtcgccacgtgctgaaaattgcagccaagggagctgtcgtgtctgccaaattcgtcatgaaggcactgtgaagtgtgaaagcagtgaaattatgcatgcgcgatgatcagcaatttgtacatacaaaaactatccttgtcaattgtacatatgtgaaattgtgaattatggtttgttctgaactgtttgttcagaagcgtcataactcataaattatgaaatgtgaaatggtggaagaattcgtttattgagtctgtataatgatacatctgcttgacaagttgacatattctctctttccatccc

SEQ ID NO: 20869 - DNA, 1508 bp, Oryza sativa
  ref <308>: DATABASE ACCESSION NUMBER: AK071172
  ref <309>: DATABASE ENTRY DATE: 2001-12-06
gtcaattcactcgcctcctcctaccgcacctacctccctccctcctcctcttcgatctcacaatctccttgttcgcggaaccgaaaatgcagtcgaggcacagggtgttcgcggaggacctgctcctgccgcgggaggcggaaggggaggaccacttcgaccgcgtcccggactcgctcgtgctcctcatcttcaaccgcctcgccgacgcgcgctcgctggggcggtgctcggccgtgtccaagcggttcaactcgctcgtgccgctcgtggacgacgcctgcctccgcatcgaccgcgtcatcaccgacgcggccgacgccgacgacgcgctcggcctcgccggcccgcgccccgccggccgcggggtgctgtcgcacctcctcaaggcgatgctgctcgccgtgctcaagccgttcgggcactgcgacgccggggtcaggggtggcggtggtggggagcgcgcggggaagcacggcggcggcggcggcggctgcggcgcgcagcagcaccactcgccggcgcaggtgctgaagaacttcagcagcatccggaacctccggatggagctccccgtctccgacgtcggcaccgacgacggggtgctgctcaggtggaaggccgtgttcgggagcaccctccagagctgcgtcatcctcggcggcaccagggtggaccgggccgccgcccccgccgcggcggcggcgaccgccaccgccgccggggacagcgaggcctcgcagggtgacgacaccgggagcatcccggagtcgttctacaccaacggcgggctcaagctgcgcgtggtgtggaccatcagctccctcatcgccgcggccacaaggcactacctcctccgcgagatcgtcaaggagcaccccacgctggagcgggtggcgctcacggacgcgcacggccagggcacgctcagcatggggcgcgaccagatcagggagttccgcgacaagccgctcgccgccgccgccgcggccaaccgcacccaggtccccgcctgcaacatgaagctccggtacgcgccgatgctcgagctctccgacggcacgcggatccagggcgccacgctcgtcgtcatcaagcccgtcggcgaggccggcggaatcggcggcggcaggaaggagctcgacgagttcgtcgccgacgcattcgacggcccgtacagggaggccgtcagcgcgctcagcaagcgccgcacctacctgctagagatgaacggcttctgagagcgtagagttgagaacttgagatcgccacccaccaccatggcccgtgcagagatcgctctgctctcttcgcttcagctgatcagctattcagctcagctcgattcagtggcacaccgaggtgttcgtccatgttgtaacagcgatcgtgtgtctcctcgacttttcgatactgccttagcatcatcctcgcaacaaataatggaattagaaatttggaatgcttcacttggttctgtccatttcatgaatcgacaaaatggaatt

SEQ ID NO: 20870 - DNA, 828 bp, Oryza sativa
  ref <308>: DATABASE ACCESSION NUMBER: AK071173
  ref <309>: DATABASE ENTRY DATE: 2001-12-06
gattcccaccacaagctaattaaggtaccagcaactccatcacatccttaatttgcagcagcaggtaattgtacaccggcgaaggaaattaaaggaaagtaggagatcgatggccaagccaagcgccgccgcctggtccaccggcctcttggactgcttcgacgactgcggcctatgctgcatgacgtgctggtgcccgtgcatcacgttcgggcgggtggcggagatggtggacagggggtcgacgtcgtgcggcaccagcggcgcgctgtacgcgctgctggcgacggtcaccggctgccagttcgtctactcctgcgtctaccggggcaagatgcgcgcccagtacggcctcggcgacgacgccgcctgcgccgactgctgcgtccacttctggtgcaacaagtgcgcgctgtgccaggagtaccgcgagctcgtcgcccgcggctacgaccccaagctcggatgggacctcaacgtccagcgcggcgccgccgccgccgcagcgcccgccgtgcagcacatgggccgttaaatggattagctagctatagcgtcacctcgtatctatcatatcatcgatcgatcgtactttgggcgtgtgaagtggtgtccagttaaaaaaaagttttttttttgggagctagttatagtatccagttttttaaaagaaatttataagtggtatattaattatatgcgtttttttacttgatactatctactatgcctctatatactcctgtaattaagtttgtgtaagtatggtgacgcatggtcaggttttgtttgtaattctctgcacttaatcaattgtttgttgtatct

SEQ ID NO: 20871 - DNA, 1722 bp, Oryza sativa
  ref <308>: DATABASE ACCESSION NUMBER: AK071174
  ref <309>: DATABASE ENTRY DATE: 2001-12-06
gacttctttttcgtatcttttctccctttcgtcgtcgtcgccgtccagttcgtcatcctccctcgatctcctttccacgagaccaaacgaactgaaaattttcgttactacgaccttgctcgattccgacaacccccgttcaacgatgatttcgtcgattctttgatgccacctccggcggccgatatggagaacggcgccgtcgggtcgccggcggcggaggtggaggccggtgcatctccggggagctctcccgtgataaagaccaaaggccgtgggctccgtcgatggcgccgtatcccgcgggagcagcgcaaggaaggatcagccgcctccgccgccgccggcagcggctcggcgcagctgcacaagcggcggatacccctgcccggcggcgcgccgagggggaagctgcacgaggtggtcttggaggaggaggaggaggagagctccaccgcctccgtcgagtcccgcttcgtcccgccggcgaagctggatccgagcctcggcgtgctgctcgtcgcctcctcgggattctccgtcggcgcgggcggcgccgactccgaccacagcgaggaccggagcagcggcagcaggtcctccaccgcagcgagcgccccgcgccgccacaacgacctctcgcccttcgccgccgacagggcagggcgctcctcccgcgccgcgcgcgcgcgtgccgccgaggcgcagtactcgctgcgctgctctaatgccgtgaactcccggcggcaatcgattgccggcaatggaatccacaaggttcttgccgatcactgtgatcacggcgaggagacgctattgatggccagagattactgcaatgtggagaatgggagcgtggtggtgaggagattggcacaggggagtgttgattcggatgctgatgctgctcagaggagtgtggggaacaatggtgaccttggatcagggatgaagtcgagtgctgatccgtatgcggaatcgatttcattgcttcagagaacgcaagaagcgcttgagaatgagattaaaatgtttgcagtgatcagtaaagagtcaaatgataattttgatggaaacgacgatgattggagtggtttagtcgatctcgcggaacctcttgaaggaacaagtcaaaatgtaaaggatcctgagtccagaccagaagaagcatcttaccttggtcggctcttcctggagaagacagaagccgagattaagagcatcatcctgacaagagctgctcaaacctgggcacctctagttgacgatcaaatagctctctataacgcgcagaaatctctgtcgggggattacaagcagcttgaacttaaactacagcataccaagaaccgagcggcgatgttagaagagatggcggagaagctaagagctgaatgcagagttctgtctgggagttcagaagtcctgcggttgcagtctagagcaagcagagtttcactcttttgtttcatccagtttgttctgctgtttactgctgtaggaacctttcttgcacggctcttgccctctcctactgagtatgtacctacttgagcttagagccatggaatcaccgatacacgatacatatgcatcaggaaatagaacttgctttcataaattttcccttgtacggagtagtattttaggacatgaagcttgtaaattttctttgtaactatgttttcggaaaagaaatctctggctcagcagtcctgggtt

SEQ ID NO: 20872 - DNA, 1427 bp, Oryza sativa
  ref <308>: DATABASE ACCESSION NUMBER: AK071175
  ref <309>: DATABASE ENTRY DATE: 2001-12-06
gaccgatctccctcccccctcgccggcggcgcaccgaccgaaccgaaccgcgccatggtcaccgcgcgcaagggccgcggaggcagaggccctccccgcccccgcgtcgtcgacggcggcggagggagcatggtgtcgcgcgtggccgtgctcgcattctgcgtcgccgggatctggtcggcgtacatcacccagggcgtcctccaggaaaccctgtcgacgaagcggttcgggccggaggcgcggcggttcgaccacctcgcgttcatcaacttcgcgcagaacgtcgtctgcttcgtctggtccttcataatgatcaagctgtggtcgagtggtgggagctcctccgctggccgcgcgccgctgcggaagtactggggcgtcagcatcaccaacactgtcggcccggccatggggatcgaggcgctcaagttcatcagctacccagctcaggtcctggcaaaatcttctaagatgattccagtaatgctgatgggaactatactgtatggtgtcaagtacacatttccggagtacatttgcaccttccttgttgctgggggtgtatcatcctttgcgttgttgaagacaagctccaagactatcaagaagcttgctaaccctaatgcgcctctgggctacacattgtgcttcctcaacttagcttttgatggttacaccaattcgacccaagatttgataaagtctaggtatccaaagactaatccatgggatataatgcttggcatgaatctctgggggaccacatacaatgctgtgattatgtttgttgctccattactattcagtaattggccttacgccaacggttttgaggcagtgagattttgccaggagaacccagaggtggcatgggacattctcctgttctgcctgtgtggtgccgtgggtcagaatttcatcttcctaaccatcagccgatttggctctcttactaacactaccatcaccaccacccgcaagttcatgagcattgtcatctcctccgtcatcagtggtaacccactctccttgaagcaatggggaagtgttgtgatggtcttttctggtctctctttacaaatctttctcaaatggaagagaaagaaggtcagagaccacaaggaatgagtttaatattttagctcattccaatttgtagcttcgattggacatgtttgttgttgggttatatgggagataattattgcagcccattactgattcaggagaagttttacatcgataaaaaactgagatgtatggtaatagctaaaaaaatgctggtagtttctgttctacaggaagtcaggaagaagatgcaatgaattgtattgcactgagtagtagaattgtatggcgccctgtatttttgttctctccctaaaggaatcgctaattatcaaaacgataattatgtttctgcc

SEQ ID NO: 20873 - DNA, 1848 bp, Oryza sativa
  ref <308>: DATABASE ACCESSION NUMBER: AK071176
  ref <309>: DATABASE ENTRY DATE: 2001-12-06
ggtaggcgccacgtcagccaaaaccgctcttaaaaccaccgagggatctcatctgcaccggttttgatagttgagggacccgttgtgtctggtttttcggttgagggacctcaaatgaacttattccttttttttttttcgaaccttctcgagaggagaggcgtcggggcggggggaatggcgtcgtgggaggagcagctgcgggacgagctcgccggccgagacctcgccgtcgcctccgtccccgggaagggccgcggcctcttcgccgcacgcagcttcttcccaggagaagtcgttatttcgcaagagccttacgcttctacaccaaacaagatttctgtgggctccaactgcgacaattgtttcgcctccagaaacctgaggaagtgctccgtttgtcgagttgcttggtactgtgggagtgcgtgtcagagagaagaatggaagcttcatcaacttgaatgtcgagcaatcgccgcgcttacagaggatagaaagaagatgcttactcccacaattcgtttgatggtgcggcttgtacttagaagaaaactgcaggatgacaaggctattccatcttcaggaacagataactacaatctagtggatgcattagaatcccaccgcataatatagacatctccgaggttgataaaaatcaactggttttatatgctcagatggccaatcttgtccaactgattcttccttcattcgagcttgatcttaaggaaattacacataccttttccaagtttgcctgcaacgctcataccatatgtgatcctgaactgaggccccttgggactggactataccctgttttatctattattaaccacagttgtgtaccaaatgcagttttgatatttgaaggtcggacagcatatgttcgtgcattgcaacctataagtaaaaatgaggaggtatcaataagttacattgaaactgcggcaaccactatgaagagacaggacgatctcaagcactactacttcacttgcacatgtccccgttgtgttaaggattctgaggaagatgcgctccttgagggatacagatgcaatgaccaaaagtgtgatggatttcttctgcctaatgcaggaaacaaaggttatacatgccagaaatgtagcacttctagagatggggaagagttacaaaagatggctagcgatgtactactattatctgacaaagtctcttccttagtttcatctggaatagataacagtgaggtaggttctatgtacaagaccattgaagagctagagcggaagctttaccatcctttgtcaatcactttgcttcacacacgggaaacactcttgaagatatatatggagttacaagattggcagactgcattgatgtattgcagattgacaattccagtttatgaaagaatttacccaccttttcacccaatgattggattacagttctatacttgcggaaagcttgaatggttgcttgagtacacagaggatgctctgatgtctttaaccagggcagcagatatacttcgcataacgcatgggactaaatccgagttcatgaaggaacttttgggcaagctagaagaagtaagggctgaagcttcttttaggctctcggctggagatgaacaataattgagtaaccattttattgtgaagctccaggtcatcgtgatggcaaatagaatgtaacaatgttgcaacaatgttcaaataggatagtactaagtagacaatctctaaatttagaatagctttgttaattcaacattgggatataagctgccctgaagggctcgcatcgggacaagaactgtgaactggtgatatggaaaattcattgttc

SEQ ID NO: 20874 - DNA, 1565 bp, Oryza sativa
  ref <308>: DATABASE ACCESSION NUMBER: AK071177
  ref <309>: DATABASE ENTRY DATE: 2001-12-06
atcgtggcttcccctttctctctctctctctctctctctcccttcgctttctctcttccttcctagggcttcccctcctcggcggcgcatcgcataggcggcggacgaagagctcccggcgatgggcggcgacaaggagaacctcgacctctccgacctcaacgcctcgctgcccgccgccgccgccgctctcagcgccgaggaccgcgccggcctcgtcaatgccctgaaggataagctgcagagcttggcgggtcagcacacggacgtgcttgaggcgctctcccccaatgtcaggaagcgtgtcgaatatttgagggagatccagggccagcatgatgaaatcgagttaaaattctttgaagagagagctgcgcttgaagcgaagtaccagaagctttatgaacccttgtacacaaagaggtataacatagtaaatggagttgttgaggttgatggtggaaatgacgaaccagccagtgaaaatgctgctgagggtaaagatgcagatgctaaaggagtcccagatttttggcttactgctatgaaaacaaatgaagtgctttctgaggagatccaagagcgtgacgagcctgctttgaaatatctgaaagatatcaagtgggctagaattgacgatcctaagggtttcaagctggattttttctttgatacgaaccctttcttcaagaactctgtcctaacaaaaacgtaccacatggttgatgaagatgaaccaattttggagaaagcaattgggactgaaattgagtggtatcctggtaaaaacctgacacagaagattctaaaaaagaaacccaagaaaggttcaaagaatgcaaagcctattaccaaaactgaagtctgtgagagcttcttcaactttttcagtcccccgcaagtacccgatgatgatgaggacattgatgaagacactgctgatgagcttcagggtcaaatggaacatgattatgacattgggaccaccataagggataagatcatcccacatgctgtttcctggtttactggtgaggctgtgcaagccgaggattttgacgatatggaggatgatgaagaagatgatgaagacgatgatgaagatgaggaggaggaagaagaggatgaggatgaagacgaagacgatgaggaagaaaaaagcaagccaaagaagaagtcggcaggcaaaccgaagctaccatcgaagggcggggcacaaggaggtgctgatcaaccagcagattgcaagcagcagtagaactgttgtggttcacagcgccacgtgagctgtttgttattttgttgatgcagtattttgcgttgaactgcccaggaaattattggttggttgtgcacgggtgaggtttcgttgctggtatatgttacccgtggttttattggcgaagttgtgaggcctgtctggaacatctatattagagtattattatgttttagttatatgtaatcggtttattaagtttgtgtaattatctggaatctgccggtggaacttttactagtattcatttgagccttatggaaaaaaaatgaaatatgtcttatgg

SEQ ID NO: 20875 - DNA, 1142 bp, Oryza sativa
  ref <308>: DATABASE ACCESSION NUMBER: AK071178
  ref <309>: DATABASE ENTRY DATE: 2001-12-06
ggccgctgctgctgctgctgttctcccctcccggattgaactgttggcaagttctgaaggactctccagttattggagaaatgtgtggacggcttgcaggctgatgagcatccagacatgctgacgctacatggaaccgctctgttcattaggccgagtgcttaccaagaggtcaagtcatcaccaaagcatgccatagttcctcataacaacctattaggttgcagtgcgttttataatccagtggaagggcatcatgtgcagaagccgcacatcgttcctagctgcaaagttaactttaccagggcgagccattatctctatagaagtttaagtgaaagaactacaaggcattggctgcatcggtttcatgttaacgcttcgtcggatgaggacttccgctcatcacgcaatatagcaatcagcctattcaagcgatataaaaatgtcattgaccgaggaggtggagataacctgaaggagtttgttagtgctggggtgaatgcatatgctctaggctgtactgaagaggggctcaggaaggaacttatggatattgaagattctggccttgagattgaagctctgcggtccaatggaggaggaaccagcttgaccttcaaagttcactcctttgaggtccgtgaatgcatcctgtggctcagtatagtattcattacaatcctgtgcacaccacaaccaacgatcatcagatggtctactaccccaccagtgtcagctgacgttttgcatcagtggaaaggattttgtgccttaatagcgaacgcttactataccaaaggaatggcatggttaccagtgaaaactttgcagctggaacaaatggctgtcacgggcagttcagaggagccatcagtagtagctagtcgcatgcaattagttttcagtacattagaggtagttagtcctcaatggccaagagtgtgatgaactgaaactgaaagcacgtgtgcagttttactacatgctcatgtctggcaaagaggaaaaaatggcatcaggaacgaatcattttttttccttccaatttgaagtaaaatgtccagatgtgcaaatgtatactacaaacagatctccttatatactgagatattgatcaatacatgtacaatttacttttt

SEQ ID NO: 20876 - DNA, 833 bp, Oryza sativa
  ref <308>: DATABASE ACCESSION NUMBER: AK071179
  ref <309>: DATABASE ENTRY DATE: 2001-12-06
gggcgtaaaagaaaatctgtctcgtctcctccgctccttgcgccatctcgcggctgaacaggggaggggcgccgatttctccatctggcgagcagagcagggggaggggaggggatcctgcagagatggcgagcacagcatgctttgtgattgtgagtaaaaatgatattccaatctacgaggctgaagttgggtctgctcccaagagagaagatcaagcttatcagcaccagttcatattgcacgctgcattagatgttgttcaggaccttgcatgggctacaaacacaatgtttctgaagtcagtagacagatttgatgatcttgtggtgtctgtttatgtaactgctggtcatactagatttatgttacttcatgactcaaggagcgaggatggaataaaaagtttcttccaggaggttcacgaactctacatcaagatcttcctcaatccactctacctacctggttctcgcatcacatcctctcattttgatactaaggtcagggctcttgcaaggaaatacctgtagcatataaccaggtgaagactctgtaagctccacaccgccctgtattctagtgagtagcacttgccttgtactagttcttctacaattgaatgaacgtagatcctgagactagcctagcagtaccatttactattgaatgaacatagatcctctaatgatcttgtactagaaaagtgctctgtttgtcttttccggagttagtagacgcccattccttgcctgtactgtacttctacccagagattatatgtactagtagtataaaatatctctcacccatcgaagtttagtgggaaattt

SEQ ID NO: 20877 - DNA, 1827 bp, Oryza sativa
  ref <308>: DATABASE ACCESSION NUMBER: AK071180
  ref <309>: DATABASE ENTRY DATE: 2001-12-06
gagcttagctaactcaatgattaaaatctcgccagatccctcctgcgttatcaatccactgagaagtaagcgaacgagatcgcctgggccggctcgtcggagaaggctcacacgcgacgcgcgccatggcagctgcaaccgcagctgatgttgccgaggatacggccagtgtgtactccggcaagcttaccctctacgtcttcctcacctgcggcgtcgcggcgaccggcggcctcatcatcggctatgacatcggcatctctggtggtgtgacatcgatggacacgttcctggggaagttcttcccgtcggttctccaccaagaacagacggcgcagggcacaagccagtactgcaagttcaacagccagccgctgaccgcgttcacctcgtcgctgtacctcgcggcgctcgtggcctccttcttcgtcgcgtccttcacgcgcgcgctgggcaggaagtggtccatgttcggcggcggcgtctccttcctcgccggtgccaccctcaacggcgccgcgcggaacgtcgccatgctcatcgtcggccgcatcctcctcggcatcggcgtcgccttctgtggtctgtccactccgatatacttgtctgagatggcgccaccgcggctgcgtggcatgctcaacatcggcctccagctgatgatcaccgtgggcatcttctccgccaatctcgtcaactacggtgcggccaagatcaggggtggctgggggtggcgtgtcagcctcggcctcgctgccgccccggcatgcgtcatcgccgtgggctcgctcttcctcccggactcaccgagctccctcatcaaccgtggccgccacgagcaggcgcggcgggtgctgcggcgcatccgtggcaccgacgaggtggacgacgagtacggcgacctcgtcgcagcagccagcgagatcgaggtgtattccggctgctccgcgagacgacggccgtggcgcgacgtcctgcagcgcaggtaccggccgcagctcgccatggccgtcctcatccccttcttccagcagctcaccggcatcaacgtcatcatgttctacgcgcccgtgctgttcaagaccatcggcctcggaggagacgcgtcgctcatgtcggcggtcatcaccgggctggtcaatatcgttgccacgttcgtgtccatcgccaccgtcgacagccttggccgacgcaagctcttgttccagggaggctgccagatgcttgtgagccaggttatcattggaacgctgatcggtgtggtgtttggtacgagtggcgatggcaacatctcgagggcgttggcggtctgcatcgtggtgttcatctgcgtctacgtcgccggcttcgcttggtcgtggggcccgcttggcgtcctcctgccgagcgagatcttcccgctggaggtccggccggcggggcagagcatcagcgtggccgtgaacatgctctgcacgttcgccgtcgcggaggccttcctcccgatgctctgccacatgaggttcggcctcttctacttctttagcggatgggtgctcgtgatgacgctcttcgtctcggccttcctgcctgagaccaagggcgtgccgatcgagaagatgaccgtcgtgtggagaacgcactggttttggggtagattttactgtaaccaggatgcagatgcacacgttcaagtggcaaacagcaaagtttgaaatgcacaatgccactgctgtctgattttatacagatgtagcaaatgtgagatgcgtattttgggactggttaatttgctgctgatatccagcatgcgcatctcgaagtagcgcggagcaaagttcaaatatc

SEQ ID NO: 20878 - DNA, 1366 bp, Oryza sativa
  ref <308>: DATABASE ACCESSION NUMBER: AK071181
  ref <309>: DATABASE ENTRY DATE: 2001-12-06
gtgtgcgcacgcacgactcgcacacgctcctcgtcccttcttctaccgcggccgcgcgctgtgtcagtagtgcgtgttggtttgggagagctagcgcggccggcacagcatgggagctgggattcggattctggtggtgatgttggcggtcgccgccgccgggagcggcgtcgtggcgcagctcaggcgggactactacgccagcgtgtgccccgacgtcgagaccatcgtgcgcgacgcggtgaccaagaaagtgcaggagacgtccgtcgccgtcggcgccaccgtccgcctcttcttccacgactgcttcgtcgagggatgcgacgcgtcggtgatcgtggtgtcgtcggggaacaacacggcggagaaggaccacccgaacaacctctccctcgccggcgacggcttcgacacggtcatcaaggccagggcggccgtcgacgccgtgccgcagtgcaccaaccaggtctcctgcgcggacatcctggtcatggccacccgagacgtcattgcgctggccggcgggccgtcgtacgccgtggagctcgggaggctggacgggctgagctcgacggcgagcagcgtcgacgggaagctgccgccgccgtcgttcaacctggaccagctgacatcgctgttcgccgcgaacaacctgtcccagaccgacatgatcgctttatctgcggcgcacacggtggggttcgcgcactgcggcacgttcgcgagccggatccagccgtcggcggtggacccgacgatggacgccgggtacgcgtcgcagctgcaggcggcgtgcccggccggcgtggacccgaacatcgcgctggagctggacccggtgacgccgcgcgccttcgacaaccagtacttcgtcaacctccagaaggggatgggcctcttcacctccgaccaggtgctctactccgacgaccgctcgcgccccaccgtcgacgcctgggcggccaacagctccgacttcgagctcgccttcgtcgccgccatgaccaacctcggccgcgtcggcgtcaagaccgacccgtcgcagggcaacatccgccgcgactgcgcgatgctcatctgacgccgccgcgggcggcatggtcgtcggcacgacgacggcggtcagcggcggccactgcggttctctcaattgttcataaatagttttagctgcagcctgcagcgctgaagttctgaaaaatatacaactagctttttagagcaaaagttttaatcagttaattatattggaaaccaggaattaagattattttgtgcatctgatagtggtgaatcaattaaattacctagctaggccaaatgtattgtgttttttaactatgggagcaagataaattatctg

SEQ ID NO: 20879 - DNA, 784 bp, Oryza sativa
  ref <308>: DATABASE ACCESSION NUMBER: AK071182
  ref <309>: DATABASE ENTRY DATE: 2001-12-06
gtggacgacgagatcgatcgagcaacgaacagcatatggctcacagcggcttctccggcagcctgacgtcgccgaggttcgacctcgccgtcgacatgggccatcccttcctcaaccgcaccgtcgacggcttcctcaagattggcgctgttggggcttgcaaggtcgctgccgaagagaccttcgagtgccttcacagaggggacgtctcaaagcacaaagttgagagtgcactcaagaaaatttgcaaggaaggcgcatattggggtactattgcgggtgtatatgtgggcatggagtatggaatcgaaagaatccgtggtcacagggactagaagaacgcgatggttggaggcgccgtaacaggagcactggtgtctgcggcgagcaacagccacaggcagaacgtggtgaagaacgccatcactgggggagccatcgcaaccgctgcagagttcctcaattaccttacctgaagtctgcatactacttgttgttgatctgtgcccccaagaagaataacactctactcttacttgttggaaaaaaatagtattagcaaccacgcatatgcaaattttaatgcagtaataataagagatggatcgatcgttttccagctcttgtatatgtgactggccctgctttatgtgtgtagtgttaatttcagctttagcagtacgtgattagtgatggacaataattgtcgcagacgtatctatcaattgctcctgttgtgtgatgctttaactgttggaatcaaagttgcgttgcctttgttgtt

SEQ ID NO: 20880 - DNA, 1750 bp, Oryza sativa
  ref <308>: DATABASE ACCESSION NUMBER: AK071183
  ref <309>: DATABASE ENTRY DATE: 2001-12-06
gactgacttcccacacagactgctccgagctctccattcccgcgacccattgacccatcgggatcctggagcgcgccaatggcggcggccgccgtgctcctggccgccatcctactggcgctgtcccctctccccatgtccctctccgccggcggcggcggcggaggtgacactggcacggccgaggcggccgcggaccgaatcacggccctgccggggcagccacgggtcaacttctccatgtactccgggtacgtcaccgtcgacgcggccgccgggcgcgcgctcttctactggctcatcgaggccgccgacccggcgtccgcgccgctcgtgctctggctcaacggcgggcccgggtgctcctccgttgggtacggcgcgtccgaggagctcggcgcgttccggatcaaccccgacgggaggtcgctctacttgaacccctacccctggaacagagtggccaacatgctgttcttggactcccccgccggcgtcggctactcctactccaacaccacctccgatctgttcactgctggtgataacaagacagctcatgattcatatgctttcttggtgaattggttggaacggtttccgcagtacaagtaccgtgatttctacatcgcaggcgagagctatggagggcactatgtccctcagttgtctcagctagtgtaccggaataacaaagacgttgaaaagcctatcctaaactttaaaggctttatggttggaaatgcggtaatcgatgattaccatgactacgttggcacatttgagtactggtggacacacgggctgatatctgatgatacatatcagaagctgcaggtggcctgtgattttgaatcatctgctcacgcatcagaagcatgtaacaagatttatgaagtggctgaggctgaacaagggaacattgatgcatacagcatctatacgcctacctgtaaaaaaacttcatttctcaaacgcaggttaataaggggtaactcgccatggttgcctagaggatatgatccctgcactgaaaagtactctacgaagtactacaacctaccagaagtgcaaaaagcatttcatgccaatgtcactggaataccgtatgcctggaccacctgcagtgatgacttgttttattattggaaagattcaccaaggtccatgcttcctatttaccgtgagctgattgcggctggtctaagaatatgggttttcagcggcgacgctgattctgtagtccccctcactgcgacaagatactccattgatgcactctatctacctactgtcactaactggtatccttggtatgatgatgaggaggttgctggttggtgtcaagtgtatcaaggtttgacactggtgacgatccgaggagcagggcatgaagttcctctccatcgtccacggcaagccttaaaactctttgagcatttcctacaagataagcccatgcctcaacctgtacatagcattcaatccttttagaattttcttccatttaaagtggaagatcatgccacgaggccatgatgttgtataatttgaagtctgtctcccacattttctgatgaacagatgaaatctgttcaaatgacagctggccatcattcttaatttattcaactatatgttcctagtgacttcagaaataatgcccatcctgttgaatatttccttttcggtttatgtataccacaagaccaagatggaaatatagtttttcattttatgagcttgcttc

SEQ ID NO: 20881 - DNA, 1432 bp, Oryza sativa
  ref <308>: DATABASE ACCESSION NUMBER: AK071184
  ref <309>: DATABASE ENTRY DATE: 2001-12-06
ggggtccaaaagagctccaccgcaatgcaaccaatcccttgtctctccgtcgaggatcagtaatgcttcacgacgattgcatcggtgagggactctcaagccccatagctgctcaaattcttgatttctgcgatgacggcctaggtgatgatctcttcgctgcagtggccactacctccgagcaatttgcagcctcttccgaggatggttcatcgtcgtccacagccacacctcccctctgcagcaacagcaatgacatcacagctgttgcagacacagctttctccccattactctccttcgactccaccctctcagccttccttgagcaagagcaaaaccctgaccaggacaccaagctacttccctccattgatgaaacctttactgcaccagcatactatccagctgccaccgaggccaacatagaacaattcagccaaataatggttccagagcatacagatgcaccaatgcccccaatgcaaacaaacaggactgccaatgccttgctgcctctagcttcagggtatgacgacgagtgtttcacagcagcactagctggagggtacatgggtctggatggaactctgtatgaccaaacaggagtaatgattccaaattgcaatgtggagacaccacaagtaggatttttcaaccataatagtactagtaacaatggtatggtgatggatttgaataattttggagagtaccagaggatgatggaaggtgaaggactgaccagaacatatagcgacacagattcgatgcatggggcgtttaataacgctgcagagatgcagatgggagaaaacacccagcacatggtaactggatgcaatgatagcccactaacgttgccttcaacagaaggctcaagcttggaagataccccctacaaaggtgtgcgtctaacagctgaacagagaaaggaaaagatctccaggtacataaagaaaaggaacgaaaggaacttcagcaaaaaaataaagtacgcttgtagaaaaaccttggcggatagcaggcctcgggtccgcggaaggtttgccaagaacgacgaactctgtgaagctaccagatcaagctcccaagattttgaacaatatgaacatgttgtgggaatgaagggagaagacatgcttgattcttccaatattttggcacatttgagtggaatgaacccttacggctataagtacaacagcactgtggaatcctggatataattctcataaacacacaaattaaagtgtgttttcctttcaattgtgcaagcattaaacacagttttcccttgctcccagtaaataagactgatgctttagaagctctattcgcaagagaagtgcttaggtcaagttattgtttctgcacactactgatttgtaaatagaattgtttccttgtcataatagagataacaagtttc

SEQ ID NO: 20882 - DNA, 921 bp, Oryza sativa
  ref <308>: DATABASE ACCESSION NUMBER: AK099168
  ref <309>: DATABASE ENTRY DATE: 2002-08-28
gaaaggaaaagagagagccctcctctcctctcctaccctcttcttcctcctcctcctcctcgcctcccaccaaaccctagcacgagcagcccaatccatctccagcctcacgagctccagttcggagcagcctcgcggtgggacgagtcgccagttggggagctcggaggaggtgaggccgtggttgggggttgggaaggggggaaggccaagaaatggcggagaaggaggagggcaaggtggcggcggagggtggggcggaggcggaggccgacgaggaggtggaggtcaagttccgcctcttcgacggctccgacatcgggcccctccgctgcaacgccgtcgccaccaccgtcgccgccctcaaggaccgcgtcgtcgccgactggcccaaagataaaacaattgtcccgaagactgctaatgatgtcaaactgataagtggaggaaaaattctagaaaacgacaagaacattgcgcagtgcagagcaccttttggtgatcttccgagcactgctatcacaatgcacgttgttgtgcagccatcatcagccaaatcaaaacctgacaagaagaccaacaagttgccaaagaccactcgctgctcatgtaccatactatgaaggttcagtgtcaactccatcgacaataatttgtatgtccgtgaaaattatgcagagagacaacgaatggagagaagattgaagaaaatctggtgccagaggagtccgatgtgttgtgagattgtattgtaattgtaagcttagatactacagagagttcgtccctctgcggctagggaaaaatagatgtcgttcggtcggttgcttgtctgttttacccaacaaaatgtttctatatgatgtacaatatacacatacatgctgttctggaggaagaagttggttgtttttccgtgcc

SEQ ID NO: 20883 - DNA, 1811 bp, Oryza sativa
  ref <308>: DATABASE ACCESSION NUMBER: AK071185
  ref <309>: DATABASE ENTRY DATE: 2001-12-06
gtgaaggcaacacaggaggaggaggagcttggtttctgggttgggttgggtttggttgcgttgcggcccatccatcgcattcgcgttcgcaggcacaaaccaaacacctcccctcaaatttctctttcttgtctcttctccctttccgcctcgcctcgcctcgctgcctgcgcttcacaaatcacaaatcggaatcagatccaccacgacacggcggcggcaatggcggcgtcggcgacccaggaggcggactgcaaggcttccgaggacgcccgtctcttcttcgacgccgccaagcccccgcccttccgcatcggcgacgtccgcgccgccatccccgcccactgctggcgcaagacccccctccgctccctctcctacgtcgcccgcgacctcctcatcgtcgccgccctcttcgccgcagccgccactcggattgacgtctccgtcgcctgggcggcctggccgctctactgggcggcgcagggcaccatgttctgggcgctcttcgtcctcggccacgactgtgggcacgggagcttctccgacagcgccatgctcaacaacgtcgtcggccacctcctgcactccttcatcctcgtcccctaccatggatggagaatcagccacagaacacaccatcagaaccacggtcatatcgagaaggacgagtcctggcacccgatcaccgagaaattgtaccggaagctggagacgcgcaccaagaaactgcgctttacattaccatttccattgcttgccttccctgtctacctctggtacagaagtccgggcaagaccggatctcactttctgccgagcagcgatctgttcagccccaaggagaagagtgacgtgattgtctccaccacctgctggtgcatcatgatttcgttgctcgtcgccttggcgtgcgtgtttgggtctgttccggtgctcatgctatacggtgtcccatatcttgtattcgtgatgtggcttgatttggtgacttatctgcaccaccacggtcacaatgaccttccctggtatcgtggagaggaatggagctacctccgcggtggcctgacaacggtggatcgggactacgggtggatcaacaacatccaccatgacattggcacccatgtcatccaccaccttttcccccaaattcctcattatcacctcgtagaagcaacaaaggcagcaaggccagtgctgggcagatactacagggagccagagaagtcaggtccgctgccacttcacctgtttggcgttctgctgaggagcttgagagttgatcactttgtcagcgacgtcggggatgttgtttactaccaaacagatcacagcttgaacggcactgactgggccgaagatgctaagcacaagtgaaaaattaacttgaaaattattggagtcaccgtgtactagtagcttagtaagtgaagaatggattgttttcctgatagatagcatatccatcatagcatgaactgctgaaagaaagagaaataataagcagcaagggctacttacctgctcaaaagcatgcggccctgcagaacacagggattcattgatctgttggatcaccatattcagatcactaaacaagcattgtccaattgttgttgtagctagcgggtcgttcagttttgattagttctgaaagtgtccaagttataccgtgtaaccctttggagtttgccaggcaattcaatgtctggagtttgtatgtgccattgagcagacaattatgatccgaattaagctctgcaccttaatttttccatactgaatcactcacaatggagtttatttgc

SEQ ID NO: 20884 - DNA, 1961 bp, Oryza sativa
  ref <308>: DATABASE ACCESSION NUMBER: AK071186
  ref <309>: DATABASE ENTRY DATE: 2001-12-06
gacacgccttcctcgccgccgaccgccacatatccacacacctcgacacgacggcgacggcgacggcgacgatgactgcgggccagcctctccgggacgatccccagccacgccggcacagcccgccggcgctccacccggccgtcgtgccggcgtacccgcccccggagtcggacgccgacgagtcgtgggtctggtcccagatcaaggccgaggcgcgccgcgacgccgacgccgagccggcgctcgcgtcgttcctctacgccaccgtgctctcccacccctccctcgaccgctcgctcgccttccacctcgccaacaagctctgctcctccacgctgctctccacgctcctctacgacctcttcgtcgcctccctcgccgcgcaccccaccctccgcgccgccgtcgtcgccgacctcctcgccgcgcgctccagggaccccgcctgcgtcggcttctcccactgcctcctcaactacaagggcttcctcgccatccaggcccagcgcgtcgcgcacgtgctctgggcgcaggaccgccgcgccctcgcgctcgcgctccagtcccgcgtcgccgaggtgttcgccgtcgacatccaccccgccgccgcgatcggcaagggcgtcctcctcgaccacgccacgggcgtcgtcatcggagagaccgccgtcatcggcgacaacgtctccatcctccaccacgtcacgctgggcgggacaggcaaggccgtgggcgaccggcaccccaagatcggcgacggcgtcctcattggcgccggcgcgacgatcctcggcaatgtcaggatcggcgccggggccaagatcggggccgggtcgctggtgctcatcgacgtgccgccgaggaccacggcggtggggaatccggcgaggctgctcggcgggaagaagggcgacgacatgccgggtgaatccatggaccacacctccttcatccagcaatggtcggactacagcatctgagcaggacatggtgtatgcgctactaaattttctccttgtttcgagctgtgcttgaactggtactagtggtgttattacttaataacactacaagtaatagcacaatgtgtttcttttttgcttgtaatggctgtaagctttgctccggcgagctgaaggtgaaccgtactgcacattgtcgtgctcgtctccggacacttgtactggatgttcactttgtaattttgcgaaggtctcgtggaatgtaatactatccactaccttaaaataaaaagaatatccaccagtgtagactactgcagtacagatcagagggtgtattgcagtattgggtagttggatatgcagggggaggtggatcagccgatgcagatggtgctgcgggtgaagcacccgtcgtcgctgggcggcggcggcggcggcggggaggaggaggccggcgaggcgtcgtcgaggtcggcgctgtcggtgttcaaggccaaggaggagcagatcgagaggaagaagatggaggtgagggagaaggtgttcgcgcagctcggccgcgtcgaggaggagtccaagcgccttgccttcatccgacaggaactggaagggatggcggatccaaccaggaaggaggtggaggtgatcaggaagaggatcgacgtggtgaaccgtcagctcaagcctctcggcaaaacctgcgtcaagaaggagaaggaatacaaagaaatcctggaggcgtacaacgagaagaacaaggagaaggcactgcttgtaaacaggctaattgagctggtgagcgaaagtgagaggatgcgtatgaagaagctcgaggagctgaacaagacggtcgattcactctactaggcgccagataatgttatcccctagaggcatataattcctctctgtaatctcagtgccatggatttgtgaaatgttcacgtgacccgttcatgttgcttgtaactcaagagtgattcgttctctctc

SEQ ID NO: 20885 - DNA, 2071 bp, Oryza sativa
  ref <308>: DATABASE ACCESSION NUMBER: AK071187
  ref <309>: DATABASE ENTRY DATE: 2001-12-06
gttggcggatcagatcgagcacctccacctccccatccgtggcctcaacctccacatcgctcaagtcggcaaaggcgagatctccttgtgtatctacggacattgaactgttccatgtgttcttcacaaattttaggtgagattttgcgttttgggtggtgaattttgattttgattcttttttttttctggatgcagatgagctcgggacggtggtgttcttgcacgggttcccggagatatggtactcgtggcgccaccagatgctcgccgcggcggccgccgggtaccgcgccgtcgcgccggactggcgcgggtacgggatgtcggggcagccgccggagcaggaggaggcgacatgggacgacctcgtcgccgacgtgcttgccatcctcgacgcgctcgccgtgcccggggcgttcctggtgggcaaggacttcggcgccatgcccgcctacgacttcgcgctccgccacacggcgcgcacccgcggcgtggcgtgcctcggcgtccccttcagccccgccccggcctccttcgacgccatgcccgagggcttctacgtcctccgctggcgcgtacgtgctcgccgccgccgccgccattgccgccgtcgccgtctgttcttgctgctgacgcgaacgcgatgtgtgtgtggtggcaggaggcggggagggcggaggcggacttcgggcggcacgatgtgcggcgggtggtgcgcaccatctacatcctcttctccggcgccgacatccccgtcgccaaggaagggcaggagatcatggacctcgccgacgcctccacgccgctgccgccgtggctcaccgaggccgacctcgacgtctacgcctcgctctacgagaactccggcttccgcttccccctccagatgccttacaggtacacaagccgccgccgccgccgccgcggcggcgcagccaccgtgtccaccattgtcagcgacgaacctcgaaaaaaattacctggctccaatagatagtaattatttaattattgacttatatattactccattcgtttctaaatatttgacaccgttaactttctagcacatgtttaaccattcgtcttattaaaaacttttgtgattgtaagtatatttaacaatgaatcaaatgttaggaaaagaattaataattacttaaatttatttaataaaacgagcagtcaaacatatttaaaaaaaatcaacgatgttaaatatttagaaacagagggagtagtaattactattatgcaatttagttagtactcccttgtcccttcgttccattttaagtgcagccatgattttatcatccttcttatttaaaaaatttttgaaaaaaaaattaaaaacataagtcacacataaacaactatttatgttttatacagactcatggttacatttaaaataaaacggagggagtattggataatttacatggatcctatgaccccgggatgttgaacatgagatcgtcactggccattgctgatcgttgcatgtctccatggatggatcgtacgtgcagggcggtacataggaggccaagccggaaggacgcgaggttcgaggtgccggtgctgatggtgattggggagaaggactacgcgttcaagttcccggggttcgaggccgccgtgcggggcggcgccatggagaggttcgcgccggagctgaagatcgagttcctcccggaggggagccacttcgcgcaggagcagctcccggagcaggtcaaccggctcctcctcggcttcttcaccgagcacccggttgccgccgattgagatcctctctctaccttcgaagtgatcacgcgtttatcactgacatgtgaatctagagtttactggactcactcacatgttagtaataaagtcacgtaacttacaagatagactatcttaacgtaataaaatagggacgtctagaagcaaagtgtaatattgggatcaagtattgtactcgcacacaatttataatccacgtgtaatagtgggagtgaatgtgaccgtgggaataatttgtaatttaataattttaaagtttaaaattagtact

SEQ ID NO: 20886 - DNA, 2088 bp, Oryza sativa
  ref <308>: DATABASE ACCESSION NUMBER: AK071188
  ref <309>: DATABASE ENTRY DATE: 2001-12-06
gaccaccaccaccgtcgccgccgccgccgactgagaagaggaagaggaagaggggagattccgccgccgacgagaggtgggggggagtgggttgtgatcgtgaggagggctctcatccctagacgggcgagttgaaaggcggcaaagacggctagcgttgaagcggtcgggcgcggccacgcagctgcgccgcccacgcccagtgggggagccatcgcttctccggcgacggcgtccagcccagccccgcacggcggccgcggggcgcttccctcggccggcggcagcccctctgacctcctcttcctcgccggcggcggtcgcctctgagaccgctcgccccccccatccaccttctctaacatccaatcaacaaaaatctttcgctgacctgaccctgaccccgagagagaggaaggaattgagatttaatcatggagatgaagctgaccatcaagcgggtgcccaccgtggtttccaactaccaggaggatgctgccgccaccgccggcgaacgcccccgcgccggctgcgggagggattgcctcggggattgctgcttgcccgattccaagcttccgctgtatgctttcaaggcgagtccgaaaaagccgtcttcgcaggaggatgcttccaacgatgagttctttgtcaatctcctgctcggcctgtgggaagacaggatggcccgaggttttgttccgatatgatgtcactgcctgtgagaccaaggttatcccaggcaaccttgggtttgttgcacaactgaatgaaggacgccacctcaagaagcgccctactgaattccgcgtggaccgtgtgcttcaaccatttgatgctgccaagttcaacttcaccaaagttggccaggaggaggtgctcttccaatttgagaatggtggtggtgatgacagcttctttgtggagagctccccaatcagtgttgctgatcgtgctcctaatgttgttgcaatcaatgtaagcccaattgaatatggccatgttcttctcattccccgtgtactggaccgcctgcctcagaggattgaccaggagagcttcttgcttgcactgcacatggctgctgaagccgcaagcccatacttcaggcttggctataatagtttgggtgcctttgcaaccatcaaccacctccactttcaggcatactacttgacagtgcctttccctgttgagaaggcagctaccaagaggattttccttgctgagggcacaatgaatagtggagtaaaggtgtccaagctgatgaactaccctgtgaggggactggtttttgagggaggcaactcactgagcgatctggccaatgtggtttccagcgcttgtatctggctgcaggacaacaatgtgccttacaatgttcttatctctgactgcggcaaaaagatcttcctcttccctcagtgctatgccgagaagcaggctctgggagaagtgagccaggagctactggacacgcaggttaacccagctgtgtgggagatcagtggccacatcgtgctgaaacgaaggagtgattacgaggaggcatcagaagcttctgcgtggagactcctcgctgaggtttccctgtcggaggaacgcttcgaggaagtgaaggcctacatctttgatgccgctggtctggttcagtccgacgaggaggaagtcagcgaagacgaggacgccacctacacgcctgtctccattgcccctcctgctgtcgcggaaggctgcctcgtccttcagtgagacggtagaacaggttgtcggcctggtaaagcgctgtgccgccttcgtcttctcatcagtcttcttcagtcttcacccgctggtcgcctagcttcgtcatagttatggttgctggtcttttataaggatcaatgtaatcgaactgcctggagtcttgtgtctgaacctgcatgctacttgctactcccttccctgctgctctgatattcagactctgcaaatattaagcagagaaactgtgaaactgtttgtattgtttgtgctgttgagcactggatctaatgtgatgaacattgttaataactacacatcttccctgatctgtttgcttgtttt

SEQ ID NO: 20887 - DNA, 1514 bp, Oryza sativa
  ref <308>: DATABASE ACCESSION NUMBER: AK071189
  ref <309>: DATABASE ENTRY DATE: 2001-12-06
gtacgaaatcctttctgaatcaatcctcttagttgagagtgatttgtgcacatcattatacattttctgattattgttttgtaggtatttgataagcatcaggatatacccgtacagactttacaagacttcagttgcttccaatattctggaagcgtcgatgatggatttcctgaagttacttttcattttgagggagacgtttcactgattgtttctccacatgattatcttttccaaaatggggtatttaataatctctcttgcctattctttttttttttaccatacaacttacaaacattatgttaggccgtgggcatgcatgttgaatttagtgcacagatgacagctccatcacagccacactactttatgctgtccattattcatttggagaaagatacacccttttatattttttttactatgcaaataccaaccattatttctactttatagatctaaaatttgaaacattggataactttaggttgttttctcatcaaaagaatatagttttttcttatgatctttctaccattattgtacgtggcagaacttcctatgatacattaatgcaagttgtgatagtaagtatttcatgtaaatatctagaaccctttgttgtgcagaagaatttatactgcatggggttccaaaacggtggagtacaaaccaaggatgggaaagatatggtgcttttgggaggtgcatattgctttgtgctgttcacctatttatgcccctacaagttttatttctgttctaatggttgccacttactttaagttgttctccttttttttttttttttttgcaaacttactttcagatctagtgctttcaaataagctggttctttatgatttagaaaatcaagctatcgggtgggcagattacaactgtaagtctttgctcattgaaaattaatcttttgcgctgggcacttaatgtgccatattgcaatttgaatttgttagtagataaatatactctctttaacatatgattgcacatttgatcatattgaccttcactgttgtctcaggctcctccagcattaagatcagtgatgacaagggatcaacatacactgttaatgcggacgatatctcctccggctgtgaagttcagtggcgcaagtccttgattttgttgctagcaacaacagtgatcagctatttaatgttgtaacctggctttggaatcttgggtgcacaatacgtctgttctgaaaatgatagaaactgatttttattcttacgataaaaggggggagaaaaagtagaagcttagacttgacactgtgagcacttgttttgataggggcacagagagaggaaatactacacacctagcacattgtacaaacagggttggactaacacgagctttgaaaagcatacatttagaagtaaattcaatgttgtttgtttctagaaattgtctaaactgttctgcttaataagcggcatcatagttttagtctgattgcaataactttttccatc

SEQ ID NO: 20888 - DNA, 925 bp, Oryza sativa; identical to SEQ ID NO: 18826
  ref <308>: DATABASE ACCESSION NUMBER: AK099169
  ref <309>: DATABASE ENTRY DATE: 2002-08-28

SEQ ID NO: 20889 - DNA, 998 bp, Oryza sativa
  ref <308>: DATABASE ACCESSION NUMBER: AK071190
  ref <309>: DATABASE ENTRY DATE: 2001-12-06
agagaggaatccatccatccatccatcgctcctccaccggcagcgaccaccggcgagagcgagctcctctccggctccggctccagccctacctcccctcccccccaccggtcaggccatgtcgcccgctccgccgccgtcgcgcggccgcatccggccgtggctggtggtgggcgacctggtggtggcggcgatgtgggtgtgcgcgggcgcgctggtgaagctcgccgtgtacggggtgctcggcctcggtggccgccccgaggccgacgccgtcaaggtggcgctctccctcgtctacatgttcttcttcgcctggctcgagggcttcaccggcggtgcctcctacaacccgctcaccgtcctcgccggtgccctcgcatcccgcgccggcccctctctctacctgttcgccgccttcgtacggatgcctgcgcaggtgtttgggtgattcttggagtgaagctcatccgagcagctctccctaaagtaggcaaaggagctccgttaagcgttggagttcaccatggagcgttagctgaagggttggcaactttcatggttgttatagtgtcggtgactcttaagaagaaggagatgaaagggttctttatgaagacatggatctcgagcatttggaaaatgacatttcatctccttagctcagatataactggaggagtcatgaaccctgcatctgcttttgcttgggcctatgctcgaggggatcacacgacattcgaccacctacttgtatattggcttgcacccctccaagcaaccttgctaggagtatgggtcgtgaccttattaactaaacccaagaagatagaggaagaagcagatgaaagcaaaaccaagaaggagtagactattattgatgtggtaatgttcgccatttattgtggaagtgtggagcaagaacttccatttttttcacaggcaagactggtgttgaacttatacagacaggatcatttttatgctgtaagcccccc

SEQ ID NO: 20890 - DNA, 846 bp, Oryza sativa
  ref <308>: DATABASE ACCESSION NUMBER: AK071191
  ref <309>: DATABASE ENTRY DATE: 2001-12-06
gagctgcaaaaggcgagagttcagtggaaaaaacagatggtcgctgttcagaccgtgcatgcggcgctcttgccgtcgacgacgacgacgcgcaggcggccatcaccgggtaggctaccgaggcgttcccccatccgcgcacgagccggatcgtccgagacatcgtcgccacgcggccgcgagaactggcgggtgcaggaggcgctcgcacgggtcgccgagatccaggttctgaaggtccgcatcgccagcttcctcgacgactgctccgagaacctgctctggctcgcggagaacgcagcgctcgacgcgacggcacaggacagcctgagggtgctcgacctcgacggcgccgccgacgatgagataatggagaggctgtactgtaagttgggtcgttcgacgacgcgcaagcagaggagaagtggatggacttgatcggcttgggcatagacgaaggtgtatccgttgaaagcatcggtgaggaagccaaacatgaacatgtgctggtggcaagggagagcggacggtacaggactcgcaggaacgtttacctcggtgtcatgggattgatctgggttggcctgatgcagaccaccgtgttcgcggcgcccaacgtggagttggacaagtttgcggccctgtgtctcatctttcttgcccatattgttcaggtctgcttcaaggaggaaactgataagaaacaagtgtgtgtaaatcatgagactcagatcagcggaaggcagcggtagactccaatcatttggtttggtttaaagtagacagggatatgacaggcaatttggacagtaatgatatgttacatgtaataactttacacgtcgc

SEQ ID NO: 20891 - DNA, 1397 bp, Oryza sativa
  ref <308>: DATABASE ACCESSION NUMBER: AK071192
  ref <309>: DATABASE ENTRY DATE: 2001-12-06
gatcgtttcccaacttcatatgtagtatatcatttatggtagagtttttgagtgttgaagcccttaacattggcactgtagtccttcctcagctccacataccaccatctattcattttaacacaaagattttcctcttgttcctttttcttagagaattcatatttcctatagcagatcaagtcctatggaagaagaattcaaggacaaaggcctccctcccacgctgctacacctcatccctgacgggagagaatggaaggtgaaagaagcagatggagaaggatcaaggaacacaaacttagatgccgatgaggataaggagctagagcttaagctcggcctccctggtgtccaacaggaagagagagcagctgattcaagagagaagatacagcagcaacaacgagagagttcctcagaaccatccatcggttgcttccctacacattcaaagcctaccaccagcatcggcacaactggggcaaagagaggattttttgcgattgttggggccacactagaaggttataatcagagccaccgggacacagaagaatgtgggaaggagctaacgttaggagatgaaaatatggcaggtgagaggaagaaaggatgctgtccctcaccaccatgctcagctgcagcgcacagcagcaacccccaggggagaggtgctattcctccagtagtcggttggcctccaatccggtccttcaggagaaacctcacaaatggcagttcatttaaacagtcccctgaacgacaaaatgacgaagctgatgacaaggcaaagccaatctgcaagaagagacctcttgtcaaaatcaacatggatgggatccccattggaaggaaagtagaccttcaaatatacgacagctaccagaagctgtcatctgctgttgaagagttgttccgtggttttcttgaagctcaaaaagatctatcttgtgctgaaagtggagagcaaggggcagaagacaaaatattttcagggttgttggatggaactggtgtatacactttagtatatgaagacaatgatggagacagaatgttagctggggacataccatggaaggtatttgtttcgactgttaagaggttgagggttatgaggaggtcagaacttccccatgacatgattggagctgaccctgtgaagtagcaaatcgttgatattagggtccagacatatcaattgtgcaaaccatagtccatcacctttctgggggatgacctgtttttggcttgtacagatgattatgataatgggaaaatagcatcttgcaggtgcagtggacaaactgcatattttgtaaatgacctactctttttcagatataacagattggtgtaattctataagttatagatttcttgacaaaggtgcc

SEQ ID NO: 20892 - DNA, 979 bp, Oryza sativa
  ref <308>: DATABASE ACCESSION NUMBER: AK071193
  ref <309>: DATABASE ENTRY DATE: 2001-12-06
gttccagcactatcagttgaagggaatgacacagcgatctggggaagtggggaatggtggatgttcctctcggcccaaagcatggctgtcggaactatcatggtccgttgggtgtcaaagtattctgatccaatcatggcaacaggatggcacatgataattggtggccttcctttgttggttatatctgttctcaatcatgatcctgcgctgaatgggcatcttcaagaacttacgctgaatgatgtattagcacttctctatacatctatatttggcagtgctatcagctatggtgtgtacttctacaatgctacaagaggtagcttgaccacacttagttctctcactttcttaactcctatgtttgcttccatttttgggttcctctatctgggagagaccttctcgcctgtacagcttggtggcgcgcttctaacattggtcgccatctatatggttaactacaaaagcatcgtaggcgagaagtaaaaggccgttgcaagattcttctggagacactggcacagatgaatgctgtactgaagcacctgtaacatttcattggcgcaaaacagcaatgtgaagatttaaagtacatcccacggtcccaacatctcacacagcttgaactgtgaaagaagacagggatatggtggtataacctctgaacatagttagactggtaatttgggcatcagtgcatacttccgaggttcccaagttagtcatctacttcatttcggcttgcattctgaaatggataaaacttgagtgtcatcagatggttaaaacatagttgctatgaactgtgttgtggatatcaaattgagggaagttgcccctttgtacaagtagtttggagcataaaaaaatagttgatcgaaaggaagcagctgtatatgttgagcacaagcttcgtctatcgatctaagttcagacactttccctgataaatacgaagcatgtcccttttgtg

SEQ ID NO: 20893 - DNA, 1383 bp, Oryza sativa
  ref <308>: DATABASE ACCESSION NUMBER: AK071194
  ref <309>: DATABASE ENTRY DATE: 2001-12-06
gctctctcgtcgccagcggcggcggcggatgggggcggggaatggtgaagtgcggtacggcggcggcggtgccggcgccggcgaggcggcggtgatggcggacgacgggaccacggtgttccgggggacggcgcagccgccggtgcgcaccacggttgcgctggcgctgtggctgggggccatccacttcaacgccttcctcctcctcgcctcgctcttcctcttcccccgccgcgtcgccgccatggtgctcgccacgcagctcttcttcatgttcgcgccggtcaatgatatgagcaggttggggcgcaagatcgccaggttcatcagcaagtgcgtgattgggtacttccccgtcacattacatgtcgaggactacaaggcttttgatcccaatagagcttacgtgtttggttatgagccgcattctgttttgcccattgcccttggggtccttttggagcttgttggattcatgccattaccaaagataaaggttcttgcaagcagtgcggtgttctataccccattcttgaggcaaatatggacatggttggggttggttcctgcatccaggaagaatttctactcctaccttaaagctggttatagctgcgtcatagtgccaggaggggtgcaggagatgcttcacatggatcatgattcagaggttgcttttcttaaatcaagaaaaggtttcgttaagatagctatggaaacaggttcccctttagtccctgttttcgctttcggacagagctatgtttataagtggtggagaccaggtggcaaattaattgtcaaaattgctagagcaattaaatttactccaattatgttctggggaaaatttgggactcccattccgtttgcgacacccatgcacgtggttgttggaagaccaattgaggttaagaaaaatgctcagcctacctttgatgagataaatgaagtccatgaacaatttgttgtcgcactacaagaactgttcgagaagtacaagactaaagctggatatcccaacctccatttaagagttctatgatggcttctgtaagttccagcagtaagctctaatgatctggatttacggaataaaatggttatgctgttaggccatcaattcaatccctcgtagcactgaagctggagtgtgttcagttcaagagccagaatcagaattcagtagcttcagacatgattcgccacattcccaacagcagttcagtaaggcaacgtattgactgacgaattatcctctggtggtttggctttggcagaatagaatgcattgtatgtaaggtaaatgtgtacatttgtttattactcacgattctctcacatcattatcagtaccagtgattgaatcgtgcacagaagggg

SEQ ID NO: 20894 - DNA, 2078 bp, Oryza sativa
  ref <308>: DATABASE ACCESSION NUMBER: AK071195
  ref <309>: DATABASE ENTRY DATE: 2001-12-06
gtcatttctgacactattgtacactccatctgtgtacgaccatcaaatgcagtctagttctcggtttgtcagtgggtggatatgggacaagaccattcctgatccacgatatgtatcttcgcttggtgttcagtgggaggatgtatataaaaccgtcgaaaatctgaatgatggtgaacggaagctcaaagttggactattaaattttaacagcactgaaattggctcatggacacaattgctcccggatagtgatttttcgatcattaggctagagcatgccaaggaaagcatcacctggcagactctttaccctgaatggattgatgaggaggaagaaacagagataccatcgtgtccatcgcttccagatcctatttttccaagagggacacactttgatgttgttgctgtgaaacttccctgtacccgagctggtggatggtcaagagacgttgcacgtctgcatttgcaactatctgctgcaaaagtggcagtgactgcttcaagaggcaatcgtggtatccatgtgctgtttgtgacggattgcttccctattccaaatctcttctcttgcaagaaccttgtgaaacatgaaggcaatgcttggatgtacaagcctgacttgaaggcactaagggagaagctcagacttccagttggatcctgtgaacttgctgttccactcaaagcaaaagcacgactttactcggtagacagacggagggaagcatatgctactattctgcattcagcaagtgaatatgtctgtggtgcaatcacagctgcccaaagcattcgccaagccggatcaactagggattttgttattcttgttgacgagaccataagtaaccaccaccggaagggcttggaagctgctgggtggaaggttagaataatccaaaggatccggaatccgaaagctgagcgtgatgcatataatgagtggaactacagcaaattccgtctatggcagctcacagattacgacaagattatatttattgatgctgatctcctcattctgagaaatgtcgattttctgttcgcaatgccagaaatcactgcaaccggcaacaatgcgacactgttcaactctggagtaatggttattgagccttcaaactgcacattccagttgttgatggaccacatcaatgagataacatcctacaatggtggtgaccaaggatacctgaatgagatattcacatggtggcatcgaattccgaagcacatgaacttcttaaaacatttctgggagggggatgaagaggaagtgaaagtgaagaagactcggttgtttggtgctgacccaccaatcctctatgtccttcactatttgggtctcaaaccatggctgtgcttccgggattacgactgtaactggaataacccgatactgcgggagtttgccagtgatgttgcacatgcccgttggtggaaggtacatgacaagatgccaaagaaacttcagcactattgtcttttgagatcaaggcaaaaggctgggttggagtgggatcggaggcaggctgagaaagcaaacttcaccgatggacattggcggaggaacataactgatcctaggctgaaaacttgctttgagaagttctgcttctgggagagcatgttatggcactggggtgaatccaagaactcaacgaaggaaaaccctgtgccggccacacctaccgcgagcctcacaagttcatgagatgtgtagatagccctataccagatacaaacttctaagctccatacatacatagcaacagcttgtaaaggtagctatgcttaggtttctcgacaaaactataccttgtgtttgctatcatggcttcggctccactctggctgctttgatagctcacaatttttttggttttttggccaataattcatcagtataggtaaattttctgttcatgaattgtttggtcagtctggggttggttgttgctcggctgcaatagcctagttcgatgtatggtggttgaactgtttcggtgataaaatctggagtgacgcaacatgagattgctgaccagcaaacactgcctcattttgacatg

SEQ ID NO: 20895 - DNA, 1305 bp, Oryza sativa
  ref <308>: DATABASE ACCESSION NUMBER: AK071196
  ref <309>: DATABASE ENTRY DATE: 2001-12-06
gactcaccagctacgtacactcaaccaacacaccactgaaaagcaagattttgttgaagaaataagcatcttgccatgatcgcagcaagggctgcaaacctgcaggtggccatgaaggccctggcgctggccgtgctggccctcgcctacgccgcggcgacggcgcgcgccgagcagtgcggcaggcaggccggcggcgcccggtgccccaacaggctctgctgcagcaggtgggggtggtgcggcctcaccgacgactactgcaagggcggctgccagagccagtgccgcgtctcccgcgacggcggcgacgacgacgtcgccgcggtgctgctcacggcgccgggcggcggccgcgccggcgtggcgtccgtcgtgacgtcggaccagttcgagcgcatgctgccccaccgcgacgacgcggcgtgccccgcccgcgggttctacgcctaccgcgccttcgtcgccgcggccggcgcgttcccggccttcgccgccacgggcgacgccgacacccgcaagcgtgaggtcgccgcgttcctggcccagacttcccacgcgacctctggtgggccctactcgtggggctactgctacaaggaggtgaagggcgcgacgtcagacttctgcgtgccgaacgcgcgctggccgtgcgcgcccggcaaggcgtaccacgcccgcggacccatgcaaatcgcatacaactacaactatggggcggccggcgaggcgatcggcgcggacctgctgggcaacccggagctggtggcaacggacccgacggtggcgttcaagacggcgctgtggctgtggatgaccgcgcggtcgccgagccagccgtcgccgcacgccgtcgtcacggggcagtggactccgactcccgcggacagcgcggccggccgcgcgccaggctacgggctcaccacgaacatcctcaccggcgggctccagtgcgccggcggcaacggcggcgccgaccgggtcgcgttctacaagcgctactgcgacgtgctcggcgtcggctacgggcccaacctggactgcttcggccaggcgccgttcgacggcgacatcatgtcggcgtctgcggcgaagtagacgtgtgcgccgccgtgccggccccgatcgatcgaataaaattgcgtgtgagtacgcacttcgcacggtcgctctgcagccagagtgagtgagtttgctttatgtatttttcggtttcgggcgaggaattcttcatggatctgtgaaagcccatatgtatgcatggtcatggcatgaataaagtagtactgatcttctcgaatacgc

SEQ ID NO: 20896 - DNA, 1035 bp, Oryza sativa
  ref <308>: DATABASE ACCESSION NUMBER: AK071197
  ref <309>: DATABASE ENTRY DATE: 2001-12-06
gataggataataaaatttggcggggagaagccacgaccgttcgccggcgttgcgtctcccgccgcggtgacctcacctctcttcctcgccgccggcggccgcgcgtccatcgcgtcgccgtcgccgccatggccgccaccgcactccaactcccagtggccagctcgcaacgtctgacgctgaggcgtttccccggcagcggctcgttgggtcggtactctgggttgcggtggcccgtcgcggcgcaggcgaggagggcggcggaggaggggtttcgtctccgtgtcgcgttcaacccctccgggaacttcgacctctccctctccaccgaccaagacgatgccccacaagttgagcctccaccaccacctacagaaggtcgctttgagattgtcatcaacaccgatatcatccggacgctcgacctttcgcctgttcatgaagtacttggtgacttgaattccctgacaccagctcaaacaagaaatctcttggatcgaacggtcgggtttactataaactatgagagggaggatccatatgatgtgagggagctgtcagagttccctgatataaggctatggtttgtgaggcttgatgcttgttacccttggttccctgttgtgcttgattggagagctggtgaacttgccagatatgccgcaatgctggcccctcaccagatgagcatgaggcttggtgtggtcttcaacccggaggcgctggagctgtttgtgatgaagaaggtgttcattgtttactcatggctaaagcagcaggaacatcctaaacctggactcaagacggctgacatggccaggatgcttggtttcggtataggagatgaattattcgacttgattgggaagtatcctgctggtccttcatgaatctatctccataacctagagaattttgtcaataataggcatcacatcatacctttttcttttttttttaagcatcacccggggcgaaatgctcacctgaatatggattacatcatactgaatcaaatgataactgttttcagtc

SEQ ID NO: 20897 - DNA, 856 bp, Oryza sativa
  ref <308>: DATABASE ACCESSION NUMBER: AK071198
  ref <309>: DATABASE ENTRY DATE: 2001-12-06
tggccatccccgtgccacccacccctccgccgggggccgccgccgccgccgtcgacgcacggccgacgtgctcggcgcagaaccaagcagacggcgagccaaacttttcttgcccttttgctcttgcagagtggagcagaggacacttgcatcttgacgaattttctcaagtcgatgggttgctgtggcagcagcactgtagacgccgaggagcacctggactacagtggcggaaatgtgactttggtaactgatcaaaagaattgggacaatacaatggaagaagtagctgagcatggcaaaacagttgtgctaaaattcagtgcaatttggtgcactccgtgtaggaatgctgcccctctattcgctgaactttcactgaagtatcctgacattgttttcgtgtccgtggatgtagacgaaatgccggagctggtgacgcaatacgatgtgcgtgcaaccccaacgttcatcttcatgaaaaacaatgaggagattgataagcttgttggaggcaaccatgaagatcttcaggaaaagttcgaacagcttaaccggccaaagttatatgatgatgtataagcatttttttttggtttgctgtctaattaagaaattggtgagccaaatcagtagaatgagctctctgtcgaatcaaagtactggattggctgaagaaacagttcagaaatctacataggttgcaagaagctgaccaacagaagtagggatttctcagtagagttcagtccgaatacgggcagtaattaagttaagttagctagtgtctgcaaactctgcaccgcactgttcaaagtgattaacctcatacaaaacaatgtaattatatattacc

SEQ ID NO: 20898 - DNA, 1516 bp, Oryza sativa
  ref <308>: DATABASE ACCESSION NUMBER: AK071199
  ref <309>: DATABASE ENTRY DATE: 2001-12-06
gaccgccacttcacgcgatcgatcactctcactcctctcgctgccgctgccgcacctagccaaattatgccttcgccttcgcacctcgccggcgcgctggacgcggcgcgccccttcctgcgcggcgaggaggagcaggtggacccggcgctccccaagctggccgccgtgctgcgcgccgccggcgccggcgagtgctggcacaagcacggcaccttcctcgcccacctcctcgacgtccaccgcatcctccgcctctggggcgcccccgacgccgtcgcgcgctgcggcctctaccactccgcctactccaactcctacgtcaacctcgccatcttcgaacccgacgtcggccgcgaccacgtgcgccccatcgtcggcgccgccgccgagcgcctcgtccacctcttctgcgtcgtcccgcgccaccagctcatccacgacgacctgctcttccactacgccgaccaggacctcgtcgccgacctcgccgcctccgaggcgtcactgcaggacgcgcggcgcgggctgttccaccacgacggcgaggcctggcggctcaagatccagcgcctcctcccgccccacggaatcactgtcaaacacatcaggactggcgaggatgtggcactgtcgaggcgcatcgcggcaaccttccttctcatgacaatggcggacttcagcgaccagctcttcgactggcaggatcgcctcttcgacaacaccaatggccgcctcgagttcagtggcaatacctggacttcgctctggccaggcaccggcaagcccggcctctggactgcctccatatcccgcatgggcgcgctctacagcctcatcgttcgcgaggaagagatacacatagctcaacgaaagcatagcaacaatggccaagaagacgatcgtgacgaggacattgagctggtgatcccaccggtgttcaatggctgcacccaggtgctcaccgccgacgaccagaaggcggcacgggacctctactgggatgcagtttgcagcggcggcgaggacgagacggattggcgcaaggtggaggagatcctgcgacggtgcattggcaggaacccgtttgtaggagagcctcacctggttcttgctcaggtgcttctgaacatggagatgtatgaggaggcagaggagcagatagaggcaggggtgaagctgttgctggagtgggggagcagctgggacaagaggatgccatgggaggcttgggtgtcatggggcagggcgatgctgatcaaggccaaggacaaggattggccgcacacctccttcggcatcctcagcatagggcttgtcaagtgagtgaacccattcacctccactctctggtggtaaattaagctgcacctgtactgtacatgtcataacatcacctgataattgctgtatcctctccatcggtatatatatgcttagctcgatggaggaaatcaaacatgatggatatgaaataaatcgctccacaaatatcaaaataatttgacgcatccat

SEQ ID NO: 20899 - DNA, 1134 bp, Oryza sativa
  ref <308>: DATABASE ACCESSION NUMBER: AK071200
  ref <309>: DATABASE ENTRY DATE: 2001-12-06
ggttgccccgcgcggctagaccgctagtagactagtcccacgactccccatccctcctccctctctcgaccactcccgtggactcctctctcctccccttccctcccctcccccgcgcgcggtggtggttcgccggagcgcagcagcagcagcagcaaaaggccgcgagggccgccgtcgggatccccgccgccgccaagatgaacgacgccgatgtcgccaagcagatccagcagatggtgcggttcatccgccaggaggccgaggagaaggccagcgagatctccgtctccgccgaggaggagttcaatattgagaagcttcaacttgttgaagctgagaaaaagaagatcaggcaagaatatgaacggaaagagaagcaagtcgaagttagaaagaaaattgagtactctatgcagctgaatgcttctcgcatcaaagtgcttcaagctcaggatgatttggttaattccatgaaagaggatgctacaaagcaactcctgcgtgtcagccacaaccaccatgaatacaagaaccttttgaaagaactcgtcgttcagggtttgcttcggttgaaagagccagcggtacttctccgttgccgcaaagaagaccatcatcatgtggaatctgtactgcattcagcaaagaatgaatatgcgtcaaaagcagaagttcatcacccagagatacttgttgaccacgatgtgtacctaccgccttctccaagctctcatgattcccatgagaggttttgctctggaggtgttgtgctggcttctcgagatggaaagattgtgtgtgagaacacacttgatgccaggctggaagttgtcttccgcaagaaattaccggagatccggaagcttctttttggtcaggtgacggcataatctgtgcatgtaatttaagctgcggtatagctgcttccatgtaattagctgcaggttcgaacctgcagctgcaaggaatttcacctgtttgtgccaaattgattgtttaaagtattcatccgctatgtaaaacactacctatttgttcattattatcgccgagcaccaactattcgcacgcttgtttgctcagaggtataataataataataaaggacggtcaaacgttccattgctgtgt

SEQ ID NO: 20900 - DNA, 1305 bp, Oryza sativa
  ref <308>: DATABASE ACCESSION NUMBER: AK071201
  ref <309>: DATABASE ENTRY DATE: 2001-12-06
gttacagaaaacatcttggctagcaatttccatggagaaaatccaagtgaccacacccatggcagactcctcgttcaatccggagtttctgcaagcacatgcagagctttggaatctcacctttagctacctgaaagccatggcgcttgagtgtgctatcaagcttgggatccccaacgccattcatcgttgtggtggttctgcctcactatcggaactggtcatctccattccagtgcctgagactagaaagcctcatctgcctcgcctcatgaggtttcttgccgcggtaggtgttttttccctcgataacccaactattgatgaagaggtgaccgagaaaggcatgggcatataccgcctcacaccattgtctcgcctccttgtggatggtagcatcggtgggcatggaagcctctctccgtttgtgctctcccaaaccaccaagtatcatgtgtctgcagctatgaatctatctgactggttcatgactgaggacaaagaggttgccatagagatgccatttagggctgctcatggcacagacttgtggggtgttatgagtcgtgatgctaacatgaatgaggtgttcaatgctggcatgggttccgatagtcgtcttgcaatcaattttattattagcaaatgtggtgaggtgtttgaggggattagctcattggttgatgttggtggtggtactggcacaacagcaagagacattgctaaggctttcccacatatcaagtgctcggtactggatcttccaaatgtaatcgatactatcacggtggatggcataattgagtatattgcaggtgacatgatggaacaaatcccaccaactgatgccgtgctgctcaagtatattctacatgactggtacgatgaggattgtgtaaagatcctaaaacaatgtagaaatgctattcatgctcagaagccaggaggaaaagttattatcatagacatagtggttggatccccttctaaagacatgtttgaagctcaagtttcatttgatctattgatgatggtgataacatcaggcaaggaacgtgatcagcatgaatggcataagatattcatggatgcgggatttagtcattacaagacaaggcctgttttggggtttttggccatcactgagctctatccgtagaaggaatcccaacatgtgtttgcttttcaatatgcatgttttagcttgggcccaataaagtgaatatgcatgcctccattggtttgcatatttactatgatcggttgaaagtccaagatggaaattaataaagacaatactttagc

SEQ ID NO: 20901 - DNA, 525 bp, Oryza sativa
  ref <308>: DATABASE ACCESSION NUMBER: AK071202
  ref <309>: DATABASE ENTRY DATE: 2001-12-06
ggtcgtcgttgccggcaaacgcgcactcaaagagagagacggaacgcatgagggatctcgaggagttccggggcgggtcggcgccgccgcgcgacggcgacgagaggacggtggcctcgtcgtcgtcgacgccgtggtggtccggcgacccggaggcgaagcgccggcggagggtggcggcgtacaaggcctacgccgtcgaggccagggtcaaggcgtcgctccgccgggggttccggtggatcaaggaccgcttcgtccgccgctggtgactcgccggacggcggccggacaccttacggcggcgacggcgatatcaaccggtgatcctatcctatcctatgccattttgacgcttgtaaagccaaggttttcgatccagattcttttttttttttgctttacgtttttttgagtgttttcttgtggtaatggatgcaagaacttcgaataataacatgtatgcttgagtattgttgctgagatcatgtagcaggtaattacgtaaaaagtttttttttttgc

SEQ ID NO: 20902 - DNA, 1560 bp, Oryza sativa
  ref <308>: DATABASE ACCESSION NUMBER: AK071203
  ref <309>: DATABASE ENTRY DATE: 2001-12-06
gaattattttttcccatttcgctcacctgttcccctcctccgccctctccccaactcgccattttccccgtcttccacagtgacaaccaccaccccacgctttccccttcctcctcgcgatccagcagcgggagagatggatcggccgccgccggatcagcagcggcagaagcaggcgccgctcttctcgccgtaccagatgccccgcttccgcctcaaccaccgggtggtgctggcgccgatgacgcggtgcagggcgatcggcggggtgcccggcccggcgctggcggagtactacgcgcagcggaccacccagggtggcctgctcatctccgagggcaccgtcgtctcgcccgctggcccggggtttcctcatgtccctgggatatacaatcaagagcagactgatgcatggaagaaggtggtggatgctgttcatgccaagggaggcatctttttctgccagttatggcatgtaggcagagcttctcaccaagtataccagccaaacggtgctgcaccaatatcctcaactgataagccaatatcagcaagatggagaatactgatgcctgatggctcctatggcaagtatcctaaacctaggcgcctggcagcatcggaaatacctgaaattgtcgaacaatatcgtcaagccgccattaatgccattgaagcaggttttgatggcattgagatccatggtgctcatggctatatcattgatcaattcctaaaggatggaatcaatgaccgcactgacgagtatggtggctcactttccaaccgctgccggttcctacttgaggtaactagggctgtggtttctgccattggagcagaccgagtcgcggtgaggatatcaccagccattgatcaccttgacgcctatgattcagaccccattaagctcggcatggccgttgttgagcggctgaatgctctccagcagcagtcagggcggctcgcctacctccacgtcacgcagccacggtacaccgcctacgggcagaccgagtctgggcagcatggcagtgccgaggaggagagccgcctgatgcgcaccctccggggcacgtaccagggcacattcatgtgcagtggcggctacacgcgggagcttgggttggaagcagtggagagcggcgatgccgacctggtgtcgtacgggcggctcttcatatcaaacccggacctggtcgagcggttcaggctgaacgccgggctgaacaagtacgtgcgtaagacattctacacgcccgatcctgtcgtgggttacacggactatccgttcctcggacagcctaagtcgcggatgtaaatgtactgcgggataagtaaatcaaggatacgattgtgtattgtaaggaaaataaagggcaacggtgaggtgatttagcttatttttgggacctaatttgacggtaatttattctttcaccaaatctgatatgatccattgctgattcagtagctactctagcctatgtaaaccttgggtcatcagcacagattgtatctatatgtgtattgcataatgtttcatatcagttgtctagc

SEQ ID NO: 20903 - DNA, 1631 bp, Oryza sativa
  ref <308>: DATABASE ACCESSION NUMBER: AK071204
  ref <309>: DATABASE ENTRY DATE: 2001-12-06
gttggtctaggctgtaactacctttttttatttactttatttgtttcctgctctatgtagtgacatgctgtgttatattgctgaattataataccatcaaatagtttggagaaagtactttattttttctgctggcatgtttgaacattcacaatactatatcgtgcatatgtacctctctgttttggtcttgtcagttaaaaacgaacggagatttcttgtgctctcttttttttagtaatttctggagcttaggtttctttagcgtttgaaaggaatgaggaattgataatgatcgagatgtcgtgttatcaacttttctttcttaaacaatatactagtcatactccttttcctgtatttacagtgtcaaatctctgtcagaggatgaatggatacttgacccggttatcattgctgatatatatgagcaacaggtatatatcttcacttccatcaatacactagaaactatgcacattatgatcttattaaaagagcttttgtgtatcaatggcgttacactttccactgtattgatcttttaaagagtgtcatttgttgttttcttataaagaattataggtgatattgttattagtacatgctgacccgttattgtagatttcatagttatcatctactaggctttttatacaagttgtctctatgatctgctctgcagctctggcttgtatggtagtaactgaagcaaaaagtcctgacttacaaaacaattgtgggtgtgactctgttagttgcagttgctggctattttcacatgaagctattttttactaaatatgattgatgtaattatatgtaaaaaggtaaaaattgtaacgaactgcttggaatgtctagtaaaactatcatagcgtccattctgcgttactttgatgtgcagttgtgtacccattcctgggtcatgctgaaacacaaattggcgtgatacgcttcattaattggtgattccattttcagggccttgatttcattgtcgatggaggtactagaattgctgacccgtctactgtggttgatatgacgggaagctaccctaccatcattcgtcagggaaaggtatgcattttcattaatggactaaagttatcctaccatatgactatactatcaagcaaaaggaaatttctcattctatcccctgacatttggcaaatgatatgtactgcatttaaacacaccgttatgtattatctcgtaatgcttatctatttcatatttgtgacctatttcgttgacttatgattggcataattagctaatactggatgcttcaactgcattttatgcggtttgtataaatgcacagaggcccttatgtcttccttttcctgctttagggccctaagctagattggatggtagcggaagatgaggaacaagagtcgcgaccaacatttgcgtataaagcagcttgagtcactcttcggctgtcctatcataggaggttgtaaacttgtaattacttcaccagagcctggtcttttgactcctgaatctgctactctcagctagaccagtatatatactacatgttgtaaatatgccagggaatgtaaccaggaatcgacatagttcaccagattattttcagttcactgagcctc

SEQ ID NO: 20904 - DNA, 1130 bp, Oryza sativa
  ref <308>: DATABASE ACCESSION NUMBER: AK071205
  ref <309>: DATABASE ENTRY DATE: 2001-12-06
gactctcaccaacaacagtaacccaaccagagagcttgcggaagcgggggtttggtgcgggcgcgcgcgtgtgaggggggagagaaggccaggaggaggcgacgccgtcgcccgagggaggcaaaaatccgatcctcctcctgccctgctcgctcgctcgctcgcctgcgctgcgcgcacttggccccgtcccgtccgttcccgctcgccaggcatagaaagatggtgctctgggtcttcggctatggctccctgatctggaaccccggattcgacttcgatgagaagatcctgggcttcgtcaagggctacaaacgcaccttcaatcttgcttgcattgaccatcggggcacgccggagcatcctgcgaggacctgcacacttgagtccgacgaggaagccatatgctgggggattgcatactgtgtcaaaggggggcttaaaaaggagcaagaagcaatgaagtacttggaaagaagagagtgtgagtatgaccagaagatctctgtggatttctacaaggaaggagactctttgaagccagctgtgacaggtgtactagtctttgtatccactcctgatccagtaggcaacaaatactatcttgggcctgctcctttggaggacatggcaaggcaaattgctacagccaatggccccaatgggaataacagggattacctgttctcaatggagaaggcattgtccaacatatgccatgaagatgattcaatcatcgagctagctaacgaggtcaggaaggtgttgagccggccgaaggagaagatcactggctccgatagcccacaaaaatctcacgctctcgtacacctgtctgcgcttcctgagggcactgttgtggactcaagatagcaagctcggcggtggaagagatgagatctcctctgacctactcactcttgacgctggattgaacgagtttaacagtctgcttcgagctccctggcacactggggaaccagaatgtgctgattttctttcgcaaccgctgcggcaatgctgtaactttcattttgctaatactagagccgagactggtgtgctgctgtttcctttgacacactaaataataaagggattccatgagcttttcactcttgagctgttgc

SEQ ID NO: 20905 - DNA, 1744 bp, Oryza sativa
  ref <308>: DATABASE ACCESSION NUMBER: AK071206
  ref <309>: DATABASE ENTRY DATE: 2001-12-06
gatcgtagttttggtgcgaatttcggaggaaattcggtgggaattttcgggaggtggaggaagagagggaacgcggcgatctttgcggcgacgacgatgctgctgcggtggctggcgcggccggcggagaggtgcctggggcgaggcggcggcggcggcggagggggaggaggggatgggttgctgtggcacgcggagctgaagccgcacgcgagcggagagtactccatcgcggtggcgcaggcgaacgcggagctggaggaccaggggcaggtggtgacctcgccggcggcgaccttcgtcggcgtctacgacggccacggtggccccgaggcgtcccgcttcatctcctcccgcctcttcccccacctccacaggtttgcatctgagcaaggtggcatgtccaccgatgcaatcaagagggcattccatgccacggaggaggagttcttgcacatggtcaagcgatcctggctcaagcagccacagattgcctcggttggttcatgctgcctcgtcggagcaatcaccgataacgttctatatgtcgccaatttaggggactcgagggccgtccttggccgtagggggcctgatggtcgggaggtagtggctgagagactatccaatgaccacaatgttgcagaggaggaggtcagaaaggagctcactgagcagcatcctgatgattcacgtatagtcatctatacccgaggagtttggaggattaagggcatcattcaggtttccagatcaattggagatgtatacctgaagaagcctgaatttgctagagaccctatattccggcaatatgtttgttccattccattgaagcgacctgtcatgacggctgaaccatcgatcaaagaacatcagttgaggcagcaagacttattcttgatatttgcatcggatggtctgtgggagcagctaactgataaagcagcggttgatatcgtcttcaagaatcccagagcagggatagcgaagcgattggtgcgagcagcgctgactgaagcggcgaggaaacgagagatgagatacactgatatcaaacatatagagagaggcagcaggcggaatttccacgacgatatcacagtcgttgtggtctatcttgaccatcacaagcatggtgtgcggcctaatttgggtaacagaaacagtttccggttcaccaatgcgccggttgacatcttctccggcagctcagaagaggtggatcaccaccctctcaggctgaatcttgcaatggatggtgctgtgggttaggtttgtgtttttgcataaaaaaccaaatatagtcaaaagaaaagtgacaaaaagggtgaattctcttttctgtcacatagattgagccaaacacaactttcaccaagatatcaaaatatgggatgcatttagaggtttgaggttttgcttttcattttttacatagtgggtttgtataaagttgtcctagactccaaacgaatgtctcttctccaagcaagttgatgtttctggagaaagagtctcattccttttggagattattgtggccttgtgggggatcaatcatcaaagactgatcctcaaaacagaaaaaggaaaatctaaagattgttcctaaatcctcatggatcctttgcatatctaacaagctaaggattgttttttctttgatcctgaagatgtgtagaacactgtgaatggattcaagattccaaaaatatataaatacaacctgagattgcttgcc

SEQ ID NO: 20906 - DNA, 1731 bp, Oryza sativa
  ref <308>: DATABASE ACCESSION NUMBER: AK071207
  ref <309>: DATABASE ENTRY DATE: 2001-12-06
gcgagcttttgctcaggctcgggttcggctctcgaaacctcgagctgctcgctgagcctcgacctttttttttgacagccctacaccgatccctgcataccaaagtcggcggctacacctgactcatcgatccactactgccgccgccgcccatggcctccgccgccgtcgccgtcgcccccgtcgtctccgacctcgtcgacttcctcaacgcctcccccaccgccttccacgccgtcgatgaggcgaagcggcggctgaaggcggcggggttctcgcagctgtcggagcgggaggagtgggcggggctccagcccggccgcaagtacttcttcacgcgcaaccactccaccatcgtcgccttcgccatcggcgccaagtatgctgccggcaatgggtttcacataatcggtgcgcatactgacagtccatccctgaagctcaagcctgtctccaaggtaacaaagggaggttatcttgaggttggggtccaaacttatggaggtggcttgtggtacacatggttcgaccgtgatcttactgttgctggtagggtgattgtaagggagaagaaggatggtgcagtgtcgtatgcgcataagcttgtaagagtgcaagagccagtcatgagaatccccactttggctattcaccttgacaggaatatctcctcagaaggtctcaggattaacaaccagaatcatcttgtccctgtgctggccacatctgttaagaatgaaatgcagaaattagtggcagaaaatggttcagagtcatctgagagtaagaacaccaagcatcatccactattattgcagttgattgctaaagaagcgaactgcaagcctgatgagatatgtgactttgagctgcagttgtgcgatacccagccaagtactgtagcaggtgccatgaaagaattcatcttttcaggaaggcttgacaatctttgcatgtcattttgttcgttgaaggccctaatagaatcgacttcttctgaagaatctcttgcgcatgaatctggtgtgagaatggtggctctatttgaccatgaggaggttggatctgattcggctcagggagctggttctcctgccatgttagatgctttgtcaagaatcacagggtcttttaactcttcaaattcgaggttgctagaaaaggctattcaaagaagctttctagtatctgcagatatggcacatgccttacaccccaattatatggacaagcatgaggagaaccaccagcctaaattgcatggaggactcgtgattaaacacaatgctaaccaacgatatgctacaaatgctgtgacagcatttatttttcgggaaattgctgagaggcaccatctacctatacaggattttgctgttcggaacgacatgggttgtggttcaaccatcggcccaatactagctagtggtgttggtattcgtactgtggatattggagcaccacaattgtcgatgcacagcatcagggaaatgtgtgctgtcgatgacatcaagcactcgtacgaacacttcaaggcatatttcgaagagttcactgaattggacagcaaagttaaagtagattgctaagatgaagtagtgaccatactggatcagccgactggtggtgttgctttgacatatcctgtactgttgcaaaataaatgaacaataaattgggttacattatctcgtcacaggaatctcatggagaatatattttctggctgtg

SEQ ID NO: 20907 - DNA, 1957 bp, Oryza sativa
  ref <308>: DATABASE ACCESSION NUMBER: AK071208
  ref <309>: DATABASE ENTRY DATE: 2001-12-06
gagccgatcgtctatctcgagaaaagcccattacacttcggcccgcgagccatttcgccgccggccgccggccgccgcgacgcctcggctccccggagttcgcccgccgccgccgcgtcgaccgcggcgatctccaccccgcgacgccggcgtctgctgctcccgccgcatccccccgcttcgctcgctggtgactcttgtcacttgccatcaagccatggaagacaataatgatgaaattcttgatgggcaaaatgaagaagtgcaatcccaagtttctcttcctcaagatattcagcggattattattggtttcctacccggtaggactgttctcaagttctgcagtgtgtgcaagttctggagagactgcattgtagaacctgcttttgtggatcaccacctcaactgtgctctccgcttccgccaggccattgcctgcttcacctcagttgataacggtcttgtccagatgtacatgttgatcccatcacagtgaacttcaaaagaacagagcctgtgttctcatctaggtttcacatgtcacaaccctgcaacggcatggtgtgcgcctatgatttaaaaggtgctgctgaagttttgaatccaacaacaaggaagcatttgacgctgccagcttcagaaagtgtatatcaggctcaatattcggaatattttcttggatatgtgcactctacaaaagagtataaggtagtcgctctccgccattggataaagcacttgacatttgaagtctgcactattggcacgttgtcatggaggacggtacgtggatctgaagaggaagaactcctgaagacaacaaagccggttgttgttaatgatgaaatgcattggctacttcttgatgatgaatcatctcactttactcgaaaaatcctctcattcaacttgacagatgagaagttttcatatcttgatgtcccagacagtgtaagagaccgtgatttggaattagtcgagggggaagggaaacttcatttatggtctatgccttgtaaaggggcagcatatacagaatcagagatttggctggcagactcaacccggcaattctgggttcacttgcacaatattgcccatccctctgttttgggcacgaagccatttttcatgtacaagagcaagctctttctggggagccaaaagagattcatctatattgatattttggatgggacggtttgctacgttgatattccttctggtgaaaatatcatatcttctggcatgtttgtggagagctttgtacctgctttgacaggcacaggcttggtgaactcaatgacattattaaccggttctcgttatgctgggtcatcatcaagaggctctggaccatcttctcgtgctgctggatcttcctcaacaagaactcgacgttcacccgctgcctccaggtggtcctcagcagttgtgcaatcctccaagcgggcgaagagaacaataaacttagtgtggaagatgtatacagaaggtacaagcaagattcagcaggggctatgaaataatctctttggactgtgcagcagcttgaagctacctacctacattccagcaaaagctattggtctttgtatatgcctatggcagagaagaagcagctattagcagtttatgagtaatgcctatcttggagagaaaaaggtacaccatggaagtggtttggtaatttggacagaagataaagatcagaaaagatacagtgatatgttaatgtgtatttcacatatgttttgctttgcttaagcccctgcctatgggggcctttataccagaaaatggaaagctatatgaaataaacctgtatgattaaggtactcttgttttgatttgtagttgtaaactgtatgcctccattgcacctggagcatcagttaatcagtatatgtggcaggaaaagataaatacaaacatccttttgtttttggaaact

SEQ ID NO: 20908 - DNA, 1309 bp, Oryza sativa
  ref <308>: DATABASE ACCESSION NUMBER: AK071209
  ref <309>: DATABASE ENTRY DATE: 2001-12-06
ggtgcacatcacagccgttacagctggtcactaccaacaagtacaacacacaagtcatcacatatatatacctcgcatcgcatcgattccatcgattcgcgcggccatggcgcccgagctgtcctccccgtcgtcgtcacctcgctacaccgttggctacgcgctgctgccggagaaggtgagcagcgtcgtgcggccgtcgctggtggcgctggccgccgaccgcggggtgcgcctcgtcgccgtcgacgtgtcgcggccgctcgccgagcagggcccgttcgacctcctcgtgcacaagatgtacgaccgcgggtggcacgcccagctggaggagctcgccgcgcgccaccccggggtgaccgtcgtcgtcgactcccccggcgccatcgaccgcctcctcgaccgcgccaccatgctcgacgtcgtctccggcctccgcacccccgtctccgtcccgccccaggtcgtcgtcagcgacgccgccgccgacgcggacgagctcctcgcccgcgccgcgctccgcttcccgctcatcgccaagccgctcgccgtcgacggcagcgccgagtcgcacgacatgcgcctcgtctaccgccgcgacggcgtcctccccctcctccgcgcgccgctcgtcctccaggagttcgtcaaccacggcggggtgctcttcaaggtctacgtcgtcggcgaccgcgccacctgcgtgcgccggagcagcctccccgacgtgccggcccgccgcctcctcgacctggacgccgagccctccgtccccttcgccaacatctccaaccagccgctccccccacctgatgacgacggcggcgccgccgacgacgacacgccggccgccggcttcgtggacgaggtggcgcgcgggctccggcgagggctgggcctgcacctgttcaacttcgacatgatccgggagaggagcgaggagcacggcgacaggtacttcatcatcgacatcaactacttcccgggctacgccaagatgccgggctacgaggcggccctcacggatttcttccttgagatgctccgtggcacaagacctgttcctgagcagctgggcccgggctcgggcctggacatggaggcccgcaagctcgagcctgggctgggtatcggtctaagagaattggagtctggccgagctcaggcctagctagcactccgaggctcggtgttggcccgtcagctcggcccggcccgacccagcgtttgaacatgtgtgcattttatactttgtaaacaataatcaatgaagccaagcaaatgctacaagtgcaagctaaacctc

SEQ ID NO: 20909 - DNA, 737 bp, Oryza sativa
  ref <308>: DATABASE ACCESSION NUMBER: AK071210
  ref <309>: DATABASE ENTRY DATE: 2001-12-06
gtctccgctgccaccctccaccattctcattcccccacccctcccccctcgcgagccatggctgccgccgccgctgtaaggtccgtggcgatctcgctcttcgtcgtcgccctcgccgtggcagcgttcgcctggtccccgtcgtcgctggcgggcggcgccagccaccacctgcggctggaggaggtggccagcgccgccggcgccggcgcggcggggcatggcagcatgtcggcggccgccgggaaggacggtggcgccagcgcggcggcgcatggtagcgcgccggcggccgccgggatagacaagaacgggtacctcagcttcttcgccgccatgcgccgcgacagcgtgccgtgcacccgcaaaggcgccagctactacaactgcgtccccggcgcgccgcccagcccgtacaaccgcagctgcgagcacatcacccgctgccacggctgatcgatcacaccatcgcccctcctcctcctccgccgccgccgccgccgccgctgccggtgccggcgccggcgatgatgattcgctttgtttctttgacgacgacgacgatgtgcacgcatatgcatatgcgtgctagcgttttgtcgatggatcgatcgatcaccaggttaattaaataaaaatgacatgaaataaggtgtgtgtgtgtttgttctcgtgttgttgccgtgccactgcgttctcttattattatccatgtctactgtctcattgtattagct

SEQ ID NO: 20910 - DNA, 1396 bp, Oryza sativa
  ref <308>: DATABASE ACCESSION NUMBER: AK071211
  ref <309>: DATABASE ENTRY DATE: 2001-12-06
gggcgagcaatcccaccgccggttgccgtctccaccttccgcggcggccgcgcgtcggctgcgagtttctctggaatctctggaatccctcgtctgaccgaggaagagcggcgggggtgacgagatgtcggggttcggggacgggtacgtcggcacggctcaggacgccgtgaagatccggcggctggagaagcagcgggaggcggagcgccgcaagatcgaggagctcaagaacaagtcctccgatggccagcccggcctgctccagttcggctccagcacctccgagattcttgagactgcgtttaagaaggaaacagtcggtttagttacaagggagcagtatgtcgagaagagggttaatatacggaccaaaattgaggaagaagagaaggagaagcttcaaaagttgcaacaagaggaagaagaattgcaaatgcaaaagcggaaaaagaggagagtgaggggagatccacggttatctttctgtgatgagattgagaatggaagtgatgaggatgaatttgagaatcaagaacctcaaaagaaacatggtcctgtcaaacttgggaaggaccctactgttgagacaagttttcttcctgacagggagagagaagcagaggaacaagcagagcgagagcgtttgaagaaacaatggtcgcgtgagcaggaactgattaaaaatgaacctctgacaattacttacagttactgggatggcactgggcataggagagttatccaggtccgtaaaggtgactccattggagaattcctaagggctgttcagcagcagcttgcccctgagttccgtgaagtgcggacaacatcagttgagaatcttctttatgtgaaggaagatcttattatccctcatcaacatagcttctatgagttgattatcaacaaagcaaggggcaagagtggaccgcttttccactttgatgttcatgaggatgtgcggaccattgctgatgcaacaaaagaaaaggacgagtctcatgcgggaaaagtcgtagagagacactggtatgagaaaaacaaacatatatttcctgcatcaagatgggagatctatgatcctaccaagaagtgggagcgttacacgatccatggagattaaaaatcataataatatacagcagaaattgagagccttgaacctgcgcatgtttctactttggatttctgcaacagttattacagtaattgtacggttgtgccaaagatcattagtgtttggaaagaattcacactctaactgtatgctttttaccattttgtggaacgccaattccatgtaactgaactaatgttcaaatcaactagctgtgaatgttttcatactcgttttggatatccgtttgcgtgggagtatgggagattgcatttc

SEQ ID NO: 20911 - DNA, 838 bp, Oryza sativa
  ref <308>: DATABASE ACCESSION NUMBER: AK071212
  ref <309>: DATABASE ENTRY DATE: 2001-12-06
ttgaagcatgtgtgtagcagtaaatctgcacaagaaaaagattcaagaacagtttagatttcagaaaaagaagtgatcgatcgattgattgattcttgcacatgagcatggcgagcagtggcggctactactcctactacaacggccaccagccggcgccgtactactacggctacgcgcagccggcgagggtcgccggcggcggcggcgtcggcgggtcgcagcggccgtcggcgcacgcgctcctcctcgtcgcgacgctgctgctcgtcgccgtgaccacgctgtacgcgcggtgcgaggaggcggtggagagcctgctcgaccagctccgcgtcctcctcatcctctccccgctgctgctcatcgtcgccgtgcaggtatgggccgcgagcgccgccgccgccgccgccgaccgccgtggcgccggcggaggcctcatgtacctcctcgcgcagctgatgggcatgggcgacggcggcggctcgccgtacggccgttggcacggcggcggcggcggcgcgtcgtcgtcgccgtggggcgtggcgctggtgctggtgctggtgctgttcttggtgtcgtaccagtcgtcgttccagagctggtggttcccgctgctcagccgccgatgagaattgcaaaagctcgtgcatgtaaaaccatggtgaaaatatagcagaggcttcttggttaatcagagctaagctcggtgacgatcgagctatatataattgagcacaagggcggagctagagcgagatggagggatgccacttgtttaatttactctgttttatattaagtttaagctaatacgggtatttaaatttgtattgag

SEQ ID NO: 20912 - DNA, 1435 bp, Oryza sativa
  ref <308>: DATABASE ACCESSION NUMBER: AK071213
  ref <309>: DATABASE ENTRY DATE: 2001-12-06
ggtccacccactttctcctttctctccactttttacggatctggtgctcctcccctgccccaccgccgcctacggccaaggagtggcggtgtgcaggcgacgggcggccgacctaatcaccgcccactcccaccgggggtcgtcgtcgggtcgtggccgtatcggcgtgcggctccggcagcggcagttcagggatgaggaggagcggcggcgaggcgcatccagccacggctcggagacgaggaggttcgggcggtgaatccggtgatggcgaggcgtgtgggcggcgtgcggctattggctcgggcttcctccggtagccagcgatggcgacgctttgcggaagcggcgggcgcggccggcgacgacgacggcctgcgacggcgacggcttgcggcagcggcaggcgaccgtcctccacccggatccggcggtggcggcccggtggcggcgggaggagagcccagcggcgtagtcggcaatggcgtggccggcgacggcgacggcttgcgacggtggaggatgggggaggcgagggggaagaggcttcgtgctcctccaatcgggcgcattcgccgccattccgcccgcgctcgccgaggccatcggcgccgctgggtagggcgcgagcgtcttggaggtgatgggcggggcgcgcagactgctcgtgccggacccgaccgggacctgctcccaactcccgtggcatgcgagttgagtggtgccagatccgttggctacgactgggcaacggctgatccggggtaggcttcgtgctcactggtgctgccttctcccatgactccgacctccctctctagccgtcgccggcgtcccctgctggatgcagtcaatgtaggctcgggactcgcctgatctggggtggatcgacgaccattgggctgtcgaagcatagcagagacccaggcagagatgtactccctccgtaccaaaaaaagacaaaccctggtttccgtgcccaatgttttaccgtccgtcttatttgaaaaaattatgaaaaaaattaaaaagacaagtcacgcacaaagtattaatcatgttttatcatctaacaacaataaaaatacgaattataaaaaaattttatataagacggacagtcaaagttggatacgcaaacccaggatttgcctttttttgggacggagggagtaggttgctgcttgcaggtccgccactgcccgtggacagacagtgctcgtcgatcgcatttgctgtaggcgccagcgactagtcctgccaggcctgactggagaacggtgggatttggtgctgctgcaccctcagcggcgctggttagttcctttttttttttattggatcgatggaagttctgagctgagcttgttactattgtgcttttggctttttgtggtctcgatctagttgaacagagctgttctaagagcatctt

SEQ ID NO: 20913 - DNA, 1417 bp, Oryza sativa
  ref <308>: DATABASE ACCESSION NUMBER: AK071214
  ref <309>: DATABASE ENTRY DATE: 2001-12-06
gaaggaccccgagaggtcgtcgaatggcaactccgcctccctcgaacccgacgacgacgctccgagtcggctctcactgatcgcttctagaagcttccggaaggctccgaccccccgccatggccgcgcccttcttctccacgcctttccagccctacgtctaccagagccaggaaggatctgtgacggcgttccagatatccggcggcgatgtgcaggtcctgcaggtgatggttaagtcacaggaaaagttgaccgtgaaaccaggtacaatgtgctacatgtctggtaatattcaaacggacaacaactacttgcctgaaaatgatggaggtgtgtggcagtggatttttgggaaaagcataagcagcagtgttttcttcaaccctggctctgatgatggatatgttgggatttctgcaccatttcctgggagaatactgcctatggatctagcaaactttggtggagaacttctttgccaggcagatgcttttctctgctcagttaatgatgtgtcagtcacaagtacagttgagcagaggccgcgaaacattgaaattggtgcagaggtgatcctcaaacagaagcttaggggtcaagggatggctttccttgttggtggtggatcagtcatgcagaaaattcttgcccctcgtgaggtgattacagttgacgctgcttgtattgtggctatgacaaccaccatcaactttcagttgaaaacccctaaccaaccgagaagagtagtcttcagtgggggtaaccagcttacagcatctctcacaggaccaggcgtggtcttcatacagagcctaccctttcatcggctttcacaacgcattgcaagtagatcagtggccgctccgagcttgagggacaatcccaagttcttcatccagattgtcatgttcttcttcctcgcgtatgtcatgattgtatcatcgataattctgacagatgtttagatgctgcaacaagctactagtcgcgtatgtcttagagagtcatcaaattgaaagagtaaaatctcttgcaagtttgcaactcaaagtgcattctccaccaccgacccccttgtagatgtgtctcactggctccgtttcaagttgaaaagaaggcagtgcacaactgttgttagaaagttaaatgcaaagttcaatgaatcgttcttttgtaatacttgcagcggcgagatcttgttggtcaatgagttcaattttcacagcatatggtgaatatacactaaggagtgattatatctgcacttattggcagtacatatcgcttaatagattgtcaggattatgtaactagtaatccctccttttttaatatataaacatttgttaatgactacaccctcgtctcaaaatataagggttttttaatatataaatatttgttaatgactggg

SEQ ID NO: 20914 - DNA, 1371 bp, Oryza sativa
  ref <308>: DATABASE ACCESSION NUMBER: AK071215
  ref <309>: DATABASE ENTRY DATE: 2001-12-06
gaaccgcgaacccccaactccgacgagaacgacatggacgccggcggcgaggaggcgaagcaggagcgccacctggtgctggcccacaagctcttcctcctctcccaccccgacctcgacgacctcgccaaggtcgccctccgctccgacgccctcgacgccgtcaagtccgatggcatggcgccgctgttcgagtcgctggccgccgcgggcgtcctggagccggacgacgcgctgctcgccgagatgcgcgcgcggatcgacgaggaggtccgcaagctcgacgagaaaattgctgatgctgaagagaatttgggtgagagcgaagtgcgtgaggcccatctggcgaaatccttgtacttcatgagggttggagagaaggaaaaagcactggagcagcttaaagttactgaagggaaaactgtagctgttggccagaaaatggatcttgtgttctacactttgcaaataggccttttccacatggactttgatctcatctcaaaatccattgacaaggcaaagaacctgtttgaggaaggaggcgactgggagagaaagaaccgattgaaagtatatgaaggcctatacttcatggcaacgagaaacttcaagaaagctgccagcttatttttagattccatctcaactttcacaacttacgagttgtttccatatgatacttttgtcttctatacagtcatcacaagcataatcacattggatcgtgtatctctaaaacaaaaggtggtagatgcaccagaaattttggcagtgattggcaaagtacctcatctatctgagtttctgaactccctttacaattgccagtacaagtcattttttgttgcattctctggcatgacggagcagattaagttggatcgctatcttcagcctgatttccgctactatatgagggaagtgcggaccgttgtctattcacagtttttggagtcatacaagagtgtgacaatggaagcgatggccgcagcatttggtgtgactgttgatttcatagaccaggaattgtcgcggttcattgcagctgggaagcttcactgcaagatcgataaggttgctggtgttctggagacaaaccgacctgacgctaggaatgccttctaccaagcgaccatcaagcaaggggacttcttgctgaaccgcatccagaaactgtcacgagtcattgacttgtaaattcaatggtctacgttggacgttggaggtgtgatccttctagatccctgcaaagctccccatggacataaaccgtactgaaattgctgttctacttgtactcctaggctcatgagaacatgatctttatctcggtttgattttattgcggacagcaaaaaggttttaaag

SEQ ID NO: 20915 - DNA, 1770 bp, Oryza sativa
  ref <308>: DATABASE ACCESSION NUMBER: AK071216
  ref <309>: DATABASE ENTRY DATE: 2001-12-06
gagtctcctcggctgctactactactgcgttgtgcgcacaatgccaagcgacccactactgccctgcgtctgcgtgtgccgcgtatacgcacaagccaaagagaatttttaggcgggtagaaacaaaaatcagacccagtttcgcgcaaaaaaaaaaacaaagagaagcccgggggtaagagagagagagagaatttgggagatgtgagacggaagcaacaagcacatgagcgttttgtgattaggaacggacaaaacaaggtcataaggcggcctaatcaggattggaggagaggtctagtctccctttctagtttcccctacatgaccagcgttgccaccaggattgccacgctcgtgcgggccgcggcggcggcgagccggccattgcggctccaccgccggcccggcggcgaggatacgaggatggtggtgatcgtcggcgccacgggcaccgggaagaccaagctgtccatcgacgccgccaaggtgatcggcggcgaggttgtcaacgccgacaagattcagctctatgacggcctcgacgtgaccaccaacaaggtgagcctcgccgaccgccgtggcgtgccgcaccacctcctcggagccatccgccccgaggccggcgagctcccgccgtcgtccttccggtccctcgccgccgccacggccgcgtcgatcgcggcgaggcggctcgtgccggtcatcgccggtgggtcgaactccctcatccacgccctcctcgccgaccacttcgacgcctccgctggcgatcccttctcccccgccgccgccttccgccactaccgcccggcgctccggttcccgtgctgcctgctctgggtccacgtcgatgaggcgctcctcgacgagtacctcgaccgccgcgtggacgacatggtggacgctggcatggtcgaggagctccgggagtacttcgccacgacaaccgccgcggagcgcgccgcgcactccgggctgggcaaggccatcggcgtccccgagctcggcgactacttcgccgggcgcaagaccttctccgaggcgatcgacgacatcaaagccaacacccgcgtcctcgccgccgcgcaggtgtccaagatccgccgcatgtccgacgcctggggctggcccatccaccgcctcgacgcctccgacacagtccgcgccaggctcacgcgggcgggctccgccgccgagtccgcctcctgggagcgcgacgtgcgcggcccaggcctcgccaccatccgcagcttcctcgccgatcagtcaccgccaccgcgcagcgagggcaccaacgactacctgtacgccatggagacggaaccagagccgccgccgccgcagacgttgccgccgcggctgctccggttgccgcggatgcagtactgcgacatggtggggtgagctcgccgccgccgccgccgccgcacggcgccgcagtcacttcattgaaggcttttgggggttcgagggtttaggccgccaattttccagtgtcccggcggcgcccttctctgacactgctcggtgggcccagaaaaagtagccagtgacatagaaagaagagacaaaggtaattaacgtagagagagagaagctaagctatgcaactgatgagaagtgttcttcttcattgcagcagaatttgtgtactctttcttggagaggtggtgattcatcacatcgctctcctcctaaccgcggcactgtatgtatgtagtgagtagtactaatcatctaattatccaccgtgttcagaattttgag

SEQ ID NO: 20916 - DNA, 1301 bp, Oryza sativa
  ref <308>: DATABASE ACCESSION NUMBER: AK071217
  ref <309>: DATABASE ENTRY DATE: 2001-12-06
ggcgcgcggtttggccatggctgcggcgccgccgtccgtggcgtcgtcgtcgtcgtcgtccagccccgtcctgtcggccgcgcaccgccgccggctcaacgacgtcgagcgagacgcgttcgactacggcggcccgtgcgacgtcgacgtcgatcatgatgacgacgacggcggcggcggagtgcgccgcgggcacggcgccggcgtggcgggtgtcagggcgctgttctcgtcggccaggaggagcaagagggcgtccgtgattatcgatcaggcatggctgcggaacgtggtcgcgtgcctgctcggcctcaccgtcgtcgccgggctcgtgctgagctcgcaccgagtgagcggcgccggcggcgggaggctcgtgcagaggatggacctcggtgacggcgaagtgatgggctggacggaggagaacttgacggctgttgctcgccagtcacctgacacgccgatgaagatatggatgacgccagatagtgaaggttatggcaaatgcattgaacgcccgaagaaacatgacagaatgaacagtgcaacagctggttatataattgttaatgccaatggtggattgaaccagatgagactgggaataagcgacatggttgcagttgctaagctcatgaatgcaacactagtaatccctactctggatcacaaatcattttggactgatccaagtgatttcaaagatatatttgatgtggaacacttcaagaaaactttagagggtgacatttcgattgtggattccttgccactagcttataaaggattgaaactttatatgagagcacccacttcttgggccaaggcttcttactacagagctttctcaaggacactgaagaaggccaaagttgtgaaattcacacatacagattcacgaattgttaacaatggtcttcccccatccatccaacgactccgttgtcgggcaaattatgaggcactaagattccacaaagaaattgaagagctgagtactgctctagtagatagactgaggaatggatccaatcattatatcgcacttcacttaaggtatgagaaggacatgctctcatttactggttgcagccacaacctaacacataaagaggcagatgagctgagagaaatgagactcaacgtgcggcactggaaagagaaggaaatcaacagtagggagaggagactccaaggacgctgccctatgactcctcgtgaagtagctcttttcctcaaagctatgggctatccttccagcacaaagatctatattgtagcaggtgaaatatatggtg

SEQ ID NO: 20917 - DNA, 791 bp, Oryza sativa
  ref <308>: DATABASE ACCESSION NUMBER: AK071218
  ref <309>: DATABASE ENTRY DATE: 2001-12-06
gacaaacacttctagctcctcttcttctcccccccccccccccccttctcaccacaacctgctagcaagctcagagctagcagcagccatggcgggcagcaccaagctgcggccattcctcctgacgctgctcctcctcctctccaccaccgtggcttccatcctcgcggagtacgacccggaatgcgactgcgacaagcccaagcaccccagcccgacctcacccttggcctcaagcgccacaccgaccccggtaccatcacgctcctcctccaggacctcgtcggcggcctccaggccacccgcgacgccggcaagacgtggatcaccgtccagccgatcacgttcgcggagatgtaccggcgcaagatggcacgcgacctcgagctcgccaagctcaagaagaaggccaaggagcagcggcagctgcagcaggcggcgctgccgccgccgccgccgacgcaggtcgccgcggagttggcagcacagaagcccaagtctctcgacgagattcttgcctagatcgccatggacgcagcgcgatcgatgtgtggagtactgtggactagatataagtataactatgctgtctatgcatttgcagcacgaatgcttgaagactgaaataatgtgtatcttccgtcgaaaatcgaagcagtcgtaatactactaatatagtagtaaacgaagtaaggactctttacatgagaccttctttacattttcagagttgtcttttctctatatcggctaagtaatagctagggacagacctcccgcctccctttgtc

SEQ ID NO: 20918 - DNA, 1316 bp, Oryza sativa
  ref <308>: DATABASE ACCESSION NUMBER: AK071219
  ref <309>: DATABASE ENTRY DATE: 2001-12-06
gactccacatctgtttccatcgcgagccacagagagagggggagagagtgtgagtgtgagatcacaactactgtagtgtttgtgtgtgcgtgggatgatggggacggaggctacggcgacgacgacggtgagcggcggcagtggcagggcggcgccggcagcgctgtgcctgcaggcggcgcgcggcgcgtggtcgcggacgagcaaggtgctcgacgtcgacgccgcgtcgcccacggcggcgccgtcgctcgggtcctccgtcggcgtgccgttcctctgggaggaggcgcccgggaggcctaaggtggtggtggtcgcgccagaacacttcgcgccgccgccgccgctcgctccggctgccgacgagagggcacctgtttctcacggcggcgaggctgcgcctgcgagcggtggtgaccgcggcgacggtgacaaggcgcgacacgtcgtcgtgccgctcaagctgccgcctcggttgcaggctgcagcggcagccgcggcggcggcggattcgtcgctctcccccaacaccgtgctgcacggcccctacggtggaaacaagccgccgaggccgctgacgaggagcgggagcacggcgagccaccggaggaagccaagcgccgtcggggtgagcctctggaggaaggccacggcggcggcgagaggcaagaaacacgactacgacgcggcggctctggacgcgtcgtgccgctctccggcgtcgtcgtcctcctcctcgtcatcctcgtcgtcctcgtcgatgtcctacttcgccgacgacgaccaccggaggaaggctgacgggcacggcgacccggagccggaggccgacggcgaggagtgcggcgccaagagcacggtgaggatcacgcggttcaagaggaacaagagcctcccgagcgtgaacacttcgcacctgtgggcaagcatccgcagaagcgtcaaacagattactccatggagctagaaatcctgcaaactcccacggtacagtgtcacaaactgtacccagacatgcagatcaggaatgctacatctgcaaaatgttgagctctggaaatcacaaggacatccggatgacaaagcattcgctgctcagtgtaaaagaagaattttagtctgtaaatctgtaatgcaaggataaagggttaagttgcgaaaaaaaagagaaaaaggtcatgtactgagtgaaagaatttagagagttagatgaaccctccgctcgttgcttcgggaatttctttgtgtaccctttgtaaataccccgggatgctcaggaaaacaaaatgtaataaaccaaacattggcttggc

SEQ ID NO: 20919 - DNA, 810 bp, Oryza sativa
  ref <308>: DATABASE ACCESSION NUMBER: AK071220
  ref <309>: DATABASE ENTRY DATE: 2001-12-06
ggcaacctcgcccgcctcctgcgctcgcgtgcgccgtcgcccacctcctcagctcgcaccgcaacctcgcccgcctcttgcgctcgcgtgcgccgtcgtcgccgcagctccctctcctctactgtgctgccgccgccgctccctcccaatgacccgccggatctcctcgccggcggatccggcgcccagacgcccacctcctccgctcgcaagcgccgtcgccgccgcagctcccttctcctctaccgtgctgccaccgccgctccctctctgcggtgtcaaatatggctcggggaccgtctgattcatcaatcttggcctcccctccagttgaatcggtcgcccggatggagtcaatagggtgccgccgctgccctcttctcctgtccctctccggccgccgccactgccatcttctcctctccctctccatgagagcctcgctcagtgccatgagaagggaagggagagtgtcggcttgaccaggaccgcgatgaagacagctgcggctccgcgacaatagctgcctggtcgttcctgttctcttttttccttttcgttctagctcagtgtcatagggccatgagaaggaagtggttggaccttagttgttgatgattacaaccgtgatttgcttctaatgtgtaagccttgatttagttacagtgccagtcttgatttgcttttaatgtgtatggcattattcagttatagtgtgtaggttgtgtggagaaatttccctctgcatgtacttcaacactgtcatgtgtgatcaaactgtttagcttgaaacaacacacgctgctactc

SEQ ID NO: 20920 - DNA, 1806 bp, Oryza sativa
  ref <308>: DATABASE ACCESSION NUMBER: AK071221
  ref <309>: DATABASE ENTRY DATE: 2001-12-06
gagaacagagcactccctctcccaccaccactccacacctgacaccacgcgggctgcctccatcgtcatcgatccatctccgtatctctcaccgaccccaaatcgcacagctccagctcctcctcgatccccgtcgcgatcggcgagatggccacggcgatcccgcagcggcagctcttcgtcgccggcgagtggcgcgcccccgcgctcggccgccgcctccccgtcgtcaaccccgccaccgagtcccccatcggcgagatcccggcgggcacggcggaggacgtggacgcggcggtggcggcggcgcgggaggcgctgaagaggaaccggggccgcgactgggcgcgcgcgccgggcgccgtccgggccaagtacctccgcgcaatcgcggccaagataatcgagaggaaatctgagctggctagactagagacgcttgattgtgggaagcctcttgatgaagcagcatgggacatggacgatgttgctggatgctttgagtactttgcagatcttgcagaatccttggacaaaaggcaaaatgcacctgtctctcttccaatggaaaactttaaatgctatcttcggaaagagcctatcggtgtagttgggttgatcacaccttggaactatcctctcctgatggcaacatggaaggtagctcctgccctggctgctggctgtacagctgtactaaaaccatctgaattggcttccgtgacttgtttggagcttgctgatgtgtgtaaagaggttggtcttccttcaggtgtgctaaacatagtgactggattaggttctgaagccggtgctcctttgtcatcacaccctggtgtagacaaggttgcatttactgggagttatgaaactggtaaaaagattatggcttcagctgctcctatggttaagcctgtttcactggaacttggtggaaaaagtcctatagtggtgtttgatgatgttgatgttgaaaaagctgttgagtggactctctttggttgcttttggaccaatggccagatttgcagtgcaacatcgcgtcttattcttcataaaaaaatcgctaaagaatttcaagaaaggatggttgcatgggccaaaaatattaaggtgtcagatccacttgaagagggttgcaggcttgggcccgttgttagtgaaggacagtatgagaagattaagcaatttgtatctaccgccaaaagccaaggtgctaccattctgactggtggggttagacccaagcatctggagaaaggtttctatattgaacccacaatcattactgatgtcgatacatcaatgcaaatttggagggaagaagtttttggtccagtgctctgtgtgaaagaatttagcactgaagaagaagccattgaattggccaacgatactcattatggtctggctggtgctgtgctttccggtgaccgcgagcgatgccagagattaactgaggagatcgatgccggaattatctgggtgaactgctcgcaaccctgcttctgccaagctccatggggcgggaacaagcgcagcggctttggacgcgagctcggagaagggggcattgacaactacctaagcgtcaagcaagtgacggagtacgcctccgatgagccgtggggatggtacaaatccccttccaagctgtaatgtaatatgcgcatacgcatgacacgcccatctgttctgatcgtttggaataagaggccatagtatgacgggatggactttgtgcatatcgatgtttgatttgccatgtgctgagcctggaaataaaaaaggttatagttggagact

SEQ ID NO: 20921 - DNA, 1736 bp, Oryza sativa
  ref <308>: DATABASE ACCESSION NUMBER: AK071222
  ref <309>: DATABASE ENTRY DATE: 2001-12-06
gagcagtgattaatggaacagaagtcatccatccatccactgatccccaccttctctctccccgaagcaatcgaaatcggcgcggtgtgaaaccaaccacgccggtggatccacggcggcgcgcgcacccccgccaccgacgattgccggcgacgcgccgacgccgggagggagggagggagggagggagggagaccccgcacctgccgcttgccgctccgctgttcccatcccgctcccacctcgccgcccgcctccccccaccaacctctcctctcccctacttctcgcttccgctccacgcctcgctgcctgccgctccaccgatcgctcgctcgcttcccgcgatctcgcctccgagagcagatctggtggcggggcgtcgggccccgtcggccgatggtttccgccgcggcgcaggcgggcgtggtcgccgcgtgcgtcgtgctgttcgtccccatggggctcgccgggtggcacctcagccggaacaaggtgctcttcttctccggggcgctgttcgtctcgctcgccgtcggggtacacctctcgccttacctcccttccctcccgcacctcctcctcgccgcatccttccacccccatcccatctcgtcgtcgtcgtcgtcttcggccgcctcctcctcgtgcgtgcctctcctgcaccgcgtgtcatgggcggacgcgggtggggaatcgggcgtcggtagggcgtgggcgtggccgccgtcgctggcgtcgacctgcggcctcgcgcggctgtcgcgggacgacgcgtcgctgctgctgaatgggtcgtgggtgatggtggccggggactcgcaggcgaggttgctggtgctcgcgctgctccgcctcctgctcgacccggccgccgcggcggccgcggagccggagctgttccgccgccacagcgactaccgcgccaccgtccctgcgagggggatctccgtcgatttcgtctgggcgcccttcgagagcaacctcacgcggctgctccacgaggatctccgcctcgcgccgcgcacaccggacgtgctcgtcctcggatccggcctctggcacatgctccacgtcacggacgccgctcgctacggcgacgcattggcgtccgtcgtcgatgcggcgaagtcgctccggtcgccgctccccgtgccgccgccgcacatgttctggctcggcctgccgctgctggtgaaccacatgctcaacactgatgccaagaaagtacacatgaacgacaccattctgcaagcctacgaccttgaggtcgagcagagggggctcttgcagcgcgacggtggcccgttcctactgcttgatgtaggaaagctctcccgggggtgtgggcagcaatgcacggctgatggaatgcattatgacggcgatgtgtatgatgcggtcttgcacatcatgctcaatgcattggtgatcgagtcacaacagaggatttgattgattgggttcttgaagcaggtgtgttctcacaccctgttcttttggtccagtataatacaggggtaagtaggaattgttgtgaattaggggtgttcttttgatcgcttcaacattttggtcgcttgccagaatccatagttggattcctcaaccttagaatgtaatttaagggaatcttagaacaacactctttttctccttttctttttgggctaaatggcaagccgagctgttgtgttgtatactgtttctaggtaacaactgaaaatgatgattcg

SEQ ID NO: 20922 - DNA, 1258 bp, Oryza sativa
  ref <308>: DATABASE ACCESSION NUMBER: AK071223
  ref <309>: DATABASE ENTRY DATE: 2001-12-06
gtggtttttttttctgcctaccaactactctgcgttcctctgaagtctgaaccattacactatctcctttctctctctctctcatataatctcttggcagtattagtattagtgccgaattgcacctcttctaatctgtttccaaagcaaaattacagccaaatcgctcctcttcgtatatacttagtgccaatagaaggtaggaaagaccacatatccaggtttccttgctaggctctgctcatatcccgcaaattgagggttcagacttcataagttcgagctctgtccacaagaaaggaacaagagattgttcttggcagttggaagaagctaagaacttggcgagttggtggccaaggtgctcttggagggttcttggagcagtacaatgttggccaaaagattgaaaagatgcagcattcttctgttcgcctttctcctcgcagacgcatccgggagtcttcttgagagcagcggcggccaggccgaggcgatcggtccacagatctccccggcgacagagggcgagggcaagaggcggtcgctggcgacggggatgttctgcgtggcgctgccgaacgcggacccgacggcgctgcaggaagggctgaactgggcctgcggccagggccacgccaactgcgcggcgatccagccggggggcccgtgctacaaggcgaacaacctgccggcgttggcctcctacgcctacaacgactactaccagcgcaactccggcgccggcgccacctgcagcttcaacggcaccgccaccaccaccgccaccgaccccagttcagggcaatgcgtcttctcaggaagctccatggccggaggcaccacgccggcggcgaacgcgccgtccgccgtcggcccgttcacgccggggttcggcaacgggtcgtcgccgacgttcccggggacggggagccccggcggcgcgctgacccccttcgacgccgccgacagcgtcatgtccggcgctcgccgggcgctctgcgcgctgctgctggcgtcgccgatcttcctctccctcgttctctgatcagcagttcagcactagttggagtttgtccatgtaaattatgcatatggcattatgtcattcgttataaattcactcaccagagagagtcagtgacgactcaggagtcagagtcaccttgacatgttttattcccgagtaaatgaccagtgtttatatgtcagatgtcagattggatcatgaaattattttatttagaccattttgtgg

SEQ ID NO: 20923 - DNA, 1692 bp, Oryza sativa
  ref <308>: DATABASE ACCESSION NUMBER: AK071224
  ref <309>: DATABASE ENTRY DATE: 2001-12-06
ggccctatcgccggcggcgcagttccggcaaagctcggccgcgtgctccggcgacccaaggaggccacggaatactgagaggatcagaggaggtgaggaccctggaccgtcggagggcggaagtggagaatcttaggaggataatcctcgcagatactgaggggcagccatggaggaggaggtggaattgcctctccccacggagaagctcgccgtggatccgggcagggagggaggagagcaaggtgtggctgtgctcgtggccaccgggagcttcaatcctcccacctacatgcatctccgaataactggcaaaggatgagttgcagcagcgagggtattgtgtattgggtggttacatgtctccagtgaacgacgcttacaagaaggaggtgatatatgggattgggaaattttatgaaatgggaaagtatatcaccactgttctcttgactgagtttaaaatttggaacggattagggtctcttatctgcagcccaccgaattcgcttgtgcgaactagcatgtgaaagctcatcttttgtgatgggtgatcgatgggaggcaatgcagaaaggttaccaacgcaccttgactgttctttcaagaattcggaacgctttgtgcaaggatggtttagctgatggaggtagtctcaaggtaatgcttttatgcggttctgacctgctcgaatcattcagcatcccaggagtgtggattcctgatcagatcaggaccatatgcaaggactttggtgttatttgcatacgtagagaaggaaaagatgttgagaaaatatataatatccagcagcgagacactgagcgaatgcagggacaatatcatttcagttgatgagattgttccaaaccaaataagttcgtctagagtaaggtattgttctttcctacatttgtttgaagtttatcatggtccattattgtattcccaacatcctctattggatactggcatgcgagtccagcatttatgcacaaatcgaattatacagagaatgcataaaaagatgcctatcaataaagtatctaatctgtgatgaagtcatccaatatattggagaacacaaactctacaaggaagctggtggcagtgatacaagataatgacatggattgaagtttctggctcatctgcaaaggatgttgttaaacagttgaaggtaaagatatagatacatattttctatctattcattctccctgtttacctatagtcgagctcacaacgttgcatgtgtggtgatgccttatgtatgataccacacctgcacatgttttgatttatgctagcccattgtgcagctctggactctgtatacatgaaactccaaatattgttgtgccatgcaacattagagtcattgaggcacatgaattgttcaagtggtgttcaatgttttccatgaggccttatccaaagtttcttaaccattattaccttatctgaaactttcggagccttttagtggatatttagaaactccgaccttgtgctagggattctacatatagtgggatatgttacaaaggccattatttggccattatttgatctcatcaaaagcagccatcaagtggatttgaatcttgtaacagccatgtttaaagaggatttgaatattgtaacatccatgtttaaaggcataaatcatccttatggatatattgatgt

SEQ ID NO: 20924 - DNA, 1574 bp, Oryza sativa
  ref <308>: DATABASE ACCESSION NUMBER: AK071225
  ref <309>: DATABASE ENTRY DATE: 2001-12-06
ttgacacaccgagtcatcgctcgccggagttagagttcgtagcggcgaaggatatagccatatattatagatggcgattggtgttggtggctgctgcgccgtgctgctcgcggcggcgctgctcttctcctctccggccaccacatatgcttatgattccctggatccaaacggcaacatcacgataaaatgggatgtgatgcaatggactcctgatggctatgctgccgttgtcacactgtccaactaccagcaattccggcacatccagccaccggggtggcagctggggtggacatggcagcagaaggaggtgatctggtccatgtacggcgcgcaggccatcgagcagggcgactgctccatgtccaaggagggcagcaatgtcccccacagctgcaagaagcatcccaccgtcgtcgacctcctcccgggcgccccaatcgacctgcagatcgccaactgctgcaaggctggatcactgagcgcattcagccaggacccggcaaattctgccgcgtcgtttcagatcattgtaggccattctgggaacagcaatgagactgttagggtgccgaagaacttcagtcttatggcgcctggtccggggtatacctgtagccgtgctatgattgtgaagcctagtaggtttttaagtccggatgggaggagggcgactcaagttctgatgacatggaatgtgatctgcacatactcccaatttcttgcacaaaaggttccatcctgctgtgtttctctctcgtcgttcgacaatgacaaaactgttgactgcccaacatgctcttgtggctgccgaaatgaaaaatctactacaggaaaatgtgtaaagaagaatgcacctgatttgcaatccatcattcacggccctggcagatggacctggcagcctcttctccagtgcacttcacacatgtgcccagtgaaaattaactggcacttgatgctcaaagacaaggaacactacagagtgaaaatcactgtcactaacttgaactaccgcatgaatttcaccgaatggaacctggttgttcagtatcatcccatcctcgatatcacccagatatctggcttcaattacaagtcaatccaagtcggcaaaataaatgatactacgatgctatggggagtaaagccctactatgatttgctcatgcaagctggtccgcttggaaatgtgcaaggagaactgattgtgagaaaggatttcagggcttcttccactactaacaataacaagggaagggccttcccagtccgtgtgtacttcaacggtgataactgtgtgatgccgcctccggatgcatatccagttagtattacggcttagaggcgatcgtcaagatgattgtatcgcattactatatttatggggtcatgaataaagtgtattgtcttgcctattgaagattagaagtaactataattaaattgaatctccaactagtattaagattgtcagaggtctgttattttgcttgtagataaaattctgcctatgttaacttcgatggtgtcaaagatatcaaatccatagcagattcgtggcaggggtc

SEQ ID NO: 20925 - DNA, 1162 bp, Oryza sativa
  ref <308>: DATABASE ACCESSION NUMBER: AK071226
  ref <309>: DATABASE ENTRY DATE: 2001-12-06
cctctcccgactcccgagcgaagcagcgagaggctagaggcaaggaaggaggcagcagcagagcagagcagccatggcggccgctgctcttctctcccctcctccctctccctctccctcccccaccccgtcctcgctccaccccaggcaagccctccgcttcgcggttggcacaggaggaggagggcgcgcgcgcgccacgtcgacggggacgagacgccgcgcggcgctcgtcccgtgctcctccagcgtgagcgcgcgcggccccgcttcgggaggcgacgggttggccctggagaggaggcgcctgctgctgtccggcctcgtgtcttcgttcgtgctcgtcctcccggtttcagattcgcatgctgttgccgagatggatgaagatgtgaaaatggctacgctagttgacccgatcaatgcatattcttttctttacccagttgaattgccaggaaagaaattcacattcaaatgggtagaatccagaaaaccagaacgatattcctctgctgcaccactatctcctgatgcacggcaacgtattgtatcggagcgagttgacatgatacataacgttgtcatctcagtctcgattgggccgccaaattcacgttttccgccttccaaggacaagagcaagtgggatccaaaagatgttgctgattggattttggctgaaaaatcttcactggtgacgacaggccaacgcatgacagagagttctgtccttgatgcacactcttcagatgtcgatggagaaccatactggtactatgagtatctagttcggaaatctcctacacaatctgcaccagaaccaaatctgtttcgccataacgtagcctgcactgctgaacgagatggttacttgtactccttgaatgcttcaacactcagcaagcagtgggaatctatggggccttctttacagaaaacagtggcatcctttcacctcctaccccctacagaaaattatgttcctccataccaggatccatggagattttggtgacattgcaattcgtttcctccttttactgtttcacgttttaggtgatcttggaacatcaggttttagaacatattttcctgtaatggatgcttcagtgatgtctgcactttcagttctacaaaatgaagcctagttcagttgtgc

SEQ ID NO: 20926 - DNA, 1554 bp, Oryza sativa
  ref <308>: DATABASE ACCESSION NUMBER: AK071227
  ref <309>: DATABASE ENTRY DATE: 2001-12-06
ggagattggagaaaacccccgacgcagaggcggctggcagaggaggagacgtagcagggcaaccctgctgcgtgctctgatctgatcaatcacccatacatccagaagcctatatcaatagatacacaatcacacgccgtcgccggcgtcgggcgctgcacagcacgcaagcctgagccggcgatgaaccttaaaccacacgtacacgcacccacaaatatttgattaggagcttgattccgattaggcaaaaggagattaaattccatcggcggcaattcgcgaggagattaatcattgccggcgacgattgtgccggtgttcgtcatcaagctaatctgcatgtgctgcaggcctgataaaacatcaggggagcaaaaagatcagatgcacgccgtagtgctgcgcagttgcgtggcccggctgacagaaaagtaaagtggagtactgatgaatatgtcagccatggatataagtatccccagcggcgcatgcacacacacgtcatctttgtcaagcgattaatatgagctacaaataaatacaaggcgagcctgaccttcgtgagggttggaccgtctaaattatcaatatcaaatattggatgtggatatttatttatatataaacttgggatgagtttgagtcttattggcatcagaccaaccatgatttatacatatttatattcatgccggatgagtcacatattgcctcgtgcatgtcatgtacgggagcaattccttccctctccaaattctaccggatggacgggggatattcgctaaataaaataacgctagccatgagggcgaggcgtgcagatttaaaacacacgtcgacatcttggccgagtgttgacgagatgaaatggctggattatcattatttatgctatgtgtaagaccgacgaggccgaacgacgtattggctaaagctagcaaggctacagctattcattcatttcatttgtctatgaccgacgaggctagacgaaaccatggccgagtgccgacaaggccaggtcactatactattaacacgtctaaaacggacgggaaccggatgcaccgttgctgggcaccgacaaggcaaaagcaacaataaaatccatgtttgatgaaggccggggtacatgactgggcaccgacgaggcaaaggtcacccgcttcaccaaattctctccgcactccgacgtggtggtagtgtactgtgaccgggttttggtgaaacaaagccatccgttccacattcactgtattcaacattaaatctgcaccaacctcaaccttcggcgagcaaacaactttgaagacgacgatcataaagcgcagcttaatcggaggtattacataggctcgtcctgtggatgtaattaaccggtagcctcattgttaggcgtcgggaatcaacggactgcacgcaatctccagtcagcataccttttcattaagcattcctcacgaaggcaaaaggcgaactcctgcgggagctctcatgtatttgtaaacattcatgttaatgaatcatgattaataaaatacagggtttccc

SEQ ID NO: 20927 - DNA, 938 bp, Oryza sativa
  ref <308>: DATABASE ACCESSION NUMBER: AK071228
  ref <309>: DATABASE ENTRY DATE: 2001-12-06
aggaaaaaaacccaaccccgaattcggcggcggcggcggaggcggaggcggcgatggacccctcgtcggcgggcgcgggcggcaactcgctggcgtcggcgtcgtgcggcgacgcgcagaagcggcgggtgtgctgcttctacgacccggaggtgggcaactactactacggtcagggccacccgatgaagccccaccgggtgaggatgacccacgcgctgctcgcccactacggcctcctcgccccggccaagatggaggtgctccgcccgctccccgcccgcggcatcgacctctgccgcttccactccgacgactacgtcgccttcctccgcgccgtcaccccggagacccagctcggccaggtccgcgccctccgccgcttcaacatcggcccggactgccccgtcttcgacggcctctacgcctactgccagacctacgcgggggcctccgtcggcgccgccgtcaagctcaaccacggcacccacgacatcgccatcaactggtccggcgggttgcaccacgccaagaagtccgaggcctccggcttctgctacgtcaacgacatcgtcctcgccatcctcgagctcctcaagctccatgaggtgacgtcatcctattccgctcgtacctgtgttcctttttttttttcaatttttttctgcttttcttgtttttttttggttcgtttaatgtttcgaatagattaggagtagtactatttggatgggtggtttgtttaatttttcgaatagatagattacttgatgtgtaagttgggtgggtcaatgaagacggaagcaaaaatcatcttgacttctttctctccagttgctctgattttgttgtgtacagttcgatcgatcttccgctaaattttggatcggtaggaaatattaatcatctgtaaatgtaaatgaaatggctatctgtag

SEQ ID NO: 20928 - DNA, 1381 bp, Oryza sativa
  ref <308>: DATABASE ACCESSION NUMBER: AK071229
  ref <309>: DATABASE ENTRY DATE: 2001-12-06
gggcgaagcggccggcggctgaggcgagattcgcggcgaccacgtcggcgaggagcgcgagagtgggggccctcctcctgtccgccgtccgcattctcgtcgtgtctggtttgagctgctgctgctgctgctgccggtgggagttgggctgcttgcttgcttggtttgattggtggaggtgggaggagtactggagtaggcgagtagctgtgggttggggtcggcgagggatccgggcggcggggtatggggaacgcgagcggcaaggaaggggaggagaacggccacgtggcggcgggggccgccgccggagtggctggctcggcgggggcagcggcccgggctccgccgccgcttatgccgccggacgccgtgatgcgggagctgcctcccccggtgccctacgtcttcacgccgcaggttccagtagccccactgcatatacctactgaattttctcctgttttcaacaattcatggataaatgaatcggatgaatccaccaataaccatccccaggagaagggaattccaactttgatctcatggagtcaaggaggaaatgaggtgtttgtggaaggatcatgggataactggacatcaaggagggtgttagagaagtctgggaaagaccataccatattgctagttctgccatcaggggtataccattacaggatcatcgtcgatggggaaccgaaatatgtccctgaactacctcatgtggctgatgagggagggcaggttgccaacctcctcgatgtccatgattatatcccagaaagcctgggcagcgtggcaggattcgactctcctccgtcgcatgaacacagctatgatctccagctcccaggtgatgaggagtttgccaaggagccacctatactgccacctcagcttgtaatgtctgttcttggtgatactgataactctgaagaacaaactctgaagccaaagcatgttgtcctcaaccacctgtatatcgagaaaggatggggatcgcagtcgctgcttgctcttggagtcactcaccggtttcaatccaagtatgtaagcttcgtgctgtacaagccgctgcgaaggtcatccacggcgaagcgaacaaagaatggtggttaaactcatggtaactgacaatgtacataagtgaaatgcaggaggtcttgttgtttgatgctgatcaaagcaatcaactttttttttaatttctctctttgtttctttaataagctgttgttgtagcatgatgttttagaagcctgaactctatgagaaaatgagtcaagagagggatgaaaaaaaaagagaatatccctctatgcttacctaatgtcagtgtgcaaatttgtgtggtctgagagtaatggtgcatggaaatttg

SEQ ID NO: 20929 - DNA, 2620 bp, Oryza sativa
  ref <308>: DATABASE ACCESSION NUMBER: AK071230
  ref <309>: DATABASE ENTRY DATE: 2001-12-06
ggcgtcatcgcgatgctactccgcgtcggcctctcgcgccgccgcctcacgacggcggcgctgcccctctcgatcgccgcgcgggggcggcggctctcgacggggccttcgccgccgccgcctccgccggcggcggagtggaccgacacggtggactacctggacgagtcgggggaggtcctctcgtcggcgccgggggcgcgcgccgcggtgccgggcgccgacgcgaccatcctgtccggctcctcggcccacccgctcccgcgccccgcggcggcggcgcggctggcggcgctcgcgctccgcttccgctcggggccatccctctccgccgcgctctccgcgctgccgtcccagcccgatccggctctcctcctcctcgccgcgtcctccctccccgcctccgaccccaccccgctcctcgccctcgtcgcctgggcgcgcgtccagccatggttcgtcccctccgacgacctctcctccctcctcgccgcccgcctcgccccggccacccactcctccgaactcctctccctcttcgacgataccctcgccctccccgaccccgccgccttccccaagaccctcaacgccgttctctccgcgctcgccacccatggcctcctcgagcccgccttcttctgcttcaagcgcctccgcgacgcgggtttcagggtcctggagacgcacgcctacaatgccctcctctcgctgctgctcaccaggggcctcgccttcaaggcctttgaggtgctcgacgaaatgtcatcgtcggggtgcgcgctcgacgagggaacctacgagctcgtggtgccagcccttgcgcgcgccgggaggatagatgccgcacgcaagatgtttgatgagatgaggaagagggaggggattgggcgggcgtcggctgggatgtacggcgtgctggtggacgtgctggcaaaagcagggaggctcgatgctgctatggggatgtacagggagatggtggcggtggggcaccgtgcaagcccggcggtgagcacagccgtggtggaggggctggtgagggctgggaagttggatgcagggatggagctctgggaggagatgaggaggggagggctccgtccaagctttggtctgtacaccatggttgtcgaggcgaatgcacggtccgggaggttggatgttgccacacagttgtttggtgatatggagaagtccggcttcttccctacgccagcgacatacgcttgtctggttgagatgcatgcttctgcagggcaggtggatgctgctatgcggttgtaccactcgatggcaaatgctggacaacggccggggcttagcacatttacagcattgctgatgatgttggcgaataagaggatgctggatttggctgcaaaggtattgctggagatgaaggcatcagggttcccgatagaggtgaccgccagcgacctcctgatgatttacatcaaggaagggtcgacggagcttgcactccggtggcttcggttcatgggctccgctggcataaggaccaacaatttcatcataaggcagctattcgagtcatgtatgaagacggggctgtatgactcagcacggccattgctcgagacatatgtcgcgggggcagcaaaggtggacttgatactctacacttcgatccttgcacatttggtgcggtgccaggatgagggacgcgagcgggcaatcatggacatcctgagtgtaagcaagcacaaggcacatgacttcatgtgcgggctgttcaccgggcttgagcagcgcaagaagccagtgctctcgttcgtccgggagttcttccagggcatcgactacgacaatgaggagagtgcggcaaggtacttcgtgaatgtgcttctcaactatttagttctcatggggcagatgaaccgtgcccgctgtatctggaaggtcgcctacgaggataagctgtttgccaaggcgatcgtcttcgaccagcacatcgcctggtcactggacgtcagaaacctctccgttggcgcagcgctagtggcaaccgtgcacacgctgcaccggttcaggaagcgtatgctctactatggggtggtgccgcgccgcatcaagctagtgactggaccaacgctcaagatggtggtggcgcaggtgctggcgtcgctggagtccccctttgaggtgagcaaggtggtgctgcgggcgccaggtgactcggtgctcgagtggttcaagaagccgatcgtgcagcagttcctgctcaacgagataccatccaaggctgacgtcctgatgcacaggctcaacgtgatgttcccaagttcggcgccggaggtccgatcgctctctatccccaggtcccttagtatgtcaaggtgatgatgtctatctctgtagtacgtcgttttagcttcattcaagaagaatccatattggcatattgtatactagtataacttttttgtccaaccatcagagtgagaacgttacccttgtccctgtgtacaagtacagtaatgctttattgcaaaatgcaaatggctcgttcttggataggagtcagtgacccattccattccattacacaatatacatgtgtgttgcaacgctatattaaacacagattagtacaacg

SEQ ID NO: 20930 - DNA, 1729 bp, Oryza sativa
  ref <308>: DATABASE ACCESSION NUMBER: AK071231
  ref <309>: DATABASE ENTRY DATE: 2001-12-06
ggctcaccttcaagaaccggcttctctgccggttggtgaagctgtttacagtggctacaaattcatctctgatttatctggaaaaaacccgtttcgaatttcgccttgattttatcaatggcaagaactggtcgctctggtgctcatgtcattttcgctctggtcgatggccagggcagaggggcctgaatgaaccaggccgggaatccaagaacgtctctgccgggcagtgctggtccgtagtccgtccagtgacaaaatactgaaaatattcgtgtggctcttccagcttatgatcattgtcgatgatgctggagcttttctcccagcactgaaccactctccatgggacggcgtaaccattgcagatttcgtcatgccattcttccttttcatggttgggatctctctaacgctcgcgtacaagagggtgccggacaaattggaggctactaagaaggctgtactacgtgccctcaagttgttctgccttggccttgttctccaaggcggttttttccatggtgtccgcagtctcacttttggtgttgatattacaaaaatacggttgatgggtatacttcagagaattgctatagcttatcttttggctgcaatctgtgaaatttggctcaagggagatgatgatgtagattgtggactcgatgtgatacggagataccgttaccaattggttgtagcattgctcctgtcaaccatgtatactgttattttaaacggtgtctacgttccagactgggaataccagatatcaggtcctggttccacagagaaatcattccctgtgagatgtggagtaagaggagacactggtccagcttgcaatgccgttggaatgcttgaccgtacaatcttggggatcgatcatctctacagacgaccggtttatgcgcgtacaaagcaatgtagtataaactatccgcaaaatgggccccttccacctgatgctccatcatggtgtcaggctccatttgatcctgaaggcctcctcagctctgttatggcaattgtcacatgcttgattgggctgcagtttggacatataattatacattttgagaaacacaagggaaggataataaattggctaattccttccttcagcatgttagcactggccttctcaatggacttcattgggattcgtatgaacaagccgctgtacacgataagttacgccttggctacctctggtgctgcagggcttctttttgctgggatctacacactggtggacgtgtatggattcaggaaacttaccatccccatggagtggatgggtaagcacgcgctgatgatctacgtgctagtggcatgcaacatcctgcccattttcatccatggtttctattggagggagcccaagaacaaccttttgaagttcatcggagttggggcatgaagctttcgtctgcgcaacagtacttaggccatagataatttcctagataattagacatccgtatataagattatttggatggccaggatatggagataaaaaatgttcaggccgtgttattttttctacgtggttagagaacggcaatgttcagcttctgacactactgaacaatggtcgttgccacatgccagagcgtatcctccctgagctcttctgtatatatcaatatatgttgaggaggctcttgtatatgattgacgcgctctgtgattcagatgaatatatatagtacatattctgacg

SEQ ID NO: 20931 - DNA, 826 bp, Oryza sativa
  ref <308>: DATABASE ACCESSION NUMBER: AK071232
  ref <309>: DATABASE ENTRY DATE: 2001-12-06
ttggcgcctcctctgcatcgccgcgagtgcgcgtcaggcgcctccccgccgcatcgccgtgcctcctccgcatccctcccctacgcgcatcctccaccctggtccctcgcctccgcctgcgaggaggaacgcttcgccgggcgcctctcctcgccttttgcagagtattttaaagacaaatggtgtagctcgccagggactgcatttgcgtcactcgtccgcgccgccataactgcatcgacaagcctcgccgatctgcgacgccataactgcatcgacaagcctcgccgatctgcgacgccataactgcatcgacaagcctcgccgatctgcatcgacgcactgccaccgcatccacctcgagcgtcaacgccgccaagaggtaaaatcccctcgacaagctgcttcagcgaccggtatcctcggtctccgcctcaaccgccgccgccgccaccaccggatccctgcatcgtcgattctactgcacacctgcgagcatagcagtggatgtgagggtgtcgtggtcctgctacaaccctaacaagtgaaactagccgttggagtgcttctttaagtagacaaggcataatggagaatatgggtgagacattaatttgttttttctcaaatttgctaactgactaagatggaatactggataacataatcatcccgtgtgaatatctccaaagaactggataagggctcattcagatgtatatgtcattggttgttcaacacattaattatgcattgatgactgattggtgatgattgtaccttatgcgcatcacgctgacaagtaacttgagatgtttatatttgc

SEQ ID NO: 20932 - DNA, 1031 bp, Oryza sativa
  ref <308>: DATABASE ACCESSION NUMBER: AK071233
  ref <309>: DATABASE ENTRY DATE: 2001-12-06
ggcccgctcgcgcgctacttccccgccgacgagcagcggcgattcctcaacgcgcaccacctgttcggcgtcagcaagatccagaagacgctgcgggacacgccgccggagctccacgccgacgccatgcaggcgctcacgttcgaggccaacgcgcgcgccagcgaccccgtcggcggcgcggcgcgcgtcgtcgtcgagctctgccgccagtacgagatgctgcacgccgagctcgccgccgtccagcaccacctcaagctctgccgccagcagcacgccgctgcggcggcggcggcagccaacgatccactcgtcgcgaacgtcgacccgctcgctgacccggcagcggaaatgctcttcgccggcgccgtcgtccctaaccagaacgacgacgccatggtcgacgcgttctacgccgaccaacaaaccgccggcgacggcgaccaagagcaatacctcgtcaaggacgaggcactagctgcgcaaccgccgccgcaacaaccctacgagtacttgaactacgggacggccggcgacgagggcagcagccacgcctggtacaccggcaacggcggcgacgccgacgcctcgccgccgatgggtttgagcgatcagctccagcagtgccagatcggggccgcgccgccgttcgatgtgaagcctgagctgccggcgacgatggaacacggcggtagcgtgttcgtcgaacagccggagcagaagattctgccggcggcagggtcgtcgtcgtcggcggcggcgcattgccagctggagcttgggtgctcttctaatgcttggaaagttggaacacacgttattaattaattaattaattagtttctcgatttgattgattcggatatgatgaaatgcttgttgcatttcaaattttggcttgttgagttaggagttaattacaaaaataatcactagactagcttataaatagtcaagttttaattaatagtagatgatgtatctatgaatgagagtgcaaataaaaggctctgtctattaatgaggtt

SEQ ID NO: 20933 - DNA, 2014 bp, Oryza sativa
  ref <308>: DATABASE ACCESSION NUMBER: AK071234
  ref <309>: DATABASE ENTRY DATE: 2001-12-06
gggtgcagtgtgcgtgagtcatcgcggagtcgtcagtgtttcatcgtgtgcgccgcgccgctgcgtgcagtgcgttgcgttcctccactcccgcggcgaccgcttcaactcgcgcatctcgaggaggccggctcggctgctgcgcctcactctcactctcactcacactgcagtggtggtagtggtaggcaatggcggcgccggcgccgaagcaggaggaactgcagccgcacgcggtgaaggaccagctgccggccatctcctactgcctcaccagccctcccccatggccggaggccatcctgctcggattccagcactacctcgtcatgctcggcaccacggtcatcatccccaccgcgctcgtcccccagatgggcggcggcaatgaggagaaggcgcgggtgatccagacgctgctgttcgtcgccggcatcaacacgctgatccagagcttcctcggcacgcgcctgcccgccgtcatcgggggctcctacaccttcgtcgcgcccaccatctccatcatcctcgccggccgctacaacggcattgccgatccccacgagaaattcgtgcgcatcatgcggggaacgcagggcgcactcatagtggcctccacgctccaaatcatcatggggttcagtgggctctggcggattgtcgtcaggctgctgagcccactgtccgcagcaccattggttgcgcttgttggatttgggctctatgagcttggattcccaagtgttgccaaatgtgtggggattggccttccacaaatcatactgctggtggctctttcccagtacatacctaagctggtgcctttgttggggactgcgttcgagcgtttcgccatcataatgtctgtggcccttgtctggctttacgccttcttcctgactgttggtggggcgtacaagaatgctgctccgaagacacaatttcactgtcgaactgatcgatctgggcttgtagggggtgctccatggataagtgtaccttacccattccagtggggagcaccaacgtttgatgctggtgaagcttttgcaatgatggcagcttcttttgttgctcttgtggagtctactggtgcattcattgctgtctcacggtacgccagtgcaacaccatgccctccttctgttatgagtcgcggcattggttggcagggggttggtattttgctgggtggcttatttggaacagctaatggatcatctgtatctgttgaaaatgctggtttgctaggtttgacacgtgttggcagcagacgtgtggtgcagatttctgctggatttatgattttcttctctattcttgggaaatttggagcggtatttgcttcaattccaggcccaataattgcagctatatactgtcttctctttgcatatgtcggtatggcaggagtagggttccttcagttttgcaacctgaacagcttccgaacaaaattcatcgtgggattctccgtgtttatgggttttgtcggttccacagtatttcaacgagtacacctctgttgcaggctatggcccagtacacactcacgcaagatggttcaatgatatgatcaatgtggtattctcgtcaaaagcattcgtcggaggcgctgtagcatatttgttggacaataccctccagaggcatgacagcactgccaggaaggaccgggggcaccatttctgggacagattcaggtcgttcaggacagacccacgcagcgaggagttctactctctgcctttcaacctcaacaagttcttcccatccttctgattttgcacgccagtgttttgtatcaaattgggatagcattgtagtacgattagttcttgggtaagtaattctagcattgccagattgttgtttctcctagtgtttttatactcctgagttctgaatcctgcagaccccagtgtaaaactatctgaggaaggagaaatgactcggtatttttgggtgtatattagttcggattaacagttaaatcaacaaactgaaaatgcct

SEQ ID NO: 20934 - DNA, 2221 bp, Oryza sativa
  ref <308>: DATABASE ACCESSION NUMBER: AK071235
  ref <309>: DATABASE ENTRY DATE: 2001-12-06
gagtagattgccaaggccttactgctgcttctgtttcttgccaccaatggcggtgtcctcgccggacaggagaaggaattggctccgcggacaccgaaagcagatcatcggagactacctcgccgaggctcgggctgctctcgccgccgccgccgccgcgccgctggatggggaaggtggcgagcactcagcggctacggcggcgcttggactagtggaagcggtgctagagatgtcgccgcgcatggaggccgctctcgagctccgggcgcgctctctcctcgcgctccgccgctaccgcgccgtcgccgacatgctccgcgactacatccccagctgcaccaagccctgctccgccgatgatacctcctcttcctcctcctcctcctcctcttgctcctccgcctcccgcaccgacctgctctcgcctgcccgtgaccgctccgacgctgcctccgccgcctcccgcttcctctgctgcttcgacatttccgacctcaagcaccgcgtcctcgccggcttctccaagaacaccagcgccgacacccagtggaggtacttggtcttgggccaagcttgcttccacctcggattaatggaggacgccgccgcgctgctccagaccggccgccgcctcgcctcggccgcgttccgacgggagagcgtctgctggtcggaggacagcttctcgccgtccaacctcacggccaacgctatctccgcgccggcgagtcgaagagcctccaagtccggcgcggcgggaagcgaggcggagtccgtgtcgcagctcctcgcgcacgtcaagctcctgctccgccggcgcgccgccgcggtggcggcgctggacgcggacctccccgccgaggccgtgcgccatttctccaaggtgctcgacgcgcggcgtggcgtgctcccgcacccgttcgcgaccgcctgcctcgtcggccgcgccgaggcgctccgttccagcgggcgggcagccgacgccatcgccgactgcaaccgcgcgctcgcgcttgacccggcgttcatcccggcgctgcgctcgcgcgccgaccttctcgagtcggtaggggcgctcagcgactgcctccgcgacctggagcacctcaagctcctctacgacgcggcgctccgcgacggcaagctgccggggccgacatggcggccccagggcggcgttcgcttcagtgagatcgccggcgcgcaccgcgcgctgaccccacgcatccagcagctccgcgggcgcgtggccggcggcgaggcgtgcagcgtggactactacgccctcctcggtgtgcgccgcggttgcacgcggtcggagctggagcgcgcgcacctcctcctgacgctgaagctcaggcccgaccggtgcgcgtcgttcgccgagaggctggagctcgtggacgagcaccgcgacctggaggccgtgcgcgaccaggcgcgcatgtcggcgctgtcgctgtaccgcatgctgcagaagggctactcgttcatcatgtccgtcgtgcaggacgaggaggccgcagagagacagagggccaaggacgccgccgccgccaccgccgcggcagcagcagcagccgccgcggcagcgttggcgcgcgagcaagaagagaccgccgccgtgccggagaaggccaggatcagtagtgttagtgtgcctagcacgaatgttcaggttcaggtaactcaggcagcagcaatgccaacagctgccatggcggcggcggcggcgatgggaagtccggtgttccagggcgtgttctgccgcgacatggcggtggtggggaccctgctgtcccgtggcgggttcgaccggccgataccggtgaagtgcgaggcgatgagctgctgatgaattgctagtgcggccaggacggaggaagaagaaggtggcgggaaaacagagagcaagtttgaagcgaagcgttggtttggttccaaatctggacaagttgtgtacagctcgaaatggcgctttccagcggggaaaacgacccacagaaggcagttgttgaaaaattttggatttgtctcgttttgttgtgtacttgtagagtctgttaagtattgtagctctagtttccttgtgaaatctggtcccttctctctctctctctctctctctctctctccctgtagatgtccatgcaccatgctaggctaccctcttggtaatgcaaattttgtacagatttcaattcagagttattttatc

SEQ ID NO: 20935 - DNA, 772 bp, Oryza sativa
  ref <308>: DATABASE ACCESSION NUMBER: AK071236
  ref <309>: DATABASE ENTRY DATE: 2001-12-06
gtccatctcgcgatcggtaatgacgacgacgaaccacctcgtctcccccgcgctgctgctgcttctcgccctcctcggcgcatcggtccggcgtgccggcgccaccaccttcgaggtcggtggggaacacggctgggccgtgccgccggccaaagacgccggcgtgtacaacgactgggcgtccaagaaccgcttcctcgtcggcgacagcgtccatttcaagtacgcgaaggactcggtgatggtagtgacggaagacgactacaacaagtgcaaggcggagcacccgatcttcttctccaacaacggcgacacggaggtggggctggaccggcagggcctcttctacttcatcagcggcgtcgccggccactgcgagcgtgggcagaggatggtcatcaaggtcatcggccacgacgcgcctccgccggccagcccgccgccgccgccgtcgaacgctccccctacaccgcctcaccccagcggcgccgcctccgcgctaggcgccggcggactcgccgtcgcggccatgctgctgccggtcttcgtgtacggtgtctgatggtcaccgtagctgcatgcacctgcgtgcatgcccgatcgaattgatatcgtcttgtagattgtcaggtctttgcgagtgttatgcttagtgatttttgacgtgctcgttcattgcaatctcgtgtaattcttacttagatttttttttttttgtatttggaattgactttggataatttatttgtgactttgctgaatgttgcatccc

SEQ ID NO: 20936 - DNA, 1138 bp, Oryza sativa
  ref <308>: DATABASE ACCESSION NUMBER: AK071237
  ref <309>: DATABASE ENTRY DATE: 2001-12-06
ggccgagacagcctcgcctttgccctactcgtctccttccttccttccgccgccgccgccgccgccgcgagggccatggggtacaccaaggagcagctcctcgcgcgactccaggagctcaacattgaattctcgtgctacgatcacccggttgtgttgacggtggaggaacaggccaaacatgttgggcatttaggaggtgctttgagtaaaaatttgctactgaaggacaaaaagcataggctgtacgttgtttctgcccttgctggcaccaaagttgacatgaaaattttatcacagcgtcttggtttgggaaaaggtggtctgcggatggctcctgaggaaaatttgcttgaagtgcttcaggtacccttaggctgtgttactccatttgcactacttaatgagtctgcaagtgctgtctcactactactggaccaaggtttcaagtcaaaacagagctgctacttccatccactgacaaatgatgtgacaatcgctctcagctcaagcaatctggacaagtttctcatgtccattgggaggcaaccagcttatgtagacttagaggcttcaccagttgtaggcaaggataatcctcctgatctagcagattttgtaccatcaggtgtcccaaattctgcagaaccaattgagaaggtcacacctacaaatgttcctcgtcaaaatgatgtgcccaaagagaaaacatgtcttcctgtgaaggctaagcctaaagttcagaacaagggtgcagaaaagacgcagagcaagatacctacaaacggagctaatgttgagaaatttgtaaatgatgtatttgacatcatgtccccgttgttcctttctgaggtatcaaagaaactgaatgttaagcaggaagaactttcttctatatttgatggctttaaagaacaagccactattgatttggagagtgtaacgacgagtctgaagaatgcagcatacaccgctggatttgaggctggcttcgagactatgctcaattcaggtttaaaaggacaggcttctcggaagtaaattgtttcttttaatacaatggacataagtcgattcagtgaattttgtatgacatttagtgtaaaatcgatcaaattataaattatgctttcctttg

SEQ ID NO: 20937 - DNA, 1035 bp, Oryza sativa
  ref <308>: DATABASE ACCESSION NUMBER: AK071238
  ref <309>: DATABASE ENTRY DATE: 2001-12-06
gaaacagaacgcagtacacgcagatttgttttcctttcttctcccagcgttgagttcgccgccgggcgccgggagccgaggcccgagagagatgggattcatcggcgatacggtggagtcgatccgctcgatacagatccgccaagtcctcgcgcaaatcatcagcctcggtatgattgttacctcggcactgatcatatggaagggattgatggttgcaacggggagcgagtccccagtggttgtggtcctttctggtagcatggagcctggatttaaaaggggcgatatcctttttctacacatgagcaaagatcctatccgcacaggagagatagttgttttcaacattgatggccgtgaaattccaattgttcaccgtgtgattaaggtccatgaacgcgaggaaagtgctgaagttgatatcctcacgaaaggtgataataattttggggacgaccgtcttctttatgcacatgggcagctttggcttcaccaacatcacattatgggacgggctgtaggctttcttccatatgtcgggtgggttacaatcatcatgactgagaaaccatttataaagtacctgctcatcggcgctctgggcttgctggtcattacatcgaaagagtaaaacatcaacttcacccaagaatttagcgcaaacattagaggccagtggcttatacactccttagggaagataccttttgtttcaccatgttattgggaacaaaaagacatgcttgcaccaatggatgaaaaaaaaacgtttattctggatctgatgtaacatctcctatagtcctagttaaagattaaatatgatttattgcgttggatgaaatttacttataaaaaattccttgtatgacactaaactagtactatgaactatgaagtggtcaatggttgtgaccagtagggcgcctcaggctttttcacttgtggtagatgttgacaagtaactgatgaagagagatgagctctgtagctattgacaactgaagagtaaagttgagttttagtcactgt

SEQ ID NO: 20938 - DNA, 1304 bp, Oryza sativa
  ref <308>: DATABASE ACCESSION NUMBER: AK071239
  ref <309>: DATABASE ENTRY DATE: 2001-12-06
gcggaggaggagtgcttcccagctcattccgccgaggtcgtgagagctgctgagcgtggagattttttctttaaaacttttttgggtgatttgctggaatgggggatcatgttgcggtggatgttggggggctcatggcgtcccggggcgccggcgagggggaaacgggggcgctgattgggatggtggaatgccgcatttgccaggaggaggacctcgccaagaacctcgagagcccctgcgcttgtagcggtagcctcaagtacgctcatagagaatgtgtgcaaagatggtgcaatgagaaaggagacataatctgtgaaatctgccacgtgtcatacaagcctggctatactgccccaccccaggtacatcatgatgagactactatagagatcagtagtggagattggtctatctctggcaatcggttggatttacatgatcctagaatcttggctatggctgccgctcaacaccgtttacttgaagatgagtatgatgaatatactgcaacaaacaacaatgctgctgccttttgccgctccatatttctaattctaatggctcttctactcttaaggcatacactaaccattactagtagtgatgatgaagatgacgcatctgctattttctcgttgtttcttttgagggctgctggatttttgctgccatgctatatcatggcttgggctattagtatcatgcaacgtcaaagacaaagacaggaagaagcaatgcttctaccaactgaagtggcaatcatactccaccgaaatggaaggactatgcaattcgccgtagcgccagaatctcctaccacacctcatccagaacaagggcaatagaatttgctggcaacaggcatatcttgtgagtgcatacaagataccttgagccttctacaccctgactctgtgtacactgcaagccggttgcaccagccactttcaatggccaaattgcagcaaaaaagtgttgcgtgtctatctctcgatttgcataaactttgcagctaggcttgaatgcttttgtgattggctttcagcttcttctgcacataaagagattcctttcaataaatgaatataagctaaattaacaagaagaattcttgttccagggtcactagacttgttcatggcttcgtgctgcgacgggccagctactgttccaacaaatccggagcttttttttttttcgtcttggtctgtttaccaattccttctgttttgagaaccacaattttcacgtctgtggaagcctgtaagctctacacacgcaagccatgcttcaattgc

SEQ ID NO: 20939 - DNA, 809 bp, Oryza sativa
  ref <308>: DATABASE ACCESSION NUMBER: AK071240
  ref <309>: DATABASE ENTRY DATE: 2001-12-06
gtagcgacaagatcgagaagccacaaaccccagcgcgatccgaggtagaagaagaagaagaagaagaagaagaagaggcgatcgagagatggagagcgccatgttcgggctggagacgccgctgatgacggcgctgcagcacctgctcgacatccccgacggcgagggcggcgccgccgggaagcagggcgcgaccggtggcccgacgcgtgcgtacgtgcgcgacgcccgcgccatggcggcgacccccgccgacgtgaaggatctgcccggggcgtacgcgttcgtggtggacatgcctgggctcaagtcctccgacatcaaggtgcaggtggaggaggagaggctgctggtgatcagcggggagcggcggcgcggcggcggggaggaggagaaggaggagtcgtgcaagtacctgcggatggagcggcggatgggcaagttcatgcgcaagttcgtgctccccgacaacgcagacgtcgacaagatctccgccgtgtgccaggacggcgtgctcaccgtcaccgtcgagaagctcccgccgccggagcccaagaagcccaagaccatcgaggtcaaggtcgcgtgatgagattccgcatctctctgcatctgcgtcgctgcgtggatcaaagaatcgaagcttgagttgagtgagttgtgactagtagtatgagtagagtgttcatctttatcgtttgctacgtgagaatgtgaggacatggtggtctgtatgccgtatgcgatgtgatgatgatggatggtttgatgtttggtaatggaaatggggatgttctgctgcttatctg

SEQ ID NO: 20940 - DNA, 1171 bp, Oryza sativa
  ref <308>: DATABASE ACCESSION NUMBER: AK071241
  ref <309>: DATABASE ENTRY DATE: 2001-12-06
gagttgcattcgtcatcaagattagtggtgcttgtcctggcctcctgggccactgagtgcgatcctggagattcgttttgattattatccttatccttacagatctatgatatcattgaagagcttatcactaaggggcagcaacttgatgctgtgaactttgcatatgaggctggtcttcaggaaaaattccccccagcccctcttttaaaagcctaccttgaagattcaaagaagataccctcaaattcagataacctgagtactagcactggccaatctgggagcgatgccaataagaaggagcagtctgcactgcgggctgttataaagtgtgttgaggaccacaaactcgaagctgagtttccattggaggatctccgtgagcggctggaagaactggagaaggccaagaccgagaagaaaaaggcggcatcaagcagttccagcggtggtagctctggtccagccaacaagcgcatccgggcaagcaccggaggaccgatgccccctgccaaggcaggccgtctcaccgactacaccggtacaccgtcttcgcctgccaccaccacgaccaatgccacattcattcgctccccgtcccatgcctcctacggtacagcatctccttactcttatgataggccagctgcacaccccctctactgtggccagaacacactggcaatgagggagccctatgcataccaccacccatctgaggtatccagcgtcggcctcggcatgtcatacccatcccctcccataacctacccggcctatgctggatacagcaatggaatcggctacagcaatgcaatggccccagcctttcaccaccaggcttactaccggtaggatcagtcgaagccgatgaaatgacaatgagctgaatcgctgatggtggcagggcggctcgccaccatggccatgttttgtagtgactgactacaacggtaggtgggtgggggcgtgtgttccttaatactagaagatgcttgtgttggttagttctccccgttattagctgctctcgctacttcgcactgaagaaactgaatgtaaattatggacgtgttgtccctggaccctcgtcgtcatcttgtgttgtaattcagtctaaaccactctaaaacccacaaaaaaaaaatccggcatgtaatcttcaagc

SEQ ID NO: 20941 - DNA, 1153 bp, Oryza sativa
  ref <308>: DATABASE ACCESSION NUMBER: AK071242
  ref <309>: DATABASE ENTRY DATE: 2001-12-06
gtgtagggtgcagcctgatgtcaccgctcccggcgtgaacatcctggcggcgtggccacccatgtcgtcgccgacggtgatcccgctggacaagcgctccgtgacgtggaacttcgactcgggcacgtccatgtcgtgcccgcacgtctccggcatcgtcgccgtcgtcagggccgtgcacccgacgtggtcgccggcagccatcaagtcggcgctgatgaccacggcatacatgtacgacgacacgtccgacgtgatgctggccggcgggacgctgaaggcggcggacgcgttcgacgtcggcgccggccacgtcgacccgctgcgcgcgctggacccgggcctcgtctacgacgccggcgtgcgcgaccacgtcctcttcctctgcggcctcggctacaccaggtaccagatacgccagatggtgctcccctcgccgtcgctcgacacgagctgcggcggcgagggcggcggcgcggcgccgccggagtacgacctcaactacccggccatcgtgctcccgcggctcaacgcgacggtgaccgtgaagcggacggtgacgaacatggggccccggagggacgccgtgtaccgcgccgccgtcgtcagcccgcacggcgcgcgcgccgccgtgtggccgccggcgctgtccttctccccgtaccgcgacacggcctcctactacgtgaccgtcgcgccggcgaagctgtcgcgcggccggtacgacttcggcgagatcgtctggtccgacggctaccaccgcgtccgcacgccgctcgtcgtcagggtcaccaccatgcccgacaccgacaccggcgtcgacgtcgacgtcgccgccgcgcgcgccatggacacggctactgccacccagctgcaggattcctagctcagcttgttcagaaacctggtttcatctggtcatcaaatcatcagactacaaaaattgagatctttttgggtgtggatttctcgagcttggagttaaaatttcttcggacaagtagccactaggtgtcagtgtgtcactggtcaagtactactaaatgagcaaatttctggatgctactattactgtcatttctatggcggctaatgatgcaagaattatttatatgtatgatgatgtgagtaattaaaaatttgatgattcacc

SEQ ID NO: 20942 - DNA, 1121 bp, Oryza sativa
  ref <308>: DATABASE ACCESSION NUMBER: AK071243
  ref <309>: DATABASE ENTRY DATE: 2001-12-06
gatggagcccgacgcctcctccgccgccgccgcccaaaaccctaaccctaaccctagcacggggctgccgcccatctccgccgtcatccgctccagcagggccaccaccatgatggagctcgagatcgagctcaagaaggcatccgacaagctcaagtcttgggatgccacttccatttctttgtctgccgcatgtgatttgttcatgcggtttgtaacaagaacatcacatttggagcatgagaagtttgatgctgcaaaatcacgcctaattgagaggggagaaaaatttggagagatatccttaaaggctcgtaagacaattgcaatgctcagccaggattttatttcagatggttgtactattctggtacatggttattccagagttgttttggaagttctaaagctagctgcatcaaaccgcaaactcttcagggtactttgcacagagggcaggccggacagaactggtttacgaatgtcaaatgaactggcagcattaggcattcctgttaaggtgctaattgattcagctgttgcttattccatggatgaagttgacatggtgtttgttggtgctgatggggttgttgaaagtggaggaataatcaatatgatgggcacttatcagatagctctcgtcgctcacagtatgaacaaacctgtttatgtggctgctgaaagttacaagtttgcacgcctatatccgttggaccagaaggacatgacaccagctcaccgacccattgattttggagttccaattccggctggtgtggaggttgagacttcagcgagagactacactcctccccagtatcttacgctgcttctgactgatctcggtgttctgacaccatctgttgtgagcgatgagcttatccaactatacctatgatcactggtacggagatatgatgtaccgatgtaccgccgtggaatctaaggttttccctgtcagttttttgctatgttgtatttgccctttacgtggatgcaatgtttggaggattcacaaaagggttatgcaacagaagataaccccagttttgtctaaagcatctatctggtgttaatagttttggtgttggttgcgaagatggtctggattgcatttt

SEQ ID NO: 20943 - DNA, 4431 bp, Oryza sativa
  ref <308>: DATABASE ACCESSION NUMBER: AK071244
  ref <309>: DATABASE ENTRY DATE: 2001-12-06
gtcttctcctccgaggcgaggcgagactccgattctagcctacctcgctcgctcgctcgctcgctccgtcttgtggtcgccgccgccacgaagaccaaaccctcgcaaattgcaatcgaagaagaagaagaagaagaggagccatggatggcggcggcggcggcaactggaggcccacccagggggccgaccccgccgcctctgggggcatcgatcccaacgccccggcccccgccctcgccggcggcgactggcgctcccagctccagtcggaggcccgcaacaggatcgtcaacaagataatggacactctgaagaagcatctaccagtatcagtgcctgaggggttgaatgaacttcaaaagatagcagtgcgatttgaagagaaaatctatactgcagccaccagccagtctgattacttgcggaagatttctctaaaaatgctctctatggagacaaagactcaacagaatcctggaaacgcccaagtgattcaaaaccaaaatccccctggctcagtacctggactccctcaaggcagtaatccaacacagtcatcagcgatccctttgatgtctcagcaacaggcccggcagccaaattctacgtctgtccaatcttctcttactaatcttggtcagaacttgccaggtgtcaaccagacatccacactgcagaacatgtctggcatgccgcagaacactatgaataatggcttggcacaaggcgcttcacaagatatatatgctacgcaaaggcaaatggcaggaaggcagcagcagcagcaacaatctcagaaccaattaatttaccagcagcagcaaattatgatgaagcagaagttgcagcaaaattcacttatgcaacagcaatctttgttgcagccaacacagatgcaatcctcacaacagccaatgatgcaaataccatctagcctccaacccgggcagtccattccgcagacacaaccaatggtacagtcatcatctcagggtggtattcaacagaatgctttgaactcggtaccacaatctgtgcaatcgttactccagcaacctacacaatctgctatgaggcagcagcaacactcacagtcctccatgcatccacagccttctctgcagcaagctcaaccaactcagcagcctaacattcctttgcaacatcaattaatgggccagcagcaaaatttacaacaaaatcagttaattggtcagcagaatggtgctgtggatatgccacagcaacagagactaccagttcaatcgaataatcttttgaatatgcagcagacacagcagatgttgaaccagcagtctatgccctcgcaccagcagcaacaattgggctcccaggcaaatatttcaactctacaacagcagcagcaacaaaatcagcagcaacaacagcttcttggaactgtgcctaatgttccgaacattcaacgaatgcatatgctacaaacaaaggcagttcagcaaccacagcagcagcagcatgctcagcagtcatcactgggtttgatgcagcctcaatcacaacataaccaacttcagcaatcacagcagcatcttatgtcacaattccaagctcaacctaaccagctgcagcaacaactgggaatgccgcagcaacctcccatgcaacaaaggcttcaaacgtcagctggcatgctcttgcaacaaaataacattgatcaacaaaagcaatttatgcaggcacaaaggggccttcaagaagtttcgtctagcacatctgtggactccactgcccaaacagggtcatacaggtacaggtacaggagattggcaagaggaggcatatcaaatggtgaagaacttaaaggaccaatattttcctgaattgaatgatttgtaccataagattttttttaaactaccgcatgttgacaacggtggttccacctccaaaagccaacagaacagtatgaaaagatgaagaatttccaagtgatgttggagtgtaccaagcatgttgtgcaattgaaaaggggcaatattcagcctgcccttagggacaaaattccgtgtgtaagagaggaaaattagtcagtattctaaatattgcaaaagaggcgcaagggtgcaaggccaccacacacaatttcaacaatatggtgtgcaaggtcttacctctaacattccgcgacaacaacaaccttcccaaggtttgcaccaccatgataaccatattaatcagatgcctcaagcaagcataccaagtatgagcaccccagtacaatcttcagctgcagctggtatccaacatttacgtgcttccccagaaaaaaatttggggtgtcccaccaacaaagcaaatgtgtcaaaagtgcccacaggttacttttatttgggaggttattcagggaagcaatttaaatttttggaagatgggttaaaggagtggggtttggcacaggggaaacactgggcccatgcagggtacactgaatgcacaacagcaggccagtagtagcatgttatctcacaactcagtaggtacaatgcaggctaatgccaattccatgcaagccaacgcaaattcattacagcagctgaagcagcaacagcaggagcatcatatgatgcagaatcagcaaatgaagcgtcaaatgtttcagcagttccagcaaaaacaaatgcttcagcagcaactcccagcacagcaacaattacagaaacagcagcaatcacagatgcaggttccacagcatcattctggaaatgatgcaaacgagctgaaggttagacaaggagctgcaatgaaacctgggatttatcaacagcacttggctcagcgcaataacttttataatcagcaaatgaaacagggcagtgctttcccaatttcgtcaccacaaaacctccaagcatcatccccccaaatttcgcaccattctcctcaggttgatcagcacaatctcttgccgtctcaagtgaagaccgggacaccattgcagtcagctaactcaccatatatgccatctccatcgccacctgttgccccgtctcctataccagtggattcagagaaaccactctccaatttatcatcatcacttactaatactggtcaggctacacatcagcaaacaaacatggcgcctcagtcacaatcaatcgccgttaacactccagggatctcggcctcacccttgttggcagaatttacaagtgttgatggaaatcaggctaacatgccaacccaagttctaaccaaatcaagtgcagcagaaaggcctttagaccgcttacttaaagcgttgcggacaacacaacgccagtccttgagtgctgcagtaagcgacataggttctgttgtcagcatgattgacaggattgctgggtctgcgcctggtaatggttctagagctgctgttggtgaagatttagttgctatgacaaagtgccgattgcaagccaggaatttcataacacatgatgggaccggtacatcaaagaaaatgaagcgtgacactagtgctatgcctcttaatgtgtcatcagctggaagtgttaatgacagtttgaagcaaacattcagcataggtacccctgaattgcagtcaactgcaacctcacgtgtaaagtggcaaaaaaccgagataaaccatgctcttatggaggaaatacatgagataaaccaacagctcatagatacagagctccatgtttgcgaggatgatgctgagtcttttggtgctacatcagaagggacagaagggacagtcatcaaatgcacatttactgctgtggctgttagcccaagcttgaagtccatgtttgcatcagcacagatgagtccaattttgccattgagggtgcttgtccccgctagctaccctaagtgctccccggttctcctagacaagttcccagatgaacaaagaaactcggatgacctgtcgaccaaagcgaggtcgaagttcagcatattgcttcggggtttagctgagcccatgtcactaagagaaattgcgaggacgtgggacgcgtgtgcccgcaaagtaattgctgagtatgctcaacagactggtggaggcagtttcagttcgagctatggttgttgggaaaattgcgtgggtgcttaatccccattcttcttcagtcctgctggcaccaatcttcgttttgcatcgatattgtgcgatcgcttgcacgcccttaactggaacggttaatgcatcgctctataaatatatgcacataaatatatgtaaccataattaacattttagcaaacatgcaattgctactggtgtgtacttatttattatgtgtggttgtacttttggaaatcctccctgtttactagctggatttggtagcggcccctcttgtacagaacagtctacatctccagcctggtttgattctaatataaatatactgtgagatcgctgctcgt

SEQ ID NO: 20944 - DNA, 1782 bp, Oryza sativa
  ref <308>: DATABASE ACCESSION NUMBER: AK071245
  ref <309>: DATABASE ENTRY DATE: 2001-12-06
ggtcttcccgtcccctcggctcggcgtcctcccaccacccgtctcgcccctccttgcgagttcgccgccgccggcgccgatatccatcccgcgttagatccatccgttcgtgtcccgcgttagatccgtccgcccctgttgcacttgattgttgttgcctgcactgcacaccgcgcggagatgtcagcgagggatgcggacaccggcgagccgccggcgaagcagagggcgatcaaccccgtcgtgcccacgaagcacccctggaatctccctgcccaaatccctctcctccactgctcctgccgcccagaggatcaagtgttggtgatacctcgagaggctaacctgcccatagacgcagaaactaggaaggtcgtggcgcgggtctcccaggcggtcgtcagcgtcgtctcctttgacgttgatggtgatcgactgtataaagcttcgggatttattatagactttgataaatctagtatgattgggacaataatttcatctgcaactgtaaacattcatgatcctgctttccctgacgttgaaaagataaatatctatctatttgatggtgtctcttacgatgctaccataatagcatgtgatcatcactggaatttgttggtcttgtctgttttattttaccctgttgtcaaaaccatgaagtttgtggaaatcaatgagagcagaactgcaagggatgcctatcatggtatagcaatgctgcagcctcactcaacccgttacaagctttgccctggggatacaattattggacttggtcgacaatctcaggagccctttgggcttcaagcgaatcgtggaatttacagtgttgaacgttgggctgatctacctaagatttgtcaagaaatgctgagagcaacatttataaacacatttactgcaataggaggcccagctataaacaaaaaggggaatgtcattggaatgcttttccatagtatgagttttactcctttcttgccgtctaacatcattttgaaatggtgggactatttcaaaacaaccgggaagtattgtcgtccaatgattagttttgtggggtacaatttgcatgttgcacggtcttcacgttgggtggatgttccaacttctttgcatgaaggcttggatgggattcttgttgagatggtatctcgggagcttttatcagcagggttacaagaaaaagaccttattattcgatgcaatgggaaacgtgttactacgaatttacagttgtttgaagtcttggtggaaaatattgcgaaaacagtggaggtaacaatagtcaaggctgagaactgcaatactcaatcaatatatcttcctgtggaggaggctatcgagaaatgcttctaccagtggccaatttcacggtactattaggatggacggctctaaggacctgtttgtcacagctccagtccagccggacagtccacctaaaatgggagtggagctaggtggggcgctctcacaaaatgaactagagaggtggaggagctgaatttagactactccacaactctacttcaaactcaactcctgaactacttcaaactcaactcctgaagttaaatttaggagttgaagctctaccaaatagacctgtcactactgtagcggattcgactatgatttagggctagtggacatttcatgtttgcggaattattgtttaatagcatattaatagtccatgtgttgtattgggattttaattatcattaacatgatattaccatttttaattattgtacatatttgttattactc

SEQ ID NO: 20945 - DNA, 1416 bp, Oryza sativa
  ref <308>: DATABASE ACCESSION NUMBER: AK071246
  ref <309>: DATABASE ENTRY DATE: 2001-12-06
ggtcattctcacaccaaacatctccatctcaactcatctccaacaagcaaggcagtatcgagtcgagtcctcgcacaggcttggagaagaagaaggaagaatagtaccacctcggatctccaacaagtccggcgcccagttgataagggtttgcagaagcatttcgaagatgcggatgagttgcaacggttgccgggtgctgcgcaagggatgcagcgaagggtgcaccatccgtccgtgcctgcagtggatcaagacccccgaggcgcaggccaacgccaccgtcttcctcgccaagttctacggccgcgccgggcttctcaacctgctcgctgccgggcctgaccacctccgccccgcggtcttccgctcgctcctctacgaggcctgcggccgcatcgtcaacccgatctacggctccgtcggcctgctctggtcgggccagtggcaggcgtgccaggccgccgtcgaggccgtcctcaagggcgaccccgccgctcagggcctacgacatccgccacgtctccaaggacgccgaggccgacgccgccgccaacctgctccgcgtcgcgcgcggcggccgcacccgcttcaagcgcgcctcctccagctccaactccaagcacggcgccaagcttgccggagcagccgccgccaagcgcgccgcgtcccccagcagcagcagcccgacgcacgagacggagccggaggcggtggtcgtcgtcggtgaccatgacgacgaccaccaccaccctgcgctgagccacgaggtccacgaggagtcggctggcagccatgaccacgacgacgacgaccatgtggacgacggtgacaacaacgacatggccatcgccgacgtgacgccgccgcgggcgggatcggaggataccgaggtcgagaccggctcacacgtgagccaggccgagcagagccccgtgccggtggagcacgaagagggggaggaggaggaggtcgggctggagctcacgctcgggttccagccgctcgtcgtgcgcgcctcgaggaggccttcgtcggcggaggcgcgctgcgaccttagcggcttgagcgcggagtcgagtcgcatcggcctgcggctcgagctgccagcgtgagaagcggcgtcgcgagccgcgagctttcttttagctgatagtagacagttttggtttcgtgccagaagtgaaacaagaacagaggaaaacatcattattagttttctttttttttttcacaccttttctttttgcttgctctgcatcgttgtaggattcccatgttcctcctgtcatgtacttgtgtgatgtctgcctgtacagactttctcagattcggctgtgacaaaacttgttcaaaatcgatagaacaatccagatttctggagtgaaaaaagaagttgaaatccgattattctcc

SEQ ID NO: 20946 - DNA, 1904 bp, Oryza sativa
  ref <308>: DATABASE ACCESSION NUMBER: AK071247
  ref <309>: DATABASE ENTRY DATE: 2001-12-06
ttaaggtcttcttttgcaagtataatgacccaatatatgttaagatggaaaagctggagattatgataaagcttgcctctgacagaaacatagatcaggttctattggaattcaaagagtatgccacagaggtggatgttgactttgtccgcaaagctgttcgtgctattggaagatgtgcaattaagttggagagagctgctgaaaggtgtatcagtgttttgcttgagctgattaagataaaggttaattatgttgtgcaggaggctataattgttattaaggacatcttcaggcgctaccctaatacgtatgagtcgatcatcgcaacactctgtgaaagcctagacaccttagatgaaccagaggctaaggcatcaatgatttggattattggagaatatgctgaaaggattgacaatgctgacgaacttcttgagagcttcttggaaacattcccagaagaaccagcattagttcaattgcagttactaacggcaactgttaagttgttccttaaaaagccaactgaggggcctcaacagatgatacaggctgttctcaataatgcaacagttgaaacagacaatcctgatttgcgcgaccgagcttatatatactggcgacttctttctactgatcctgaggcagctaaagatgtagttttggcagagaaacctgtgatcagcgatgattccaaccagcttgattcttctctcctagatgatctgctagccaatatttctaccctttcatcagtttatcacaagcctccagaagcatttgttagccgcgttaaaacagctcctagggctgatgatgaggagtttgctgatacagctgaaacaggatattcggagtcaccatctcagggtgttgatggggcatcaccttcctctagtgctggcacttcttctaatgttccagtgaagcagccagcagcaccagctgctcctgctccaatgccagacctccttggtgatttgatgggtatggataactccattgttcctgttgatgaaccaacagcaccttcaggccctccactacctgttttgttgccatcaaccactggccaaggactgcagatcagcgcacaactagtgcggcgtgatggccaaatattctatgatatatcttttgataatggcactcaaactgtgctagatggattcatgattcagtttaacaaaaatacctttggccttgcagccggtggtgcacttcaggtctctccactgcaacctgggacctcggccaggacgctgctacctatggtggcattccagaatctctctcctggagcgccaagctcactgctgcaggttgcggtgaagaataatcagcaacctgtgtggtacttcaatgacaaaatccctatgcatgccttctttggtgaagatggcaaaatggaacgaacaagttttcttgaggcctggaaatctttacctgatgacaacgaattttcgaaagagttcccctcttctgtcgtcagcagcatagatgcgaccgttgagcaccttgcagcatcaaatgtgttctttatcgccaagaggaaaaactcaaacaaggatgttctgtacatgtctgcaaagattccgcgtggaatccccttcctgatagagcttactgctgcagtcggtgttcctggcgtgaagtgtgcggtcaaaactccaaacaaggagatggtggctctcttcttcgaagccatggagtctcttctcaagtgatacaaaattgaaggatcattgttccttccaaattgatcagttcatgagctattgtaggtttggatgcggcgttgtttcacaggagctggtgtgaattgtatttgttgttctttgtattagattactgtatttaaactgctagtttcctggtttcaaagttttttcacgacgagc

SEQ ID NO: 20947 - DNA, 1769 bp, Oryza sativa
  ref <308>: DATABASE ACCESSION NUMBER: AK071248
  ref <309>: DATABASE ENTRY DATE: 2001-12-06
ttggatccgatccgattcatctgtctcatcagatcagcgtgaagcagcggcaagaacacaaaaatggcggacgagaagctcgccaagctgcgtgaagccgtcgccggcctctcgcagatcagtgacaacgagaagtccgggttcatcagcctcgtcgcccgctacctcagtggcgaggaggagcatgtggaatgggcaaagatccacacgccgacggacgaggtggtggtgccgtacgacaccctggcggcgccgccggaggacttggaggagaccaagaagctgctcaacaagctcgccgtgctcaagctcaacggcggcctcggcaccaccatgggatgcaccggaccaaaatcggtcatcgaagtgcgcaacggattcacattcctcgacttgattgtgatccagatcgagtccctcaacaagaagtatggcagcaatgtcccactgcttctgatgaactcattcaacacccatgaagacaccttgaagattgttgagaaatacaccaattcgaacattgaagtccatactttcaatcagagccagtatcctcgtgtggtagccgatgagttcttgccatggccttccaaggggaagacctgcaaggatggctggtaccctcctggccatggtgatatcttcccatccctgatgaacagtggcaagcttgatttgttactttcacagggaaaggagtatgtgttcattgcaaactcagataacttgggtgctatagtggacatgaagatactgaaccatttgatccacaaacagaatgaatattgcatggaggttaccccgaaaactctggctgatgttaaaggtggcacactgatctcatatgaagacaaggttcagctcctggagattgcacaagttcctgatgcacatgtgaatgaattcaaatccatcgagaaattcaagatcttcaacacgaacaatctatgggtgaacttgaaggctatcaagcgccttgttgaggctgatgcactaaagatggagatcattccaaaccctaaggaagtggatggagttaaagttcttcagttggaaacagcagctggtgcagcaatcaggttctttgatcacgcaattggtatcaatgttccaaggtcccggttcctaccagtgaaggcaacatcagatttgcagctagtacagtctgatctatataccttggttgatggctttgttacacgcaacccggccagaacaaacccatcgaatccctcaattgaactgggtccagagttcaagaaggtcgggtgtttccttggtcgcttcaagtcaatccccagcattgttgagcttgacaccttgaaggtttccggtgatgtttggtttggctctagcatcacattgaagggcaaggtgaccatcacagcccaacctggtgtcaaactggaaatcccagatggagcagtgatcgagaacaaggatatcaatggccccgaggacctttgagcgaaaggatgcagagttcacaaagagagatcatatcaccattccatataatcaatcaagctccacgacattgtggagaatatttttgatccaatattgcttcggcataaggaataacaaaattagtacatgtcttttacctacttgactttgcttcttgttctattttctccttgtgagtgggcaaacaagtcatgtcccggcaaaatatcatatgaacatatttggttacatatctgttcaacaatcagcaagaaaacaaaatgttataattccattaacgtttgtcactaaaacctgtg

SEQ ID NO: 20948 - DNA, 982 bp, Oryza sativa
  ref <308>: DATABASE ACCESSION NUMBER: AK071249
  ref <309>: DATABASE ENTRY DATE: 2001-12-06
gtaagattatgatgccatacccattttgattttgtaaatttgtacaccctccgtttagattgaaattgaggattttcctttctcactcatgtaagtgaccttagattatttaagtctttgttttacattcttgtagtatcttaactgaaacatatttcatatttttaatttgtttggttgaattattatttgtgccttgcctgatatattgtctgggtccttctccattgcatctcaagtgttgtatgctatgtataattggctggagtctgaaattaagaatgttcacacgttgtttgtggatcaatttattctgtcttgagaatttatttatctgccaacttgctgcggattggctcgtgtgcaggctgagaagattgggcttgactacatggatgttgaggctcttaagaaaatgaacaagaacaagaagctggttaagaagcttgccaagaagtaccatgctttcttagcatcagaggccatcatcaagcagattcctcgtctccttggtcctggtctcaacaaggcaggcaagttccctacattggttactcaccaggagtctcttgaatccaaggtcaacgagacgaaagctacagtcaagttccagctgaagaaggttctgtgcatgggtgttgctgtgggtaacttgtcaatggaggagaagcagatccagcaaaacatccaaatgagcgtcaacttcctcgtgtcccttttgaaaaagaactggcagaatgtgaggtgcctttacatcaagagcaccatggggaaaccaatcagggtgttctaagttggtgtgttccacctagaagtgaaaaggatcagttgaaaccaagcttttcctcttaaaatagacctgtcgctctgggaccggcttttgtctgtcagtgcaagagaatatatcaaagaaatatctggaccttatttttgtagcgtgtttatttgggagtaacttattctacgtaagcttctaatgtgg

SEQ ID NO: 20949 - DNA, 1224 bp, Oryza sativa
  ref <308>: DATABASE ACCESSION NUMBER: AK071250
  ref <309>: DATABASE ENTRY DATE: 2001-12-06
gaccagaaaaaaaaaaatcccccgcatcacccgccccgccaagccgcgcgccaccaccgaccgccccccgcgtccaccggcgccacctccacctgctcgctgcgcgcccagccactcgcccacccccgcccatgccgccgccgccgccgcccagcctcacggccaacaccgcatcctccatgggcaacgccgaggccgtcgtggtgctgcccgcgaacggcggcgcgcggcggcgcgccgacaaggtcgtccacccggcgccgatgccggacagagcagctggtggcgcgatggagagggaaggcggcggcgtcggcggcggcggcgaggtgggtgggtggaggaggccggagtggtgctcggcggcgggggtggcgggggtcctgcggcggcacccggcggcggcggcgttcgggtgcgggctgctgctgttcatggccgtggagtacaccatccccatggtgccgcccgccgcgccgccggtcgacctcggcttcgccgccaccgccgcgctccacgccgggatcgccgcccgcccatggctcaactcgctcctcgccgcgctcaacacggtgttcgtggcgatgcaggcggcgtacatcctgtgggcgatcctcggcgagggccggccgcgcgccgccgtggcggcgatgatgatgttcacctgccgcggcgcgctcggctgcgccacgcagctgccgctgccggccgagttcctgggctccggcatggacttccccgtcggcaacgtctccttcttcctcttcttctccggccacgtcgccggcgcggtgatcgccgccgaggacatgcgccgcgcggggcgccgcggcatggcgcgcctctacgacgcgctcaacctgctccagggcgtcaggctgctcgcctgcaggggccactacaccatcgacctcgccgtcggcgtcggcgccggcctcctcttcgacatgctcgccggcaggtacctggacggcaagaacaccgtcgacggcggcgccgccgtggcgccggggagccggtgctgcagctgccacaaggctctcttgtcacagtagctttgcattttaggcccagccattaatggccaatgcagttggttgggcatcaaaccatgtcatttttttgatgtaatcgagattaaatgctacctactgatgtgtaattgtacaaacactatccattccatctgagcttaaaaatatataaataccacaagtttctagc

SEQ ID NO: 20950 - DNA, 1502 bp, Oryza sativa
  ref <308>: DATABASE ACCESSION NUMBER: AK071251
  ref <309>: DATABASE ENTRY DATE: 2001-12-06
gggtgtccgttgattggctcgtcgcctcctcccttctcggtctgacggtctgaccagtgccgggtaggaagcgtaattttgaggagagactccgacccgcgccgccgccgccgcagccaagccatggagggatccgccggggcgccgctccgcacgcgcgtgtgcatcatcgggagcgggccgtcggcgcacacggcggcgatctacgccgcccgcgcggagctcaagcccgtgctcttcgagggctggctcgccaacgacatcgcggcggggggccagctcaccaccaccaccgacgtcgagaacttcccggggttccccgaggggatcctcggcggcgagctcatggatcggtgccgcgcccagtccctccggttcggcaccagcatcatctccgagaccgtcaccgcggtcgacttctccgcccgccccttccgcgtcgcctccgactccaccaccgtgctcgccgacgccgtcgtcgtcgccaccggcgccgtcgcccggcgactccacttcgccggctccgacgcctactggaaccgcggcatctccgcctgcgccgtctgcgacggggccgccccaatcttcaggaacaaacccatcgccgtcatcggcggcggcgactccgccatggaggagtccaacttcctcaccaagtacggctcccatgtgtacatcatccaccgccgcaacaccttccgcgcctccaagatcatgcaggccagggcgttgtcaaaccccaagatccaggttttctgggactctgaggtcgtcgaggcctacggcggcgagggtggaggtccattggctggtgtcaaggtgaagaacttggttactgggaagatctccgaccttcaggtgtccggtctcttcttcgccatcggacatgaaccggcgacgaagtttctcggcgggcagcttgagctcgatgctgatgggtatgtggccaccaagccaggctccacgcacaccagtgtgaagggggtctttgctgctggggatgtgcaggacaagaagtatcgccaggctattactgccgctggatcagggtgcatggctgctttggacgcggagcactatctgcaggaggtcggtgcacaggagggcaaggccgattgactatctcaggaggaagcgaccaccagcgtttcaagaagtccaacgttgtcgctgctgaaagctacactctgaacgtttatgccatgggctgttctgacttctgaatgcttctaccggattttcctgccccttattagcgtcgtattatttgatgtgctggagatttatctgtatttacgctgaagacgacgtattgcttgcgggtatccgcattttctgcatttgcttatgattgagttattgtgacatttggcgtttttagtaccaaactagcaaggaattgtgtattctgaagaccattccgatcaatgctactgatatggtggatatcactattgttttcctggaaagaggagtaattagaagttcactagcaggttgct

SEQ ID NO: 20951 - DNA, 1702 bp, Oryza sativa
  ref <308>: DATABASE ACCESSION NUMBER: AK071252
  ref <309>: DATABASE ENTRY DATE: 2001-12-06
ggggaatgggtacaaacatgtacccttcatccgctttgctgggacagaacaaggatgagtccattgccgctttaccagttgatgatctcattgagaaagctgatggctttgctggtgtattcccagagcacaagtatgagattgtgaaacgtctgcaagcaagaaagcacatatgtggaatgactggtgatggtgtcaatgatgctccagccctaaagaaagctgacattggtattgctgttgctgatgcaactgatgcagccaggagtgcttcagatattgtgctcacagaacctggtcttagtgtgatcatcagtgctgtgcttacaagtcgtgcaattttccagcgtatgaagaactacactatctatgctgtctcaatcaccattcgtatagtgcttggatttatgctacttgcgctcatctggaaattcgatttccccccttttatggtcctaatcatagcaattctaaatgatggtaccatcatgactatatcaaaggatcgggtaaaaccatctccactacctgacagctggaagctggctgagatttttacaactggagttgtcctcggtggatacttggcaatgatgacagtaatcttcttctgggctgcatataagacagactttttcccgagaatatttcatgttgaaagccttgagaagacagctcaagatgatttccaaaaacttgcctctgctgtttacctccaagttagcaccatcagccaagctctcatctttgtcacaaggtcccgcagctggtcatttgttgagcgccctggatttctgctggtctttgctttcttggttgcacagctgattgctacactgattgctgtgtatgctgactgggcgttcacctcaatcaaaggcattgggtggggttgggctggtattgtgtggctctacaatctaatcttctacttcccactcgacattatcaagttcctcatcagatatgctttgagtgggaaagcatgggatcttgtcattgagcaaaggatcgctttcacaaggaagaaggactttggtaaggaggagagggagctcaagtgggcacatgctcagaggaccctccatggactgcagccgcctgatgccaagatgttctcggagaaggctggctacaatgagctcaatcagatggctgaagaggcgaagaggagggcggagattgccaggcttagggagctccatacgctcaaggggcatgtagaatcggttgtgaagctcaaaggcctcgacattgagaccatccagcagtcttacaccgtgtgatccagcctgtccataaagaaagaaaaaagaggattattttttttccagattttcctgtttcgctttaacttgactgcaattctgcaatcacctacgtgtacttgaaccgaattgctgtaatctttgtccctcctgctccagctttctactacatggtagtgttatataatttttggtcacctgaaaatatataagtgtttgaggtgaagcacaatggcaatgccggagttttttgctcggttactgagaagcatgttttcataatcaatcggtcaattgtatggacatattatagatgaatttggtaactgtttgtgtgggggcagctggcagtatgtaacatgtgggcttcaatgtatccaaccaagaggcaatgaatgaatgaatgaatagcggtgactctggtcctggactgg

SEQ ID NO: 20952 - DNA, 1623 bp, Oryza sativa
  ref <308>: DATABASE ACCESSION NUMBER: AK071253
  ref <309>: DATABASE ENTRY DATE: 2001-12-06
gacacgcacacacaccgccgtggacgccgaggactacactaaccggcggctgcggcggcaactccggcggatccacccgcagctaggccgagtcgcgctgccggggaagaggcagcgggaaccctagccggccgagcctagcccgggggaggaggaggaggcaggatgctgttccaggtgggagggcagggggcgcggcccaccttcttcgagatgtcggccgcgcagcagctgccggccagcctccgcgccgcgctctcctactcgctcggggtttttgcactaagacggccgttgttacataaagttttagattacgaggatgaattctttgccttgttaatggctgtccttgagtcccatagtttgcgaacgacagatggttctttttcggagtcattgtatggtctcaggcggagacctgttaaggtttcagtaaagagaagtagttctggtgcagaatccaatgataaagcctatgattctgttctaaggaagcgccagaaagtcctttctgttgtttttttggttgttttgccatatttcaagtcaaagctgcagtccatatataacaaagaaagggaggccaggttgcaggcaagcctttggggtcagggtgatgttagattcgatgaagctgaccttgtttcagatcaaggggagacttctcaagcacaagtcgaggctacaactggagaggtatcaaatatggcacgtattaagaagaattttgcggcattaataggtgtttgctatccatggattcatgcgaccaatgaaggtctctcatttgcttaccagttgctgtatttgttggatggtactgcattttatagtccagcactgcatgctcttgggcttcatgtttgtcgtgctacaggacaagagctgatggaatcatcttctagggtatcaagaatcagaaatcgagaacttgagagacttcgtggtcctccatggctgaagaccatgcaaagggtgttacttaactgtatgtacactagcctagattatgcacaaactggtttgattgctgcagttttctttttcaagatgatggaatggtggtatcaatctgctgaggaaagaatgtcagctccgactgtatatcccccaccccctcctccacctctgccaaaggttgctaaagatggacttcccttgccccctgacaggacattgtgccccttatgctgccagaagcgcaataacccttctgttctttctgcttctggttttgtattctgctacagttgcatttttaagtcagtctcccagcataaaaggtgccccatcacattgatgcctgccacagtagaacaaatcagacgcctctttcatgatttgtagtttgattagacagaacacactcttctccccaaagatcaggggaagccggatataaagaatcgtactatgcagctattcatttttgttgaacagaccacaaggaactcagcccttctgacactcaaggcatggccatctactcaagaacagtgctgttgattcttcccccgttaggaaattctatgttcatacaaagcttgtattcgttttcttctgttgaaatcaaaaaaacatgcacagctcgagattttggtactgatgtgcaattactgt

SEQ ID NO: 20953 - DNA, 1476 bp, Oryza sativa
  ref <308>: DATABASE ACCESSION NUMBER: AK071254
  ref <309>: DATABASE ENTRY DATE: 2001-12-06
gcgccacacctcttctcatcttctcctcctatcaactccctctctctccaccgctccgcttgcctcggatcgcgctcgcgctcgcgcggagcagcgcccccaacgacgggcatggccggtgacagcggcaacagcgacggcggtagcaaccgggatgaggaggtccagatacagatcgcagattcatccaaagctgcaacttcgtcaactcatgaagtacctatacagaactctcctgtcaagagttggcaatggtggctgatggtgggagttaacatgttcttcctcattgccggtcagaccgcatctacacttcttgggaggttctactacaatcaaggcggcaatagcaagtggatgtccacattcgtccaaactgctggctttccgattttgttcattgccctatttcttttccattcaaagacatcttctacacaaacagtcactagtagtcctgcccctacaatttctatccccaaaattactctgatatatgttgtcctgggcctcatcattgctgcagacgacttggtgtattcctatggcctactatatcttccggtctcaacatattcgctcatctgtgctagtcagcttgccttcaatgctgtcttctcatatttcctcaatgctcaaaaattcacccctctgattttcaattccgtagtcctccttacgttttctgcttcactccttggagttgatgaagattctcagggaactactagtatatcacatgggaagtacattttgggtttcctgttgacactaggggcatcagctacatactcgctcattctctccctgatgcaagtcacatttgagaaggttattaagagggagaccttctcagttgtgttgaacatgcagatatatacagctctcgtggcaacattggcttctcttgttgggttatttgcaagtggtgaatggatgactttacaaggagagatgcatgcattccagtctgggaagctgtcatatgtaatgacactgctgtggacggctatatcttggcaggtagcatcagttggagtggtgggattgatctttgtggtgtcatcgctgttttcaaatgtgataagcaccctagctctacccatcattcctgtttttgctgtgattttctttcatgacaagatggatggagtaaagattatagctatgctgatggccatttggggatttatgtcatatggccaccaattatatgttgatggcaagaaaggtagaaagactacagtcagtgtagaggaaacttcctaatcatcacaatgttgcctagaatgccgctcttaccaatttaagttgttggttctgagtaaggtactgtagttattaggaacctcatcaaagaaattccatttttgcaccatttggtatataactatacatattgtcttgattactctgatgtaaggatgtatcaagcaagagaataaattttatgtcacccccaattttccttgtcct

SEQ ID NO: 20954 - DNA, 1660 bp, Oryza sativa
  ref <308>: DATABASE ACCESSION NUMBER: AK071255
  ref <309>: DATABASE ENTRY DATE: 2001-12-06
aggcgtcgcaagcatgcgtttctaggagaaagtaaagcttgcgtttttgagactaaagcttgcgttttttgttttttaattgtggagtttgggaggaggaggggaaaaaatcgcgatcaggaaaaggcatctcgagaataattatttaagtccccagagcgagcagtgacgcgaaattccccaggagagatctccatctccacctccactgctcaggcggggatgtcgtcggcggcgtcggcgtcggcggccggaggggcaggcgaggagggcgccgccgccgccgcgcagccgcagcaggaggggccggtggtgacctgcaagggcgtgaacgggctcgacaaggtcgtcctccgggaggtccgaggcagctctgccgaggtgtacctgtatggcggccatgtcacatcatggaaagatgagcatggagaggagctgctttttgttagtaataaggctattttcaaacctccaaaagctatacgtggagggataccaatctgctttcctcagttttccaacttcggaaatctggacccacatggctttgcaaggaacaggacctggagtgttgaaaatgatccaccaccatttccagtaccaacttctaataaagcttacgtcgatttaatccttacgcatactgaagaagatctaaagatctggccacatagttacgagttccgtctgagagttgcacttggacctggtggagatctgatgctgacttcacgtataagaaataccaatgcagatggaaagccattctcatttacatttgcatatcacacatacttttcaatatctgatatcagcgaggtgcgagtagaaggcctggaaactctggattacctagacaacttacaagagagaaatcgatacactgaacaaggggatgcaattgtttttgaatctgaattggacagaatatatctgggcacaccgtcaaaaattgccattattgatcatgagaagaaaagaacatttgttgtgaggaaaggtggccttcctgatgctgttgtttggaacccttgggacaagaaggctaaggctatgtcagactttggggatgacgaatataaacgcatggtctgtgtggaggcagctgctatagaaaagccgattactttgaagcctggtgaggagtggactggaaagttggaactgtctgctgtcccatctagctattacagtggtcagctggatcctgatcgtgttcttcaggattcaagtgtcccggaggactcaatcagctagtccttagtggatatttgtccaggtagactattatatcatatgcataagggacattggcaacaaggagtgtcaaaacgtttattccattctattcaaatctttgttgttttttggcatgcatatctgaactgaggaatttcaaaattgatttacgttttgatatctacataacgtaaggggacgggtcggtattaataccctgtatatgcatgtttgaagtgagaaacatctcattgggttgtaaaataaaaatcaatactgtatctcttttttgatcggcaccttttccattctaatatcaagtaaaatagtacacctacaaaacatagtcacctgtcctacgaacgtgcatatgaggtataaacattctgagcttggttaaaaccaggacttgtttggatcc

SEQ ID NO: 20955 - DNA, 1717 bp, Oryza sativa
  ref <308>: DATABASE ACCESSION NUMBER: AK071256
  ref <309>: DATABASE ENTRY DATE: 2001-12-06
gaggccatttccgactttccgttgccctcgtctcccccttctcgctcgcaatggcgacgtcgttcgaccgctgggagaaggaccccttcttccccgccgccgaggaggtgcagggatccgccgaccgcatggagtcggtgtacaggatatgggtgcaggacaggagtgggggcgattcggaggcggcggcggcggcggctgctgctgccgtgggtggaggagggctccctgccggcgagctccgccgcgagctgcacactgcgctcggcaccgccaagtggcagctagatgaattggagcgggcaattagatcaaacgacaaggttttctcagctggaaaggacacaaaagcacggcatgatgactttgttgcggcaatcggttgtcgcatacttgaggttgagaacaatttgaaagaatccaatgttgcagagggaaggggtgccctaagctggattgatttggatgaggatgaacggaatgatcttgctaccttcctatctgcaagctcttttcaacagcgagacaaagtagttacaattccatctgttggtgatattgatgtgggcaacaatgcagcaatggttaaaaaggatatgtatgctgacagctccaaggattctggctccgctgagttgagttcagcaagagtaaaggaagaaacgcatcgtgggcacagaagggctgctagtgcccatgctgatatcgggtcatggactatgttatgtccaaatgagagcgagagttctgctgacctaccatatgatgacaagcaccaagaacctttgctgaagatagtgaaaacatgtgcactgacgagtgccttgcaatctaagcctagaacgaagaaaaaaggtggagctgtgaaatgggccgctgttgatcaacaagatgtggaagagacaatccctctcagttctcagatgggtcagggatcggatagatgctttgaaagaagcaagagttgtgtaagtacttgtgatgagagtacatacaataagaaactttatggttgtcttggagccctgcatagacgactgcagaggtcgcgatatcgaattcggtatgggcgtcctgttcaattaattgtgttagcagttgctgccctcttaatattcatgtgtgtattcaagaaaatttggtgaccttttgatgggctcatgatttccatagaagcctcaccacagcagcttgcgaggttctaccatttttgcctgcatagctcatataactggtgttgaacaggcatctgaggcatgaagaatgatcagactggagcagcttatcgcattgactgtacagaagtgtgctgcatcaggatgtcatcggaaatgcagtgtgctgcctgcatgatgcacctcaagatcttgatcctcaccatggcctgttgacatatgcaacacagtgtagggcccgctttggaaagttggaagagtggtggaatttcctttgtgaaatatatcttctgaacccctcattcatagctggttccatgagaataggttctgaagtgaaatgtgtaagatgctagaacaattgccacacaatcagaagctagcccgggctatccggctctagaattagaattttgatgcctctggcattacgtttgttaggctattaattaaaggagctataaggggtagctaaatgtattgcgatgtttgaaacttctgcactgttcgcgtgttatatgaaagactaatcttcttgagtg

SEQ ID NO: 20956 - DNA, 1654 bp, Oryza sativa
  ref <308>: DATABASE ACCESSION NUMBER: AK071257
  ref <309>: DATABASE ENTRY DATE: 2001-12-06
gggtttcccccgccgcgcggccgctaaaaccctagccaccacccccgccgccggcgagcgacgcgaacggcgaacgccatggaccaccaccagcggtggcaccccacggtgaacgagcgcgagttcatcgagcgcgccctccagtccgacctccgcgtcgacggccgccgccccttcgacttccgccgcctcaagatcctcttcggcagggaggacggctcggcggaggtgcagctcggggacacgcgcgtcatgggctgcgccacggcgcagctggtgcagccgtacaaggacaggcccaacgaggggacgctcgcgatattcaccgagttctcgcccatggccgaccccgccttcgagccggggcggccaggggagtcggcgatcgagctcggtcgcgtcgtcgatcgcggcctaagggagagccgagccgtcgatatggagtccctgtgtgttgttgctgggaagcatgtttggtcggtgcgcgtcgaccttcatatcttggataatggagggaatctcattgatgcagctaacattgccgcgctggcagctctgtctactttccggaggcctgaatgtacggtcggaggggaagatggtcaacaggttacagtacatggccctgaggtaagggacccactccctttgacaattcatcatctccctattgctgtgacatttgcatattttggcgagggcaacatcatggttattgatccgacatataaggaagaagctgttatgggaggacgaatgactgctacaattaactcaaacggtgatgtatgttccatccagaaagctggtggagagggtgtcatgtcaagtgttatcatgcagtgtttaagaattgcttcagttaaagctgctgatataacaagcaaaataaagaatgaggttaactcatacacctctgcgaaggcactgcagaaagtaaagcgtttgccagcctcagcactgaaaaaggataatgctcctgatgtggctatgaaggaaagttctgatggtgcattggaaactcaaagtacaaaaccatccagcgatggtcagcagataaacaaagaaccaccatctgtggttgaggacaacaagcaggaggatgttgaaccaatgttatctgaatgtaatcctgagccgcaaagtgaatcaaggttgactgctggagggtcagatgagacgcaggaagctatatcgccaaagagtctaaaagacgctgtcaagccaaaacacaaaataaagaaaaaacaacacagcaagagttaaatttcatgtaacttataggcctgtcagcagtgttagatagcgcaatgtttgtgggcatggttggcaaaattccgttgttctcttgatggtgtacatgctagattatacagcacgatgtattttcatgagattcaaatcaacgtggaaggtttctatcatttttagttcctctatttttttgtggaagccttcactaccaccatttgttatgatgttgattgtttctgcagtcaatgtctgaacatctctgtaacacctagccaagctttcctgactgaaaagatcccttcaccatagcaccatgagttgagtttcttcttctgatgttttgtgtaattgtgcgccttcgttgtgacgaatgctagccgcaaaaattgaaaagttttgt

SEQ ID NO: 20957 - DNA, 1545 bp, Oryza sativa
  ref <308>: DATABASE ACCESSION NUMBER: AK071258
  ref <309>: DATABASE ENTRY DATE: 2001-12-06
gcccctcaccccttctcttctcctcctcgtctcgtctcgtctcgtcgcgtccgcgaagggggcgacgcggccgatgccccagcgccgcctcctcccccgccccaaaattcccgacgcctccgcctccgccgccgccgccgccgccgcgtcgtctccgaccgacggagcagtccaccgtagaccccggcctcctgcttctgctcctccggagccgcggcgcgtgtggcgccgcgcgcgctagcactcttcctcccggagagatccgcttccggggattttgcaaataatgggggagaataaatggatgggaaaaagatgggaggacatggacactgatgtcctcgtgaagatattcaaggagttgaacttagttgagctgtcacccgtatctcaagtttgtcgtttgtggcatttggcctgttcagatccgcttatttggagcactcttgacttcggtttgctgaaatccaattatattcaaacaagggcatctccctatatttgggttgatgataggtctgacaagaggctttcaagaatattacgggtggctatgtcaattagctatggaaatgttagttgcttgatatttcattacaatctgtacatgaaggatgaacacctacattacatctcagaaaggtctcctcacctaaaacgactggttatgccagcatggaaccgcattaccaaattcggaatatgccaagctattcaaaggtgggaagagctggagtcgctgacaatgcctaccattggccatcctccgtatatcatggaagagatagcgaggagctgcaagaactttgcagagctcaaggtcatgggctcattcgacgacctctttgcttcggcgattgccacccaccttccaaagctgaaagtcttaagcctgcgctgctcgaaagtgaccatgagtgccctgctatggttactggacaacatggcaaaccttgaggttctgaacatttctcattgcctgctgtttgagatcgtggccaacgggcggaggcaagtgatccatgagctggatgaccaaaccctccagaaagcttcccggctgcgggagttccaccactgccagagcagatcatgccttgcgtgccagcggatgatggcggacgaaggcatcatgcggtggtacaggtatgaagactggttctggcgccgggatgaggtgagctcacttgatctgcaagactatgggaagctgttcgatgcagagtgcgaggcattgacagccgtggaatagatgataatggtcaggaaattaaacctaccattgtaggaagttgtttgaccagacattttcataaaatcatagcaagcaccgagaggctgtagcctagagtaataaccataataatggtaacaataatgtgcatgcatggtggtggtgtgggtagctgatgttgtaaatgcatgaatagtttgtcttgtccttgtttgaaaggtggcgtttatcatctccatggtatgaccagaatgtaaaaaatctccgaaaccgtatgctttgtttctttaaaatcatcttgcactggagtg

SEQ ID NO: 20958 - DNA, 1913 bp, Oryza sativa
  ref <308>: DATABASE ACCESSION NUMBER: AK071259
  ref <309>: DATABASE ENTRY DATE: 2001-12-06
ggctcccctgtttccgctccccactggcgccagtagtatagcagcacagtagcaggggagaggagaggaggagaggagggagcgccgccgcccgaccacgaccagatccacggctcctcctccggcacctgggaccgcgtgcgtgcgggcgggcgggcgggcggcaagaaacagggatcttgagatcttagtgtccctagatatggaaggaagagaggcaggcttatggtaagccctggtgaatatttgtgggaggtcagtaagtggtggcctgattaagactgcatcagagaaatttgtggttatctttctttactaatgacggcattgacgagaatgaagttcccaaagcgctatgtcattgtgctgctgacattcatctgcacaaatgtttgttacatcgagcgtgtcggattctcgattgcttacaccgtggcagctgatgccattggcgtgaatcaagcaaacaaaggcatgatactttccatgttctactatggttatgtcttatcacagatccctggtggatgggcagcacagagaattggaggtagacgtgttctgctgctgtcatttgtgctgtggtctttgatatgcggtttaattccactagaccccaagagagaagtcatcctggtcctttctcgcctttttgtcggcgtagcacaaggattcatatttcctgccattcacactgttctggcacaatgggtgcctccgcaggagcgctctcgctcagtgtctctaacaacctcggggatgtaccttggtgcagccggtggcatgttgtttttcccaagtttggtgaagcacatgggagctcagtcagttttctttgttgaagcagtgttaggtgtagcatggtctgtaatatggttaaagttttccagcgagccacctcgcactgaccttccgaaagtgtcaatgccaaaagtggcatcacgagagaagatcaaggcacaagcaggaggggttgttgcacctcgcactgtaaagatcccatggcgaaggattatcttcagtctaccagtttgggcaattgttgtaaacaacttcaccttccactatgccttgtatgtccttatgaattggctacccacctattttgaattaggccttcagcttagccttcaggatatgggatcgtcaaagatgcttccctatttcaacatgtttatattttctaatatcggtggagtggttgctgatcatttgattacaagaaggatcttatctattacaaggacgaggaaactcctgaacaccattggtttcgttgtttcagctgttgcacttatggctcttcctttattcaggactccctcagggactgtgctttgttcatcgatatcgctcggttttctggccctaggaagagcaggcttcgccgtgaatcacatggacgttgctccaaaatttgctggtatagtgatgggggtttcaaatacagctgggacattggctgggatagttggtgttggcctaacgggaagtattctggagggggcaaaggcttctaacatggatctgacaaactcagaaacctggaaaacagtcttctttgttctagggtacctctgtattttcagttccatcatttttttgattttctccactggcgaaaagatttttgaatagaggatgactattcttttacttttaatttacggtgaggctggatagcaatacgggattcttacatgtatctgtttgtcatttgttatattttggagttaagattgtatcccatacatccttaaaaaacagtgcagaaaggattgcacattttttgtagtaaatttatcatttctgtagtcagtcaagtttctgttattcaggcagattggatggcatctttacaacttacaagtgtaacattatgtattctgctgtcacctattcaggcttattgc

SEQ ID NO: 20959 - DNA, 843 bp, Oryza sativa
  ref <308>: DATABASE ACCESSION NUMBER: AK071260
  ref <309>: DATABASE ENTRY DATE: 2001-12-06
gattcatcctagctctcgcagcagcaaccagcaaggtaattaaccaacaccgagcatcaagcgcagtagccaagtcagctgagctcagctagctagcatcctctggatcgatcgagatggcccgtgcacagttggtgttggtcgccgtggtggcagctctgctcctcgccgccccgcacgccgccgtggccatcacctgcggccaggtgaactcagccgttggcccctgcctcacctacgcccgcggcggcggcgccggcccttccgcggcctgctgcaacggcgtgaggagcctcaagtccgctgccagaaccaccgctgaccggcgcaccgcctgcaactgcctcaagaacgccgcccgtggcatcaaggggctcaacgccggcaacgccgccagcatcccctccaagtgcggcgtcagcgtcccctacaccatcagcgcttccatcgactgctctagggtgaggtgatcgagctatatcgatcggatcgatgatcatatatatacagcagcgcgccggttgccacctgggtcgatgtgtgtggagccgaattctgtatccaatactactagtagtatctgtattctggaataaaagatgagctagctaggtccatcgatcaccatgcatgcatgtgtgtatggttattgatcggcccggtcagtccagctagcttcctgttatgtgtgttcgtctcgtttaatttgctcctttttgaggtgtacgtaccagtgagagctagagattgagtttatacccatctacatgcatgtgcgtgctactagctccttgtactacgtgcttgtttggattattacacatacatgtagctctttttggc

SEQ ID NO: 20960 - DNA, 1521 bp, Oryza sativa
  ref <308>: DATABASE ACCESSION NUMBER: AK071261
  ref <309>: DATABASE ENTRY DATE: 2001-12-06
ggggagggcgcgcggtgccgctgccgccgaagccgcggtgaggtcagtgccccgctctccccctcctcctatagtcctattccagcgtcccgtgctccgtgcccccgtcgccgtcatctccacacggctccggctcggggcgcgcggttgcgcccgacgaggcgtcgaccgttgctgccgtccgccatgcggcccccgatcgaggagggggtaacaggaggcttatggaaaagcatcatctgattcaagtgatgatgaagagtggtagtacacatcaaaagggaaatttagaagacaatgtgctgaatcacctcagcatggaaaatgattctctagaagagcaccagttaggcaccagaataatgaacataccccactgaatgtaaggctttgtgattcagactgaaggtatatttcaaggaagatccgtaccctagttgtgcaacaaataaaaatcttgcacaaagagctaggcctcacattcaatcaggttagtaaatggttttctagtactttgtcattaatcaagagtagcagccaccaaaaaaagagaacaacattgaaaaccatacagctgagaataataataccaatactgttgatagcatagaggatcgaatgaaatggtgatggaaaaagtaagtgtagatagaaatgaaatgatctctgaggaaaggatggaacacaaacacacaataatctcattgaaggtattccagtaagacaagataccaactgtgggcagaatgtggttgtgaattctaatgtggtcaaccaagattgctctattgtctccaaagaaatcgacttgctaaaatgcggtactagagaaaaccagggcaagtaatgctggaacaccagaagttgagtccacagagagaatgatccctagactagaacatgcagatgaggctacgcgaaaggcagtacagtgggagctgagaaagatgaagacgacgggtgaaactccctagtgttcggattatttgaggactctcttattcaggtcaagttttggatgctgcctgtatcgcttaatgtcatagtaacatgctcatacgtcataatgggttaggcccatataattaggaatggactagatgggtattgagtaacattggatctggtggttacgtaaatagagtggatgcgctgcacgcggttggggatgggtgaaaggagacatgtgaggtggcgtccagtctggaaggacgagggtgggccaattagttgcgtcgaagcaaagattttttttttgttcgtatttatagtcacagaagcctggttactgttgctgttatgtttgttccatttggagccttggctgttcatccagagtttctgattggataactcttggaaattcatgctgccatactccggttacaggaatggttaatcgactgtaaaagtgttgacatagtctgtagcagacagtagatgtgttgtttgccgtgccctgtaacataggagtattgaattaagagtgccaagtgaactgatgagaagtatttgtgaccg

SEQ ID NO: 20961 - DNA, 1749 bp, Oryza sativa
  ref <308>: DATABASE ACCESSION NUMBER: AK071262
  ref <309>: DATABASE ENTRY DATE: 2001-12-06
gagtttgggttgggggaagaaaggggaaaggcgagcgactagttcgcgagacgcgacgcgagagcgcaacccaacccaacccaacccgcggcgaagaaagcgaggagcgccgccgcagcgggagttcgccgccggcgacgcgctccttgcctcctataccgaagggtttcatggagcgtgccgctgctgatcggagtggcgcggaggagggggagagcgaatggagggaggagctgcggcagcagcagtcgcaggtcgacgcactgcgggagaggctcgtggaggtcaaggtcgggatgaagtgctccgaggaggactcgaggaaggagctggatcacctctgccgcagggtgaagaccatcgccacgctgctggcctacctcaaatccaaggccaggatcatggcgataccgcacctcgcgcacacgtcctgcgggattaggcaccaggatggcgtggggtacgtcgacaggaacggggtgccactggctgattggtccaagggcggcgagtccgcttcctgcgagggtttagatgatgaaacgtcggcggatagtagtcgtgttgccgaacatggcgatgccaatgagggggatgtagatgtcgaagacattctgaagtcgatacatgtggtgaccgatgtcatggagacccttgtgaagagagtgattgttgctgaatcggaagccgctaacgagaaagagaaggtgaggatgggtctggaagagattaggaggaagaccatacaggttgagtccatgtcggccaaagttgaggaaatggagaaatttgcagtgggtacgaatggtatgctgaatgagatgaggcagagggttgaagacatggtgttggagaccactcgacaaaggcaacgtgcggctgaaaatgagcaggagcttagtcgtgtgaagcatgacttcgagtctctcagaacctatgtcggcactctcgttaatgtcagagaaactcttctttcatcagagaagcagtttgaaacaatggagaaactcttcgacaggctagttgcaagaaccaaccaacttgagagtgagaaagcacaaaaagaagccgaagtccagaaggtggtggaggagaatgtgaggctgcgtgcgatgattgataagaaggaagcgcagcttcaggcgatgagtgagcagtgcaagttcatggcgctgagccgtcccaactagctggatacttcctccgtcccaaaaaaaaaggcaaaccctgggttttcgtgtccaactttaacggtccgtcttatatgaaatttttttataattcatattttcattattgttagatgataaaacatgattaatattttatgcgtgacttgtcttttttatttttttcataattttttcaaataagatggacggtcaaacgttggacacggaaaccagggtttgtttttttttggaacggagggagtacatatgacaagctgttacgcttgttcaatgatgccacttacgaattaccgtcactgcattgttgcaacaagaagaagagctccagatagatgtggcgaaacaacggatggtgccaactgctggcgagtccgttccaggcaccctgattgctgctgctgcaaacaaattgtttaccttaatgtaggtgtgatgtgttgggactgtaaacctgacatctttgtattcttgtaacttggaatttgtgtaaaaaaaaaaaccagggcacatttgtccgaatccataaatcctctgaaaaatgagctgcaattcatcg

SEQ ID NO: 20962 - DNA, 1865 bp, Oryza sativa
  ref <308>: DATABASE ACCESSION NUMBER: AK071263
  ref <309>: DATABASE ENTRY DATE: 2001-12-06
gccggcacactctgcctcctcctcctcctcccatccttcacctctcaagtttctcacaagcaaagtggaggcccacgacggagggcggccagcaatgcaaagctggcgatgggcagaggctggcgaccacccgatcttctcttgatatgggcagcggtggaggaggagggcgcatgcggctagtgaccgcggcatcaagcgatccctagccaccatcgatccagcagcaagcttgaagaaggaggtcaagatggaaatttggatatggtcttctcctatgtatccttgtgctgattttttattgggtggattagagtttgattcctttcagtttcgtgtttaactcgggaaatttagaatttggaaactacctagatacgggctacatgcgcgaggctgagatgacgcaccgtgatggatggagttgggaagcgcgttttgtgcaaccggttgcaaacccaactcatatctacaccgttcaatgttcattgagattcgtgcggagaatcttaatcttaactaattaaaagattattagtaattttaccagatagttaaatgcccgtgcttcggtacggtgtattaaaactaaaaatatttaagttcaaaaaaaaactaaaaatatttgtttttaaccaaagttatttttaaccgaagtctccaatgacagagagtaatatagtagctcataataaattattatttaatagtgcgttgcaatgggaaaaaaatactgttatgataatgattacagttattttatagttccatgggagttataggatatagttctagacataaacaataccccttctctcccaacgtaagcgacagtagctgcgccttttcccaccgcaggtcgtaaaataatatgatatggttggatttaatttttattaaattaaccatgattaataacgctctttgaaacttttttggaattttcggagcttcattgctaattttgacaatacaaacatcatttcagcatttatttaaataaaaatgtaaataaaaaccccaatttctctatgggccatttttagtctttttactgtctcatcccgtaaataaagtctaatttacctcctttaactccttctctgattgcgcaaacttgcaggtctatttggaggcccaatagtcggcggcccgagcgggagaacccggaaccatccgatcgaatggacggttcagattgatccaaacctacataaatatctgtagccaaaccctaaccctagattttatttccctccccacctccccactcgccccgatcccctctctccctcgaatcgaaaagcgatggcggccttacccccgtagtagcggcgacctcccccaccgagcagcgttggcggcgccctccccccacgagcggctactgtggcgcccttccccctctccccgcgagcggcggcggcggccgctccctccacgctgtctcgcctccctcgccggcagccgctccctctacactgtctcgccactctcgcccccttctcctctccctcggtggatacggcggcggttgcggcgggttgatggtggccgcgggcggatcggcggcggcttcctccacccccgtttgccttcctcccacggcaaaggcggcggcggccgcggtcggatccggcaacggcgactccctccgacggctgtggtggcgtcggcggcggttgcgacggccgaggacggctatggcaacggcggagggtggctgtggcgatggctggtggcggatccggcggcttcttcttttttatgtatatttttgtgaagttttgtgacgtattttgtgatttggtgattattgtggttgttttttttgggcaaagagtggttgagttttggttgtgtcg

SEQ ID NO: 20963 - DNA, 812 bp, Oryza sativa
  ref <308>: DATABASE ACCESSION NUMBER: AK071264
  ref <309>: DATABASE ENTRY DATE: 2001-12-06
ggcaaggttcagtgaggaataaagccaagatacaggagcgatcggctccgcggcgttcgtcgctgtaaaatccattgttcatcgtctccctcaccggcgtttgtgttcgtgagtgtgagagtgttcctgggctgagccaacatcgaagtcagcaactccatctccaaggttctctggatggccaccctcagccccacctcgctgcccaactggaacaggatgcggatctcggtgaacaccatcacgcagaaccgcgccaagtcgctgcggcggctgcttgcgtcactgcggaacacgtactacgtcgacgacgaggtggtgccgatcagcttcaacatggacagccgcgtcgacgcggcgacgctgaacgccgtcaactcctccgacgctgaaccagtactaatgtgattcactccacctgactgacattgctcaaagttgagcaacaagacttgtccatcgtgatgaacctgcttgtcagcaacacagttgtaccggatgagctacagaacactgtcaagaccaaggaggttaagcagactaaggaaggaagacctgttaggcaccgagtatgtaatcctagagtgagtgggccggaatgggccatatgagcaccatgtccaggctgtcgatagttgcgtgtgagagagaaagcatcttaaaactaactctgtattcatttggatgagttgaggatgaactaggcggcgaaggcggcggcggcatcaaccctgtcgggttggtgaaatccatctgtgtgtgtgtatcgttgttctgtttgggcgattcttcctctgtccttgggggtagtt

SEQ ID NO: 20964 - DNA, 3969 bp, Oryza sativa
  ref <308>: DATABASE ACCESSION NUMBER: AK071265
  ref <309>: DATABASE ENTRY DATE: 2001-12-06
gtcggcttcgtcttggatttgcttactcttcgagaagcttctagaacataaaggacctaggcagggagcccaatctaccgtgccaagtcttccactcctgcttcttcccaccagccggcggcaccggcaagagttggccgccggccgccgcgtcggggaaggaggcggcgccatttgctaaccactccgccctggcctcaaatccaagatccacagatttggtgctcgccacctgttcgacgtaatgccgcacccgcgaccgcgaggcgggggtgatcggcttggcgccctcccggacgaggccctgcagcacgtgctgcccttcttgccgttgccggaggccgtgcggaccggcgcgctcgcgaggcgctggcgccacctgtggaagtccatgcccgtcctgcgcattaccggcgaggggagggtgctcaaccggagcggcgtcaggaggctgaacagattcgtgaaccacctgctgctcctccgtgaccgcagcgcgcgtctggatgcgtgtgagataaacctcggtacgttccggagccaggatgatccacaaattaacctgtggattcgccacgtgctgctgtgtgaagctcgagaccttcgggttcatctaagcattgataacaacagctttgaaatggaaaacctggcattagtctcccggcatttgacaagattggagctttccaatgtggtgctaaaagaccacttcctcaatttctcgagctgcccagcacttgaggaactagtgacgaggaattgccatattgaagctgaagagatcttgtctgaatccctgaaatggctgaccgcagttgactgtgtattttcttcctatccccggactcgaatttcactcccaagtcttgtcgcactggagctaactgagccttgggggagcactcctgttctggaaagtatgccatctttattaacggcatctataaaactcactgactgtgatgaccattgtggtaaagaagaatttgggggttcatgcgacgataatgcctgtgataattgtggtgctaatggggggagcagcggagattgcgtgctacttgatggtttatcagaggctaaaagcttggagctgatagctaaacctagagtgttcatattcagaagtgatttgatgtggtgtccaacatttggtaagttgaagacgttgttactcaatgagtggtctgtggcaattgatcttgttgagctgatatgctttctgcaacatacacctgttctagagaagctgactcttcaactttgcgagggacctgtcaattggatggaaaatgaagggagctacgacccaacagaaaatccgtttgcatctaagcaacttaaggtagttgaagtcaagtttgaaaagtttgatctgagagttcacaaaattataatgatcttcagtacctatggcgtaaatattgagcaaatctatatccagcgaagtgtggtacattctgaagagcctacggatgattcaggtgctggaccttctcgggttcggacaccgccaatttccacgtcggagaatgctcaattgaaaatcacgattgatcaaatgttaggtcagcaacaggagttactggcacagcaacagcaacagcagcatttcctatcccagttgcagcggcggcagcagatcctctgtgatatcacagcccagctttcgaaatatgctgctcctcccatttctcagaggcctccacaagctaatctttatccttcaggaatatatttctccagccctaccatagggtttggcatataaatcgccctatggtagggcgaggaatgtgacgtggcacccgacaagaggggtccccctgggggggcgctccgtgcatattttacaagcggccccctactggtgataaatcacattagtgaagggtgagaaggggccgcctagggggggggctgcaaaatggcattccccaccataggggagggcgatttattcgccccagctataaaagcctcccctcccctttgaaaatcccattttcttaaaatctagtttaaaaaaaagaggggtaaggggagggtaagaaggaagtggcggagccctgccggattggttactcgactagagatatgtcaagtaagctgatattcgacttttattacggtgaaggcaatgttagatgtggtcagaatggggtagatttgtctgagttcaagtgtatggctaggggcattgctagggctgccaaaaggagttttgaggctgtatgcaactggttgataagaggctttagaatagatccacagactcatggccttacaatttatgctatggttagccgtgaacccataggctatttttgggaactaatgcctatagattgcaccgatatatggagaagatatgtggagatggcatgcgaacgttgttggccacttgctattcttgttcatgtgtacgagaaggggaacacataggatgtggccatgggggatgacgagggaccaattattcctagtgatgtgggaagcatggaagtggaaacgacagagaaaggcaatcatgaactgcaagaaaccatggtggctgaagaacgtgggaaggacgctcaaccggcgcggagtcaggagactgaacaggtttgtgaaccacctgttgctcctccgtgaccgtagcacatgcctgaatgcgtgtgaggtaaatctcggtgcgatctggagccaggatgatccatgtatcaacctatggattcgtcatgcccttctgtgcgaaactcaagctctacaggttcatctaagcattgatagcgacagctatgaactggaagatgtggctcttgtctcccagcatttgatgaggttggacctttgcagtgtggtgctaaaagactactttctcaattttttgtgctgcccagtactgaaggagctattgatgaggaagtgctgtattaaagctcgcaaaatctcatccgaatccctgaaacggctgactgcagttgactgttcattttattcatatccccgagtacgaatttttctcccaagtcttgttgcactggagttaactggacctcaggagaatactcctgttctggaaagtatgccatctttattaacggaatctatagaactcacttactgtgatgatcattgtggtaaagaagaatttgggggtttatgtgactataatgcctgtgacagttgtggtgctaatgggggcagcagcggatattgtgcatatttctatttaaagatatcattcatggattatgagtcattgaatttatactatgttgtttcatacagccacctgtcaattggatggaacaggaagggagctaacagaaaatctgtttgcatttaagcaacttaagtaattaaagtcaagtttgcaaagtttgatccaagagttcacaaaattataatgatctcagtgcctatggcttaaatattgagcaaatctatatccagtgaattgtgatacattctgaagagcctaaggatgattcaggagctggaccttttctactttggattccaccaatctccccctgtggagtgctcaattgaaaagtacgattggcataacctgttgcgttagtcattttgactaaaggcccgcaacaagtcatgccgaactctactggttcgactgatggcgacacaacaatgggggccagagacagcaccagtctacacctctactccttccgtctaaaaaaataaaaagctaacctaggaggggatgttttggacggagggagtaggccaatgacgaggggctgcgagcggccaggaacaggcttgctggcgatgatgggtggctagtggctggtgtggacggagtgacagactcctgttaagtgtgagggtataattttgtttttgtcaatattatgctaagataagtcaaaattgtagttacttacaggattaaatggaacctagagaggtttagatgtttttcgcgttaaaacaataatgaaatattatggt

SEQ ID NO: 20965 - DNA, 1288 bp, Oryza sativa
  ref <308>: DATABASE ACCESSION NUMBER: AK071266
  ref <309>: DATABASE ENTRY DATE: 2001-12-06
ggtagcttcctccctagctgtccgcgactccgcgaccgacggcggcggcggcagatggagaggaaccagcaccgcgacggcgacggcgacggtgagggacgccatcatcatgtcgtccaggtcccagcgtcagcagtagaagttgcagcaatggaggagacctcatcagaggcagcagatcgctctctgcgtcagaaggcagcagcgatggttgcctcctccatggagacgtaccggagcaagcccatgtccttctggctgctgctcgtcctcagcgccggcgcgatgctcacagcgttcccggcgtcgagcctcctgtcgcggctgtactacaacaacggcgggcagagcaagtggatcctgtcgtggtccgccgtcgccggctggccgctgccggcgctcctcctgctgccgtgctacctcgccggcaaggcggcgccgacgccgctgtcgccgaagctgtgcgcctggtacgcgctgctcggcctcctgagcgccgccgacaacctcatgtacgcctgggcctacgcctacctcccggcgtccacggcgtcgctcgtcgccgcgtcgtcgctagcgttctcggcgctgttcggctgcgccatcgcgaagaacaggctgcggctgtcgtcgctgaacgccgtcgtcgtcataaccgccggcgtggtgatcatcgcgctggactccgggtcggacaggtaccccgggatcacgggcaggcagtacgcgctggggctcgtctgggacgtgctcgggtcggcgctccacggcctcatcttcgcgctgtcggagctggtgttcgtccgggtcctcggccggaggtcgttccacgtcgtgctggagcagcaggcgatggtgtcgctctgcgccttcgcgttcaccaccgtcgggctcgccgtgagcggcggcggcttcccggcgatgcggcgggaggcggcggcgttcaggcacggcgaggcgtcgtacgcgatggtgatggtgtggtcggcggtgacgttccagctcggggtgctggggggcaccggcgtgctgttcctggcgtcgaccgtcctcgccggcgtgctcaacgccgtgagggtgccggtgacgagcatcgcggcggtgatctggttccatgaccccatgagcggcttcaagatcctgtctctgctcatcaccgtatgggggttcggctcctacatggttggccactcctctaccaagaaagcatccacaaattgatgtactcttattgttcttctcctggaacatgaaaaatatgtgaactgagtatgttcttgtattgacc

SEQ ID NO: 20966 - DNA, 1044 bp, Oryza sativa
  ref <308>: DATABASE ACCESSION NUMBER: AK071267
  ref <309>: DATABASE ENTRY DATE: 2001-12-06
gttcctcttccgcatcgcctccataattttctttcccctcctctcctcacctcgatctcctcctcctcctcctccgccgcaccgagggtttcgcctccgccttccaccgctgccgcagaggggacgaaccgaggggcaggaatggcggcgcggcacctcagatccggcctccccctcctccgcgcccacctctcccaggagggctcaaggggcttcgcgtcgcaggtggcaaagccgaccgggaaggatatcaaggttccagaagctctgtatggtggcaccggcaactatgctagtgctctgttccttacagcggccaaagctaacttgctggacaaagttgaaactgagattcgcgatgttgtagaggcatccaagaagagtccattgttttctcaattcattaaggacttgtcagtgcccaaagagaccagggtgaaggcaataactgaaattttcgctgaagctggtttttcagatgtcacaaagaatttcttggctgtgctcgccgacaatggcagactgaagcacattgatcgcattgctgagagatttgttgatttgaccatggcacataagggggaggtgaaggtccttgtcaggacagttattccactccccgaaaaagaggagaaggaacttaaggagaccttgcaagatattcttgggaagaacaaaactatcttgattgaacagaagattgactacagcatcatgggagggctagttattcaatttgggcagaaggtgtttgatatgtcgatcaagactagggcgaagcaaatggagatgttcttgaggcaaccccttgatatctaactgccttttggatcgaaagatgcagttgttttgctgctgaaggcatcctcatgtctgttactttgatatggtcttgaaataaatcttcgtttacaagagaacaacactctgttttatcttgttttgtgtgccagaagcctgctgaacaattttatgtcaatttctttgctactaagaaagttatgcaccaaaatgaagggaaattctgtgaagtttgtaattttc

SEQ ID NO: 20967 - DNA, 646 bp, Oryza sativa
  ref <308>: DATABASE ACCESSION NUMBER: AK071268
  ref <309>: DATABASE ENTRY DATE: 2001-12-06
tggcggccatagcgaactgtagggtagcttcgccttagatggcgctcgctagggtttctccccccgcgttctcctcccccttcctgatccattccttactgcgccccttctcttcgccctcctccgtcttgcgccctcgcgtgactcgcgtcccccaccaccgaggcttcgccatcgccgccgccttatctcaggcctctccgcttccctctgcggacggggatggggcggtgatggaggcgccgccgcggccgagctccaggcgcccatggaagcccacgtgcctgtactacacccaggggaaatgcaccatggtgggattttccttccctttctcgcgattcactgtcgtttggttaatgtaattttctgttgccccttgtgacctgcggttcaggtgggttggataccgtatcaataggttagattcaggttcaggtgggtgggtaccgtatcaattaggttagattcagtgcatgagttaataattaaatatgaggatgtgagtttgaacttgatgctgggagaagataatctcttgtggagttgttgttattttgtggagaagtataatagtattgattagtaaaaccttagccttgtaggagcgtcaaattataacaatgcctgtatcctccgcttgctt

SEQ ID NO: 20968 - DNA, 926 bp, Oryza sativa
  ref <308>: DATABASE ACCESSION NUMBER: AK099170
  ref <309>: DATABASE ENTRY DATE: 2002-08-28
ggtcggcgaggccaaggcaggcaggaagccatgggcgacaacagcgccgccgcggcggccgtggccgcgccgcgcggcaggttcggcaggatctgcgtcttctgcggcagcaacgccggcaaccgcgcggtgttcggcgacgcggcgctccagctcgggcaggagctggtgtcgagagggatcgagttggtctacggtggcggcagcgtcgggttgatgggcttgatcgcgcagacggttcttgatggcggctgcggtgttctcggggtgattccaaaagcactcatgcccaccgagatatcaggtgcaagtgttggagaagtgaaaattgtgtctgacatgcatgagaggaaagctgagatggcacgccaatccgatgccttcatcgctcttcctggagggtatggaacaatggaggagttgttagagatgataacttggtcacaacttggaattcatgacaaaccagttgggttgctgaatgtggacggttactatgatccgttgcttgcgctatttgataagggtgcggcagaaggatttattaaggccgattgcagacaaataattgtttcggcaccgactgcgcatgagctgctgagaaagatggagcaatacactcgttcacaccaggaggtagcgccacgtacaagctgggagatgtcagagcttggttatggaaagacaccagaggaatcgtagcataatctgctaatgtgacattgttcctgaaggagaattgcagctgctccttttatctcccattttggttaccttatcgtgttacctgtccagtcaacttcatccggtgaagaagatgcataagaaaatatgtacctaccctcggttttcctgtgggggaatgaacgcatggttatagtccgtataatatttcctgccttacataaattaagaggcatttgagc

SEQ ID NO: 20969 - DNA, 1690 bp, Oryza sativa
  ref <308>: DATABASE ACCESSION NUMBER: AK071269
  ref <309>: DATABASE ENTRY DATE: 2001-12-06
gcagccccccagtagacgctgcctgctcctgctctctcctccgcctgattcctcattcctccaaccagtggtgtgtgcttgctgctgctgctgcttcagttctcgagtagtactccagtacagacaaggcgagtggtggtggtgtttgttgccatggagtcgcagcaggagaaggcggtttctgcgccggcggcgaacgggagcggcggcgccggcggcggcgagctgatcgggtacgtcgacgtgcacgtgcagagcgcgcgggacatccagaacatctgcatctaccacaagcaggacgtgtacgcgcggctgtcgctgccgggggagggggcgccggcggcgtcgacgcaggtcatcaacggcggggggcgcaacccggtgttcgaccagtcgctgcgcctgggcgtgcgcgccggggacgtagacggcgcgctccggtgcgaggtgtggatgctgagccgggtcaagaactacctgcaggaccagctgctggggttcgcgctcgtgccgctcccggacgtcgtcgccgccgagggcggcacgctcgcccgcgagttcccgctctccaccaacgacatcttccactcccacgccgggttcctgcagctcgagctgtcctacatcggggtcgtgcctgaggtcgtgcccatctcgccgacgcccaagccggccctggccgacgcggaggagcaccgcgccggcggcgcggcgaacggtaaggagtacgagaagatcgagttccccgatctgaatctcgtggaggagaaccagatcatgctgtcggagtacatcgggctgccgtgctccgccgtggagccgcagagctccgagagcctcctgacctcggaggaggacggcgacggcgccaccgccgagacccacgtcgccggcgtgcgcgtcgtgcagagcttctcgacggacaacagcaccgccgactcggccggcaccttccggagcgacaccccggtcagcagcgtgtccaccacggagtcccccgccgccgccgcggtcccggccaccccgcagtccaactcctccggcaatgccgtctcgtcggcggagcagaaggagaaggccgcctccgacgccgccgacgcggaggtggagtcctcccgcaccgtgcagagcagcgccagcccggcggcgaactcccccggcgccatgtccgagagcgcggtggataagccgccggtcatccgcgtcaacctcgagcaggaggtcaaggtcgaccagaaggagatcatggacatgtacatgaagagcatgcagcagttcacggagtccctcgccaagatgaagctcccgctggacctggacaacggcagcgacaagagcgcggccgtctccggcgccggcgccgccgcttccgacgcggactccagcggcgccgactcgggcgcggcggccgcggcggcggcgaagaagccgatggccggtgggccggagaaatctcccaaagtattctacggaagccgtgctttcttctgaagcaaagagatggggcatttgcagccgtcggatctcagctgaaacttactactagttcagaggaataacacgttctcctcctcctgctcctgctgctgctgttcttgttctaggcttgtcatcagatctcgcaagacgagcaaactagctgctctgttttaatatatcagtactcttaatgaaaaaaatggtttggttt

SEQ ID NO: 20970 - DNA, 1719 bp, Oryza sativa
  ref <308>: DATABASE ACCESSION NUMBER: AK071270
  ref <309>: DATABASE ENTRY DATE: 2001-12-06
gagctcaacctcacgctcaagctgcatctctctctctctctctctctctctctctctctctcctccagctccggcgaccatcctgcccgccgccattcgccggaagagcccaccagctgcaccggcgtggcatcgtccacttggcgagagtggcggagctagatcggctatcgatatatacataggtggtggatgcgtgcgtgcgaggtggtgagggtgagatgaggtctccggtgggccgcagggaggtggtggtctccggcgtcttcaccgcgctcctcgtcctctccatcctctccctcccgtcgctcctcctcaccggcccggcgtacaagagctggccgttcttggcggcggcgagggacgactccaccaccgggagcggcggcggcgcgggttactacccggtgtcgttcgcgtacctcatctcggcgtcgacgggcgacgcggcgcgggcggcgcggctgctggcggcgctgtaccacccggccaactgctacctgctccacctggaccgggaggcgccggcggaggagcaccggcggctggcggagctggtgtccgggcagcccgtgtacgcgcgcgccgggaacgtgtggatcgtggggcgccccaacctcgtcacctaccgcggcccgacgatgctgtccacgacgctgcacgcggtggcgatgctgctccggctcggccgccggtgggactggttcgtcaacctcagcgcctccgactacccgctcgtcacccaggacgatttgatggatgtgttctccaggttgcctagggatctcaacttcatacagcataccagccaccttggctggaagataaagaagagggcgcggccggtgatcctcgacacggcgctgtacgaggccgaccggtcggagctcatccgtccggcgaacctcaccaccaaccggcgaaatctccccaccgccttcaagctcttcacaggttcagcgtggacgatgatgtcgcggcagttcgccgagtacttcaccgtcggctacgacgacaacctgccgcggacgctgctgctctactacaccaacttcgtctcctcgccggagttctacttccagacgctggcctgcaactcccggcggttcaggaacaccacggtgaaccacgacctgcacttcatccggtgggacagcccgcccaagcagcacccgctctacctcggccccagggactaccgccggatgctgctcagcgccgcgcccttcgccaggaagttcagggaggacgaccccgtcctggacaggatcgaccgggacatcctccgccgcgacggcgccgccccgggccgggctttcgcctacggcgggtggtgctccgaggggggcgtcaggctgtgctccaacccgcaggaggccgggaggaagggcatgataaaggccggtgcagggtccaggaggctcagggccatgctcaacaagatgatgaatgcgagaaatttcaggaggcagcagtgtaggtgaaactagaggcatttttatatacagtctaattctgatgatcagtgtgtgtgttcatgtatataatagaggagaaatcgaattacaggaagaatttgaggcagttttggttgtctggagggaggttaaaagtagagtgacagtgtaatctcacagaaataagaacatgggggtcattagtaaggttgtaaaaaaattgacaggattaacgttcagcttgtgccttggttggttcttc

SEQ ID NO: 20971 - DNA, 1528 bp, Oryza sativa
  ref <308>: DATABASE ACCESSION NUMBER: AK071271
  ref <309>: DATABASE ENTRY DATE: 2001-12-06
gcttcttctccttcaatcgtgtcgtgtcgtctccttgttcggttctttggtgcaggaagcaatggcgattcttcgtgtgtccgtgatgcggctggttgttgcggccatggctgttgcagctggtgttctcttcttctccggcgccggcgaggcgcgcgtgctcctcaccctcgacgacttcggcgccgtcggcgacggcattaccaacgacacgcaggccttcttggacgcctggaacgccgcctgcgcctcgacggagccggccgtcctcgccgtgccggccgggaagacgtaccagatctggccggtgcggctcgccgggccctgcaagaagaagctcaagctcatgatttccgggacgatcgcggcgccggcgagccccgacgagtgggcggggcgcgacccgacgaagtggctctacgtcttccgcgtcgacgacctgtccgtctccggcggcggcaccatcgacggcatgggcgccgagtggtgggcgcgctcctgcaagcgcaagaagaccaagccttgcagcacggtgtctgctcccaaggcgctgcagttcgaggagtgcaggcgggtgagcgtgcaggggatcacgatgcagaacgggccgcagttccacctgatgttcacccggtgcacggacgtcaaggcaagcttcctccgcgtcgtggcgccggagagcagcccgaacaccgacgggatccacctcaacgacaccacccatgcccagatcatggacaacctcatctccacaggagatgattgcgtgtcaatggttggcaattgctctgacgtccgagtgaaggacatatcatgtgggcctggacatggcatcagtatcggaagcttaggcaagaaccggaccactgacagaatagagaacgtgagggtggacacctgcttgctgacaaacacaaccaacggtgtacggatcaagagttggcagggagggatggggtatgctcacaacctgaggttcgagggcatcgtgatgaagaacgtctccaatccaatcatcatcgatcagtactactgtgaccaaccaacaccctgtgcaaaccagacgcaggcggtggaggtgcgcaagatcgagttcgcgggcatccggggcacgtcggcgacggagcaggcgatcaagctggcgtgcagcgacgccgtgccgtgccgggatctggagctgaggaacgtcaacctgaccatggtgggcggcggcgcggcgtcggcgttctgccacagggcgtccgggaaggcggccggcgccgtcgtgccggcgtcctgcctcgccaaggcgccccacaggatgctcggcgacgccacgccggcggccagagtcggttcttgatcgccgccggcaatgcccgatcctggcaacgatcaccggaaaaaagctgaagtataaataccgtacacgtaggtgtagaaactgttgccgtatttgggagagtgtatgagtacagagagttgtaagctgtatacgacgtttgtgtcaagaattttttagagggcattatgtgaagttaaaatggat

SEQ ID NO: 20972 - DNA, 1863 bp, Oryza sativa
  ref <308>: DATABASE ACCESSION NUMBER: AK071272
  ref <309>: DATABASE ENTRY DATE: 2001-12-06
gattcttcctttttccggcgactcgcgaattgcgggtggatttgctgcttccctcgctgtcgactcggctcgggccggtgcttttttaagtgacgtgagaagaaagcgaggcatcgaatccaatccaatccaatccaatccagagtgggggtaaaaccagcgatctttgagggggcattttctttcatttttttactttttggttggcttgggattcgccgccggtgtccgatggagcggttcgtgcagttcttgaggcggggcaatgggttgatggcggcgtcgctggcggcggggagctgcgcggaggaggtggcgaaggcggagggggccgggtgcagggacgacgcggcggcgctgaggctcaagggggtggccatggcgacgatactggtggccggggtggtcggggtgggtttgccgctggcggggcggaagcggcgcgcgctgcgcacggacagcgccgcgttcgtggcggcgaaggcgttcgccgcgggcgtcatcctcgccacggggttcgtccacatgctgcacgacgccgagcacgcgctgtccagcccctgcctccccgcgcacccgtggcggagcttccctttcccggggttcgtcgccatgtccgccgcgctcgccacgctcgtgctcgacttcctcgccaccaggttctacgagggcaagcacagggccgagacggaacgcgtcaaggccgccgccgccgccgcgctcgccgcctcctcggctagcgacgatgacatcaccgtggtcaccgtcaccgaggacgacaacgacaacaaggcgccgctgctgcaacctcactcgcactcacacagccacccccatgggcatgggcatggccacgagttggcgcaaccggagggcagtggcggtgagggggaggtgccggcgcaagtgcggtccgtcgtggtgtcgcagatacttgagatggggatcgtgtcgcactcggtgatcatcggattgtcgctcggggtgtcacggagcccctgcacgatcaggccgttggtggcggcgctctcgttccaccagttctttgaggggttcgcgcttggcggatgcattgctcaggcacaattcaagacactatcagcagctataatggcatgtttcttcgccatcacaacaccagctgggatcgcagctggtgccggtgtggcgtcattctacaacgccaatagcccacgggctctagtggtggagggcatcctcgactccgtgtcggccggcatcctaatatacatgtcgctggttgatctcatcgccgcggacttccttggcgggaaaatgacaggatcgacacggcagcaggtgatggcatacattgcactgttcctcggcgctctctccatgtcatcccttgcaatctgggcctgaaaaccagaggccatgggtttgaagatagttgcacaacaacgcatacagagtagtagtagcagcttttggctcatatcacaacaacatgccctgtttttcatgggcgtgagactaatctggcgctgatagaaaaccggggcattgtaatgtacacatatgtatagcttttgcttgtagctcctactactgcccccaagctcccaaccatatgatcaccacagcaagtgttgctaatgtgacttatgtgaggtggtgatggctggagagtgttgttggctgagtatatatatttttttgttctttcctttttctaatgaaaggtgtttatcttttttaaatgaattggcaccagcagcatctctgcatctgctgctattgtccataacaacagttcgattggtgtgatcatgtgatgtatactccctctgttaacataagggtttaaatttgtacgtaatatagagattcctatgtgat

SEQ ID NO: 20973 - DNA, 1877 bp, Oryza sativa
  ref <308>: DATABASE ACCESSION NUMBER: AK071273
  ref <309>: DATABASE ENTRY DATE: 2001-12-06
gagtgcctcgctgtttcgccgcacccatcgaaatctcacccgctctctctctctcgcgcgcgctgccgccgaggaagtggagctacgtggtggaggggggcgcgtccccagggaaggccgggagggtcagcgggagcgggagggggagggggaggggtggggccgcgtcgccgatgggtgtcaccttcaaggccgtgccgctccagtcgccgctgccgcccgtcgaggaaataatgtccttcattaggtcatatgttgtacctgaaggctttccggatagtgtcactccttcatatgtcccatacatgacatggagagcattgaagcatttctttggtggagcaatgggtgtattcacgacaagaaccttgctaaactctgttggagttgcccaaagtagggcaacatctggagctgtggctatcaactggatactcaaggatggagctggccgagttggaaaaatgctttttgcccgccaagggaagaaatttgactacgacctaaagcagcttcgcttttctggcgatctcttgatggagttaggagctgggatagagttagctacggcagctttccctcaacttttcctacctatggcttgcatcgcaaatgttgttaagaatgttgctgctgttacatcaacctcgacccgtacaccaatctacaaggcatatgcaaaaggagaaaatattggagatgtcactgccaaaggggaaagtgttgggaacattgctgatctgttgggaactggtttgagcattttaatttctaagaggaatccatcattggtgacttcatttgccttcttgtcttgtggctatctccttagttcataccatgaggtgagatctgttgtgctgaacactctaaacacggcaagatttactgtggcagttgattccttcattaagagcggacatgttccctcattgaaggaaggaaactcacaggagactatatttaatccaccatggcggcatcagccagttgcaataggatcaagatttggagaggcatttcaggaacctgcttcttttgttgccataaggcctttgtttgaggatgagaggtacattgttacatataacccaacaaaggacaaggtatatgctttgctcaaggaccaagcaaagccagatgatattctcaaagccgctttccatgcacatgtattactacattttattaatgcatcacatgctaacttgaatgcacggaagcggatgaactccaatcggtcataccaaaatgcaaacccactgaacatggactttataccacacattgctgaatcttgcaagattgtcacttcatcatatggagttttcaagaagaaagcgagggaacagggatggataatgtcagaatcattgcttaaccctggacgagctcggttgtgtggaatagtacctcaatgacccaataatattcgtttgttatagttgaatggatggtacaattttttttcatacatcgaattcgggccctatgtgagtcagcgaacttctttaactaaatcaaccatatcgaagtgaagtacctggcatgcaccgcgcgagacaggatggatgggtacttcaactttggagcgatgtgcaacatcatggggtatgctgactcatggaaagacggggaaggaaggagaaactaaccaaaaaaaatactggactaacaagcttcttgtatatctatctcactatctgtatttagtactctgtataatgagacgggtatccgccatatagtcgtcggtgtatgtattgaccgacctagtttttgtttcgactctactttcattgtttcggctaacttcgcgagtctgttggtgtttgtaaatgccagtttttccataaagaagagctctgtttgtttcc

SEQ ID NO: 20974 - DNA, 1248 bp, Oryza sativa
  ref <308>: DATABASE ACCESSION NUMBER: AK071274
  ref <309>: DATABASE ENTRY DATE: 2001-12-06
gaatagcaatagcgccaagacatacagagaagccacagacgtcgaggcagctagcgcgcgggggaggacaggacactgcagcaagttggccggtgataagcgcgcgaactcgctggcaatatggccgacggcggcggccgccgggctcccgggttccgcttctacccgacggaggaggagctgatatgcttctacctccgcaacaagctcgacggcctccgcgacgacatcgagcgcgtcatccccgtcttcgacgtctactccgtcgacccgttgcagctctcagagattcaccacgagatgctgggcggcggcggcgaggagggggagccgtggttctacttctgcccgcggcaggagcgggaggcgcggggcggccggccgagccggaccacgccgtccgggtactggaaggcggcgggcaccccgggggtcgtctactccgccgaccgccggcccatcgggatgaagaagaccatggtgttctaccgcggccgcgcgccgtcgggaaccaagaccgcgtggaagatgaacgagtacagagcattccactaccccgacgcctcctccgcctccgcctccagcgccggcgccgccgcgccaccaaaccatcttcctccgcagctgaggagcgagttcagcctgtgtcgactgtacaccagatcgggaggcatccggcaattcgatcggcggccgctagcgggtggtggtgatgagaacccggggccatccatggctgccgcggcggcgtcacccgaggaaaacgacggatcaggaagttccatgcagcaactggagctgatggatcaaggtggcgccgttgatccggattgggaccagtgggacgacttggccaccttgaccgcacttctgtactggcctagagattagggatgccaattgtttacatgatcttgctcgtagtgctaactgtgaagtgcatgttacacgtatcaacgaccaagtgtagtacatgcttttttttcttttgccgcgcaaactctccagtattaacataagaaaaaaaaaatcagaacacacacaattttttttggtttctccaaatataattaattaattattgttttcttcagttaatcatatttttctagttggatcttcgcccttggccctgtgggatctcctccaacttttctgataataggatttgtttatactagttcatccgtcacaaaatgtaaggtatacatgtattttagatggtttcattaatacaatacttcttcg

SEQ ID NO: 20975 - DNA, 1487 bp, Oryza sativa
  ref <308>: DATABASE ACCESSION NUMBER: AK071275
  ref <309>: DATABASE ENTRY DATE: 2001-12-06
gatttcgatcccagtagtgttccccattccccactccgtcctaaacggcaaaaccctaaacccgacaccgccatggccgccgccgtccgccgcctcctgcgccgcggcctctccacggccaccgctccgccgcccaccccgggatccatccttaacccgtcctccccatccaccccgctcacatcgcggcagaagagccgcctcgccatctccctcctcaagtccaccccgccgccgccccccgaccagatcctctccatctgccgcgccgcggcgctctccccggactcccacctcgaccgcgtggccctctccctcgccgcctcgaagctctcttccgccccggactccgttcgcgacctcgcctcctccctcctcactccccaccacgccccccacgccatcgcgctcttcggccaggccggcctcctccccgacgccgtctccaccttcaagtcctccccgtcgacccgctccctcaacgccctcctcttcgcctgcctcgtctccggcaaccacgccgaggctgcccgcgtcttccagaccttccccgatgcgtactccgtcaagcccaacactgacaccttcaacgccattatcaagtccttcgccgagtccggcaccacaaggtccttctactcggtgctcgatgaaatgtgccagaagggtgtgaagcccaacgccactacgtttactacggcgattgctggtttttacaaggaggagcggtttgatgatgtagggaaggtgattgagctcatgaagaagcacggttgtggtgagtcgctgccagtgttcaatgttagggtccaggggctgtgcaaacttggtcggagtggcgacgcaaaggcattgctgaatgagatggtgaagaaagggacaaagccgagctggctcacttataatcatttgattcatggattctgcaaggagggggatttggaggaagctaagcggctatacaaggagatggcaaagaaagggcttgttggggatagtagcttctattatatgcttatttattacctttgtaagggtggtgattttgatactgccgttggggtgtacaatgagatagcagccaggaattgggtgccgtgtttttcgaccatgaagatgcttgtgaatgggcttgctggaagctcaagggtcgatgaggcaaaaggtatcattgagaagatgaaggaaaaattcccagataaggctgaagggtggaaggaagtagaggatgctttgcctcaatagaatagcagatggacgaacttgcagaaatcaggaacttcaccaacatttgatcgattgacttgagcagagatttgttacatatgctagttccagctatggcgacaatattttccgtctgggatagttgaggcgtttgaaagtactgtcttaagtcatctgccgaatatgttctggacattattatctggtatgctgttacaaattagtgtggttcaggagatcgatataataaccatacattc

SEQ ID NO: 20976 - DNA, 1365 bp, Oryza sativa
  ref <308>: DATABASE ACCESSION NUMBER: AK071276
  ref <309>: DATABASE ENTRY DATE: 2001-12-06
ggtctccgccgcgagcttcacctgaatccgatccgatcacccttagcaacccagatgttcctcaccgacaagtaccacgcgcttctccctttccacgccagcggcggcggcgtgaaggatcaccggcggaggccgggcaaggcggtgcccggggcggcgggtggtggtcccgggtccgcccggttcggcgccgcgctgtccgcgaggctcgggagtttgctgccgctgccggcgtcgccgttggctgcgttggcgcggctcgcggatctcctcgcgcttgccctcgctgacgctgttcccgcgttggctggtgagggggacgcggccgccgtcgccgcgcacctcgacgccggggtcgcgctgctcgacgcctgcaacgggatcaccgcgcgcctcgaccggctccgccgccgccgcctgctgtcccggttcgcgctccacctcctctcgtcgtcgtcaccaccgctgccttcctcggtccgccgcgcgcgcgccgcgctcgccgaccgtgacgagcgggccccggcgtcgcctcccccgccgctcccttctctcccgttcgaccagccccgcgaccgcgtctccggcgccgcgaccgtcctcctcgccgtcgacgccgtctcctcgctcgcagcggcggccgcgtccgccgtcctctgcggcgacgccctccaccagattgccttccccctggtctccggcgaattcccgtggaccgaggccttcaacgccgtgtccatccagctcgccgccctcgccaccaaacccagcgaggtggacgccgtcgacgaggccgtcggcaagctcaaatccgtgctcgacaacggcgacggcgacctcgacgaggcggcgctgcgggcggcggtgcaggaggtggagaggcggacggaggagctgacggcgccgttggaccggctgtccgacgccgtcaacggcgtgttccgggcggcgctgtgcctccgcaacgcggagctcgggagcatcatggtgggacccgccgaaaagacgccgtgtaaatagccgtttccaccgtgtgtcgtccgtagccatactggtatgtcactgtataaatacaagtataattctggaagtagtacagttctacaggtacagggcaacatggggtggtgtctcagccaaatgcagtggtttggtgctttttctaccagctgttactactatctgtgtgtcaaggttgccacatatgagaacacagtgcaattcgcacccttttgcagatgtggaatccagtaaaaacttgggaaaaccgtggcaactgttcacctacctatgtaattttgcggcttcatacatactgtatgtataccatgaggaactttgtgaagaaaatctctcttaccgact

SEQ ID NO: 20977 - DNA, 1609 bp, Oryza sativa
  ref <308>: DATABASE ACCESSION NUMBER: AK071277
  ref <309>: DATABASE ENTRY DATE: 2001-12-06
ggcaccaacccctaccctgagaagagctaggttttttaccctcctcactctccctcgcgtcggcggccgcgcgcaactttccctgaagccccggatccactcaacccccctccccctccgcgccagatcgttgtgtttatgagctcgaaggagaagcccactcttggaggccagcggattaagacccgcaaacggaatattgctgctcctttggaccctgcatcattctctgatgcaattgtccagatttatctggataatgctggagacctggaacttgttgccaaaagtatcgagtcctcggatctcaacttctcacgttacggtgacaccttttttgaggttgtattcattggagggcgcactcagcctggcacaataaaacctgaggaagaaggagagcgtcacccctattctgtacttgattgtgcagcgcagcgtgaagcaattttgccttctgttctctacattcagaaaacattgcgcaggaggcctttcttgataaagaatcttgaaaatgttatgcgcaaattccttcagtcactggagttcttcgaagaaaatgagaggaagaaacttgccattttcacagcacttgccttttctcagaagttatcaggtcttccacctgaaactgtcttccagccactgctcaaggataatcttgtttccaaagggatagtgctttcgttcattactgagtttttcaaagaatatctgaaggagaacactttagatgatcttattgcacttttgaagaaaggcaaaatggaggacaatttgctggaatttttcccatcggcaaaaagaacctccgaggctttatctgaacatttcactaaagaaggtctgacaagtcttgttgagtacaatgaaaagaagatgtttgaggttaaacttaaggagataaagttaacactgacaacaatgatcaatgaagaggctgaaatatctgaagtcacagaagctgtcaagcaacaggtgaaagatgctaaatttcctgatatagaggttgttcgcatgctatgggatgtgctgatggaggctgttcagtggtctgggaagaaccagcaacaaaattctaattcagcacttcggcaggtgaaagcatgggctggccttttgaatgcattctgcacaagtggcaggcttgaactcgaactcatatacaaagttcagacacagtgctatgaggatgctaagctgatgaagctatttcctgaaataatcagaacgctgtatgaccaagatgtcctagctgaagataccatcctcctttggttccgcaagggttcaaacccaaagggcaggcaatctttcgtcaaagcactggaaccttttgttaaatggctggaggaggccgaggaggaggaataaatggtgctactggaggctgtgcgaatgtattgtttgaatatttccttatatcccaagtttccagctaaagttatgtatcttttgctcccttgttactgggccgaccattttatgatcacatgctgatcctaatagtctactgaatgttaaaatcccatgcaagaagttattccaggatttgctaaattattggttgttacaacttacaagaatgttccatatgttatttctc

SEQ ID NO: 20978 - DNA, 1455 bp, Oryza sativa
  ref <308>: DATABASE ACCESSION NUMBER: AK071278
  ref <309>: DATABASE ENTRY DATE: 2001-12-06
gacgcgtacggcgtaccggcaccttcgatggcggccaccaagcccccgagctgctccacccgcctcagatctccggccaccaccgccgcctgcttcctcccggcgtccctccttctcttcctcctcctcctcctcctccgccgccctcccatgggctccttccctcccacaattccaggtggctccgtgtcgtcgcggcgggcggagctgtacgggaggatggcgagggacctcgacgagcgcggcgcggcgttcttggacggcggcgagacgtcgcagtcgctcacgctgtcggagctcttcgacaccagggacggcgccgtcgtgcccatgctcaaggctgccaacccgccggtgcgcgcgaatgtgctctacctggatcctgagtttgcttccgtgatatcgaaggctgtgaaggaagtgtttcttccttattttaatcaagctatctggttccaaaatatgagcatctaccacttcagtatgtttcacacgtcgcatcacctggaaccaattgtagcaactgaagatgagattgaagctgaagtggatgctgtaaaaagagtcaccgacgatgtttgtccacttaaaattatcttggatcaagtggttttgacatcaactggagtgcttcttggcctgtggcaggttgaatctggtactgatcccgctgatatccgctcaagattgagagaagctcttcctcgtgcaccccaaaagcagctttatgatcctgttatgcttcacacctctttggcacgtattctgggacatccaaagctcccacaagagggtaatgcacagtctcttgatcatgtcaagttcttccatgacctggttgcacaggttaattcaaaaatccgtggcttccaggccacggtaaaagagctatggtttgtagaagagtatgatgtacttgcgctggcattgaacggaaagatgaaggtacggaggctccaattcggttgcaaagaaggtcaaggcaatggaaaaatatagagagaattaccgacgggaacagtgcaatatacttggagcacccaagggtaatgttgttcgaatggctcacctaaaacatcatccacgccgtcatttgatctgccgagctatacaatagatgtgttgggcgactgggaatgcgacaaagtgatgacagattgcaacacatacttgtgcagaaaatcgtatgcaaccatatgtatgtaatttctttcgctgtgaaggtatgccacattgtgttgtacctgtgatgttctctaattttttgtgtctatttatgctccattttctagcatatggagacagtgtaccaatagaaactccaaaatttgctgtacatttttaggggaagaaaggccattcaggaagacgagtcttcactttatatacagaattgttattcttcaggtgtaggaatacacaaatttctccataccattgggacctactaccacg

SEQ ID NO: 20979 - DNA, 1337 bp, Oryza sativa
  ref <308>: DATABASE ACCESSION NUMBER: AK071279
  ref <309>: DATABASE ENTRY DATE: 2001-12-06
gctccggttttctccgcagtttcttgatccatccgcctttcctctcgcagccgtcggcggggggagtggttagttggttactggcttgcagagttttcagagagatttaggcaatggcggaatcaggccaatcgattgcgagtgatgtgactgcactgatcggcaatactcccctggtgtacctgaacaaggtggtggatggatgtgaggcccaaatcgctgccaagcttgagatcatggagccctgctccagtgtcaaggataggattggttatagcatgattacagatgcagaagagaagggtctcattactccaggaaagagtgttttgatcgagcctactagtggaaatactggtattggccttgctttcatggctgctgccaagggttataagctaatcctgacaatgccagcatccatgagcatggaaaggaggatcattcttaaggccttcggtgccgagttggtccttaccgatccacttctgggcatgaaaggtgcaatccagaaggcagatgagctggcagcaaagatgcctaactcttacattctccagcagtttgagaaccctgcaaacccaaagatccactatgagacaactggacctgagatttggaaggccactgctgggaaagttgatatccttgtctctggcattggaaccggtggtacagtaaccggagcaggaaagtacctcaaggagcagaaccctgagatcaagatctatggtgttgaaccgacagaaagtgcaattttatctggaggaagacctggtccacacaaaatccaaggtataggtgctggttttgttcctggtgtacttgatgtcaatctcctggatgaagtggtccaagtctcaagtgatgaagccatcagcatggcgaagcagctagcgttgaaagaagggctgctggttgggatctcatctggtgctgctgcagtcgctgccatcagggtcgcgcagcggcccgagaacaaagggaagctcgtagttgtggtcttcccgagcttcggtgagcgctacctgtcgtctgtcctcttcgaatcgatcaagagggaggccgaaaacatggtgttcgagccatgaacggctccagcattgtgcaaattgtgcttccatggtttagggggcttggagagaatggcgtcccgagtgcatttcttcatgttggtcgcacttgccatcatgtagtcgcttgatctgaataaagaacttacatacatcaatcaaagtctggggattcgatcagctttcctggtgttatatgagcagttcatatgtgtactttcttccatactgaaatgtgtatcttagctactgaagcttccatgg

SEQ ID NO: 20980 - DNA, 1103 bp, Oryza sativa
  ref <308>: DATABASE ACCESSION NUMBER: AK071280
  ref <309>: DATABASE ENTRY DATE: 2001-12-06
ggagtccactgacaagggtgtcccaggtggtggttgcagctgtaaggaatcataggctgaaattgcctgacgatagctcactcctgcatgaggtttcaaaagtgactgaagatgattacaggactcaactcaccactcaattcaggttctttgacaaggctgccatcttgtccgacgagatctcgccggcgcagtggagcccgtggaggctgtgcacggtttcgcaggtggaggagctgaagatcctgctgcggatgttcccggtctgggtgtccatggtcgtcttcttcgtggtgaccgcgcagattacgtcgacgctgatcgagcagggcatggccatggacggccgcgtcggcccgttcacccttccggccgcctcaatcgccaccttcgacgtcatcagcgtcctcgtctgggtccccgtctacgacaccgtgctggtgccactggcacggcgcgtcaccggcaaggaccgtggcatctcccacctgcagcgcattggcgtcggcctcgcgctcgccgcggtggccatggcgtactcggcggtggtcgaggcacggcggctggggacggcgccagcgccggtgagcatcatgtggcaggcgccgtcgtacctggtgctgggcgtggcggaggcgttcagcgtgatcggcatgatggagttcttctacgagcagtcgccggagtcgatgaagagcctgtgcacggcgctcgggcagctcgccatcgcggtcgcaactacctcaactccggcgtgctcgtcgtggtggcggcggccaccacgcgcggcggcggggccggctggatcccggacaacctcgacgaggggcacctggactacttcttctggatgatggctgttgttagcgtcctcaacctgctgcacttcttgcattgctcaatcagatatagagccaataacaacacgctgtcgtcttgacatttatacctacactcttcttgggtgcacattcgtcatggttcatgccaaattaagtatactagccgttaacccgtgcgttgcatgggatatttattaacacgctgtaaatattaaattataactatatattgggtatcttatgaattataacgacttggtt

SEQ ID NO: 20981 - DNA, 1817 bp, Oryza sativa
  ref <308>: DATABASE ACCESSION NUMBER: AK071281
  ref <309>: DATABASE ENTRY DATE: 2001-12-06
gtcttgccacgcacaccaccaaatcgccaaccaaaaagcaaacccccgcgtcttctccgatcagctccgctcgctcgccgccgacgagctcgccccgccgccgacggcgacggcgcatgctagctgcgtatagcccgcggcggagatgaggtcatccagcgattgcaaggttgtggcggcggcggcgaggaagaaggagaaggaggcggcggcgtggccgtggtcgctgtgggggttcctcctgaccggctgcctcggcggcggcggcggcggagggaagaagaagagcggggggaagaaggtgcgtccccgcggcggcggcggcggcggcctgcggcggctgtcgttcacggacctgacgggggcggcggaccaggacctgtcggtgtcgctggtggggtccaacctccacgtcttcaccgtcgccgagctccgcgacgccacccgcgggttcgtctccggcaacttcctcggcgagggcggcttcgggccggtctacaagggcctcgtcggcgacggcgtcaagccgggcctccgcccgcaggccatcgccgtcaagctctgggatcccgagggcgcccagggccacaaggaatggctggcagaggtgatcttccttggccagcttcggcatcccaacctggtgaagctggtcggctactgctgcgaggacgagaaccgcctcctcgtctacgagtacatggagcatggcagcctcgagaaccacctcttcaaacagattcctgcagtgctgccgtggtcgacccgattaaacatcgcggttggcgccgcgaagggtttggcgttcctccacgacgcagagaagccggtcatctaccgtgacttcaaggcctccaacatcctgctcgattcggattacaaggcgaagctgtcggacttcgggctggccaaggacgggccggagggggacgacacccacgtgtcgacgcgcgtgatgggcacccatggctacgccgcgccggagtacatcatgaccggccacctgacggcgaagagcgacgtgtacagcttcggcgtggtgctcctggagatcctgacggggcggcgcgccgtcgacaagacgcggccgaacagggagcagagcctcgtggagtacgcgcggccgtgcctgcgcgacccgctccggctcatccggatcatggacccggcgctggaggggcgctactcgccggcggcggcgagggaggcggccgccgtcgcctaccggtgcctcagcgggagccccaagaaccgccccgacatgtccgccgtcgtcgacgcgctcgagccgctgctcgtcgccaccgacgacgtccccctcggccccgtcgtgctgttcgtcgcgccggatcaggaggccgacgccgccgccgccgccgacgacgacgaggacgacaaggcccggcggcggcagcggcggacgcggaaggacgagcagcaccgccgccgcagccgcctccggacgtcgcccaagggcagcccgaggaagcccgccgtcgccgctgcttgccggaacgaggagttctgggtgtggcacgtccccgccgaccacaaggcgtgagcgagtgacacgtggcgcgttgcatcgcacgccatgtcagccgccgctttgctttgctccacgtgtgcgacgaacattgtgtgtgtgtgtgatgaggtctagtagtaacactggtgatttgattaggatttgcatgcatccctgtactctgtttgtttcagtgagatgcagagtgagagagcgatcaattcataattcacagcacaacgaagatcagatcagaaaatatcttatcaggtctcgtcttctttaatcc

SEQ ID NO: 20982 - DNA, 352 bp, Oryza sativa
  ref <308>: DATABASE ACCESSION NUMBER: AK071282
  ref <309>: DATABASE ENTRY DATE: 2001-12-06
gaacaatgggaaacaaatatcttcatcgaacttatattaactcatcatattgcatgattaacacgatcaatcaacagaagaaagcaataaaaaataaaaataaaaataaaaatgaggctctgttagcctttatgaaggaagggtaggacatatatgcttgatcaatgttcttgggatgaagaattattcacttggacttcattattactcgatcaggcatcagcggcgctcggagatggagcagattcactgctggactcttccgctgggcctggggccgccgcaggcccagccgggctctcagcgggcgcgtcggaggccaacaataccctggagccaccggtgactgtcg

SEQ ID NO: 20983 - DNA, 576 bp, Oryza sativa
  ref <308>: DATABASE ACCESSION NUMBER: AK071283
  ref <309>: DATABASE ENTRY DATE: 2001-12-06
ggttacttgcatgatattggctctctttatatataaacctcgccacaatcacttcaattatcatagttacaagggattcaatactagtgccaaatttgatcatcaacacaaagacaaatcgatcaaaatggagacatcacgcaagttcttcccaacaattgtagttctcctcctgctcgttgtcaccacagctgcacaggcaagggagtgcgagacgccaagcaacgagttcaaggggatctgcatgatggtggccaactgcgccaacgtgtgcctgactgagggcttctccggaggcaagtgcagcggcttccggcgccgctgcatgtgtaccaaggattgctagtcaagtggttaatccaaataactgcgcaaaattgcaacctatctatcttgcatgcttcaatgaataaaccttctctctaatagagccagaaggttttcattcatctcggctacaatactacctgtaacaattttctgtttcatgtaatcttttctttctattttttgtggtttgagtattaattgtattgttttttcttttgttgaagataattaaccccaattcgattc

SEQ ID NO: 20984 - DNA, 836 bp, Oryza sativa
  ref <308>: DATABASE ACCESSION NUMBER: AK071284
  ref <309>: DATABASE ENTRY DATE: 2001-12-06
ttggatcggtcaaactgaaaaagaaaacaagaaaaaatcgctcccctcctcacccttctccctcagatcgtgctcctctccgttgcgccccctcctctcctctccgcatcacgccaccgcgccccctcctctcctctctggctcgcgacttcgccgacgccacaccattgacgacgccttcgattcccgcctccatatcgactcgcgacgccgtgtggtctccatcgcgccgtcgtcactccgccgcaaaaattatgtggctcctgacaagtatattgtgccattgctcccttcgagctcgatggtatgcctttagggttttgtttttgggacaaatggttaggcaggattgctggcgcctcgcctcgtcttcccatccaatccagccagatcgggcttcggagtggccaaactcggagtggccaaactggcggtgcgtgagagaggaaggcgagggaaggattggaggtggatgaggtaagctgcgtcgacggattcatgttgctgctggttgctccaacagttaaagctggtgcttgacgttgctatgggttcttttggtttagataatttgtgtgctgaatttttagctttggttgtttgcccttgacaaaccacggcatgactgtctcggaactcggatcacagtagaattgtattttcccaattcggttctgtcacattcaaaaaataaaagataggtcagtctattgaatgcaccatggggatcaagtgaactgtactagattaggagttttctatgactttgtttcgttgataatgaggatttctattactgattcttcccttttggaataaatacaaatcaacctagc

SEQ ID NO: 20985 - DNA, 1434 bp, Oryza sativa
  ref <308>: DATABASE ACCESSION NUMBER: AK071285
  ref <309>: DATABASE ENTRY DATE: 2001-12-06
gtgcggttaaccccattcgcggggcctccatcgatggaggcctctctcccgtttcaccaccaccaccccgctgcctcctccaccgcggcgcatcacgcggcccgcctcactcctcctcctcctccgcgagacccgcgtgccactgcccgctgggtgccccccgcggccgcgcccgtgcggagccggagcccggcaaatctagggttgccgcccaatcctccccgacgcctccgcctccgcctcgcgccgccgaggataaccgctgcagtcacgggagggccgcgtcgcccccgccgccgagccccgcctcccttggaatgcgccggcggcagcagcagcagcctacgacgaccgcgtgaggaggaggaggaggaggaggaggaggagcgctcttcgacggcgcacgcgggggtgagcctagtgggcgagaacaaagttttgcaaatgtcatcaattgtgccgaaggcgtccaatatcttctggcatgattgtgcagttggccaggctgatcggcagaagctactgaagcagaaaggttgcgttgtttggatcacaggacttagtggttcaggtaaaagtaccctggcatgcacattagatcgagagctccatacaagagggaagctttcttatgttcttgatggtgataatttaagacatggtttgaacaaggatcttggctttaaggcggaagaccgtgctgaaaatatacgcagagttggtgaggtagcaaagctattcgcagatgcaggcctagtatgcattgcaagtttcatatctccgtataggagagaccgtgagtcttgtcgtgcattattgtcagatggtagctttattgaagttttcttgaacatgcccttggaattgtgtgagtcaagggatcctaagggcctttataagcttgctcgtgcaggaaaaataaagggttttactggaattgatgacccttatgaatcaccattaaactctgagattgagatcaaagaagtggatggtgtatgcccttcaccatcggacatggcaggacaagtagtcacttatctagaggagaaagggtttctgcatgattagatgggatgcatcgatcagccggtagagttttctcctccatattagactagttcagaataagtcaagctttggcatgttttctgtacttgtttttgtttagattggttacatgctttgatctacccatattccttcttcactgcacagctaatggagctgtgcaatgacattcaggtaagttggagtagatttgtttttttgggatccaaaatcatcccagttattaacaggccgtagaagatatccatttacttctgttcttacattgtggactttatactgttactgttcttctaccagaatcagtgcctgggctgcgtacatccatcgtggatgaagaggctggattccaatccattttct

SEQ ID NO: 20986 - DNA, 1308 bp, Oryza sativa
  ref <308>: DATABASE ACCESSION NUMBER: AK071286
  ref <309>: DATABASE ENTRY DATE: 2001-12-06
gaaggtgaggcccaagatgacgtggtcggtgttcctccagatcttcgtcctggcactgctcgggcctgtgatcgatcagaacttctactacgccggcctcaagttcaccgggccaaccttcgcatgcgccatgagcaacatcctccccgccatgaccttcgtgatggccgtaatcttcaggatggagaaggttgacctgaagaaggtgaggtgccaggcgaaggtggccgggacgctggtgacggtggccggcgcgatgatgatgacgctgtacaagggcccgctgatgcagatggcgtggacgagccacgtgcaggcgccgcacggccacggcgcggaggcgcccgccgccgccgccgccatcgacccgtcgggcagggagtggttcctcggctcgctgttcgtcatcatcgccaccctcgcctgggcctcgctcttcatcctgcaggcgcacaccctcaagaagtactcggcgccgctctccctcaccacgctcatctgcttcgtcggcaccctccaggccatcgtcgtcaccttcgccatggagcaccgcccctccgtctgggccatcggcttcgacatgaacctcctcgccgccgcttacgccggcatcgtgacgtcgagcatcgcgtactacgtgcaggggctggtgatccagaagacagggccggtgttcgcatcggcgttcagtccgctgatgatgatcatcgtggccggcatgggctccttcatcctcgccgagaagatatacctcggcggcgtcctcggcgccgtcctgatcgtggtcgggctctactccgtgctctggggcaagcacaaggagacccaggagcaggacgcggccatgatggagcttccagtggcctctaagggaaacgacgccgagttcaccgccgccaccgttgttggagacgacgacgacgcggcggactgcaagaaagcaaatggagtgaaaaagtcgtcatcctccaacgagcaaggagctagtgcagtttgacgcagctggctgcagcatgcaggcacaatgcacaatgattccaagtgttttgctgcatcagtcgatcgtggtggagaggttttgtccaaatgctaattaactgtcttctcatgtgagggcgtacgtgtgacggaaacgtttgtgttactgacgttgcatgcattattacttattagggcccggtgattattgagaacgggtggagtggaataattttgttctatgtgcttttcgttttgtcccttcctgtaacctggattccttactccagctacccctgaatcatcagttctccttctgtttttgatcgg

SEQ ID NO: 20987 - DNA, 958 bp, Oryza sativa
  ref <308>: DATABASE ACCESSION NUMBER: AK071287
  ref <309>: DATABASE ENTRY DATE: 2001-12-06
ggctcttccccgattcccaaaccctagcctaggagaagacgagagccgacaccctccgccgccggcttccattgccgccaccgccacagccaacgggcagcaggatggaggctggcaggccggcgagcgctgccgggcagggagaatcctcctcgtcctccggcgcgatggcggtggacgcggctggcggcgtggagaagccgcggttcgaggcgctgatgccgagcgagatgagcggcgggaggccacagttcaggaaggtgccggtgccgcagcaccgcttcgcgccgctcaagaaggcgtggatggatatctacacccccgtctacgagcacatgaagatcgacatccgcatgaaccttaaggcaagaagggtggagctgaaaacaagacaagacacacctgacgtgagcaaccttcagaagtgtgcagacttcgtacatgcttttatgcttggttttgacatcgccgatgctgttgcgctgctccgtctcgatgacctgtatgtggattcctttgagatcaaggacgtgaagacactccgaggagagcatctgtcacgtgctattggccgcttgtcaggaaaaggaggcaagaccaaatatgccatcgagaattctacgaggactcgcatagttatcgctgatacgaagatccatatacttggatcccttgttaacatcaaggttgctcgggattcactctgtagtcttatcttaggttctcctgcaggcaaagtctattctaagctaagggctgtttctgctaggttagcagaaaggtattagatggtgcatcgtaccgttgcagttttggcctcgtaatatgttgtattggctgatttgtgtgcctgggctcttaattgtatcgttcgaatgaacaaacttaaaatgctgagagttttgtaacaatacatatgcattgtgtttagttctgtctgttgcccccctgtttccgg

SEQ ID NO: 20988 - DNA, 1716 bp, Oryza sativa
  ref <308>: DATABASE ACCESSION NUMBER: AK071288
  ref <309>: DATABASE ENTRY DATE: 2001-12-06
ggagggccgtcaaggacatggccattgctatgcatttcgagctccgtgtcgtgaaatctgaccggagccggttcatcgccaagtgcgcgagggaaggctgcccgtggcgtgtgcatgtggcaaagtgccatggtgtcccgactttcactgtacgcacattgcacggggagcacacgtgcgacggtgtgcgtgacttgcatcatcaccaggctaccgttggttgggttgctaggtccgttgaggcaacgctaagagataacccacagtataagccaaaagagatattgcaggatatccgagagcagcatggagtagcagtttcttatatgcaggcatggcgtgggaaggagagaagcatggctgctgttcatggcacccttgaggatggatatcgctttcttcctgcctactgtgagcagattgtacagacaaatcctggcagtgttgcaatatacaaagggactggaccagataatagcttccagcggctgttcgtgtcgttccatgcatctattcatggtttcttaaatgcatgtagaccccttttggaaattgacaaggcagacctcaagggaaagtatcttgggacattgctatgtgcgtcagctgttgatgctgaaaacatgatgttcccgctagcatttggtattgttgacgctgaaagtgatgaaaactggatgtggtttttttcagaactgaggaagatgcttggagttaacacggataagatgcctgtcttgacgatactatctgaaaggcaatcacaagtggttgaagctgttgaagtaaacttccccactgcttttcatggattttgcttgagatatgtgagtgagaatttccgtgacgagttcaaaaatcctaaacttctgaacattttctggagtgctgtttatgctctaacagcagcagaatttgattcaaaggtaaatgatatggtccaagttcaagatgtcatgccatggttccaacgtttcccaccaaatctctgggcagtttcttactttgagggtatccgatatggccattttaatcttgggataactgagatattatataactgggccatggagtgtcatgagtttcctatagtgcaaactgtggagcatatcaaacaccaactgacctgctggtttgttgaacggcaaaacttggcgctatcatacaactcaattcttgttccatcagccgagaaacttatttctgaagctatcgctgattcaggatgctatcaagtccttcgagcaaacaaggtggagtttgaaatagtctcatctgagcgaacaaacattgtggatacgcaagccaggtgctgctcttgtcgtcggtggcaaatatatggcattccatgtgcacatgctgttgctgcactactttcctgtggtgaagatcctcgcttgtatgcacatgaatgcttcagcataatgaagtatcgggaaacttactcccagccaatctattcaattccagatagaagccaatggaacctcccgttttcttttgcacaaggtgcaggaagcaaagcatatgcggttcttcgcccgcccaagatccggaggcctcctggtcgtcccaaaatgaagattcttaagatagaaagcttgaaacggccaaaacgaatcgttcaatgtggccgatgtcatcttcttggacattctcaaaagaagtgttcgttacgaaactgacattagattattgctatcatattgtttatgt

SEQ ID NO: 20989 - DNA, 888 bp, Oryza sativa
  ref <308>: DATABASE ACCESSION NUMBER: AK071289
  ref <309>: DATABASE ENTRY DATE: 2001-12-06
ggatccacttcaaaattcggagggaggaatccaaatcgaatcgaatcgaatcgaagaagcttggggggatattcttgatttgatttgttgttggaagagaagcaaatccaatggcgattgcatcgggggcggctttctcggtgaggccttcgccggcggcggcgaggccgtgcgtcgcggcgtccgcgtcggccgccggcgcggcgaggttccgcggcgacgggagcggtggcggaggcggaggcggaggcggcgggaagtggtgggcgccgctgctggggtggtcggggcagcccgactacatcgacgcgcagccggcggcgcgggaggaggcgcggccgaatccgatggcggcggcggagcagcgtggcggcggcgggaagaggttcggcgtgctgacggaggagaaggcgcggcagctgcgcgcacggatgatggagacggagagcttccacgactgcatgtaccactccgccatcgcctcccgcctcgcctccgccgcccccgccgacgacggcaagcactgagccgccgccgccatccatggctccccgcctctgcccataccgcgccgccatccaacgccgatgatgatgatgatgttgttgtgtcgttttggtatcaataacgtcgccgccgccgacgccgtcaatggccggagaagtattagtatgaggcctcgacggcggcgtgcttgtcggattgattccatggagatgggatgatttcatcctaatatctccatttctgtaactcatagtatagcagctaatgcatctaaacgttgttgtaacaagaaatttaatctggtttcttcaaccatggcttcttctgtactatacatcacaatcactctggaattttcagaaatttcagtgttcatttttt

SEQ ID NO: 20990 - DNA, 1263 bp, Oryza sativa
  ref <308>: DATABASE ACCESSION NUMBER: AK071290
  ref <309>: DATABASE ENTRY DATE: 2001-12-06
ggcttcgaagccaaacccgagctccggggaaaccactagtagccacttgagcttcttcttcgccactgaggggaaggggaagagggatcggaggagatggcgagcaacggcggcgaggagaagagccgggtggcggcggggtacggcgggggagggtacgggtacggcgggtacgaggggcgggacgacaggaagtggtggccgtggctcgtgcccaccgtgattgtcgcctgcatcgcggtgttcatcgtcgagatgtacgtcaacaactgccccaagcacggcagcgcgctcggcggctgcgtcgccggcttcctccgccgcttctccttccagccgctccgcgagaacccgctcctcggcccgtcttccgccactttgcagaaaatgggagctcttgactggaacaaagttgttcatcagcaccaaggatggcgtctcattagctgtatctggctccatgctggcctaatccatttggttgtgaacatgctgagtttactgtttattggaatccgccttgaacagcaatttgggttcgttcgcattggtgccatatacctgctatctggttttggcgggagtgtgttgtctgcgcttttccttcgtaataactacatctctgttggagcctctggagctttatttggactgcttggatcaatgctttctgagcttattatgaactggactatttattccaacaaggcagcagccataataactcttctatttataatcgcaatcaacttggctattgggatactacctcatgccgataactttgctcatatcggtggatttgtgacgggcttccttttgggatttgttttgttggcaaggccacagtttggttggatggaacgacatgagttgccccaaactaatcagcctcccaaatacaaagcataccaatatgttttgtgggttgtggcattcgttttgctgcttgtcgggtttgtggtttcactagtgatgctcttcaagggtaagaatggaaatgacggatgccactggtgccactacctgaactgcgtacccacatcgaagtggaagtgcaatacctaaggagtttagttttctgttgaattttcggcaaaaaaaaaaaaccgtagtattcagaggaccattttatgcttgtgtgtttgtagatatatgaacaaatttgtttatcatgtttgttctttactgtatcgcgatttgttcttcctgtaaatttgttccgtcggccactgaagtttatataggttgagcattctagtt

SEQ ID NO: 20991 - DNA, 1077 bp, Oryza sativa
  ref <308>: DATABASE ACCESSION NUMBER: AK071291
  ref <309>: DATABASE ENTRY DATE: 2001-12-06
gattcgggaggggagggagaggcgatggcggcggccgcagtggcggcggtgggaggggattcgggaggggcggggacagcggagggagaggaggccgtgggaggggaggtggcaggacgccaaggggccgtggcggcggccgcggtggcgggaggggtggcatgaagggcgggagcaaggtggtcgtggtgccgcacaagcgcaacggcgtcttcatcgccaaggccaaggaggacgcgctctgcaccaagaacatggtccccggcgagtccgtctacggagagaagcgtatctcagtccagaatgaggatggaactaaggttgaatacagggtgtggaaccccttccgttctaagctggctgctgctgtgcttggtggtgtcgacaacatctggattgctcctggtactcgtgtgttatatctcggtgctgcctcaggaacaacagtgtctcatgtgtccgatattgttggaccgactggtttggtctacgctgttgagttctcgcacaggagtggtagggatcttgttaacatggccaaaaagaggactaatgtgatccccatcattgaggatgctaggcacccagcaaggtaccggatgttggttggcatggttgatgttatcttctctgatgttgcccagccagatcaggctaggatcttagccctcaacgcatcctacttcctgaagaatggtgggcattttgtcatttcaatcaaggcgaactgtatcgactccaccatgccagctgaggctgtgttcgctagcgaggttgagaagctgaaggcggatcagttcaagccgtcggagcaggtgaccctggagcccttcgagcgtgaccatgcctgcgtcgttggtggctacaggatgcccaagaagcaaaagggcacatcttaatttaaggatacggccatctgcggtcaaagctcaaatgtactagtagaactttttataagcgttagcgtttttgcttaagctattttaattagttcatgctgctgctggttttacagcaatccatgtgtaccgcgaacagagaagttgaaattggttgaatcgacgctaccgattaacc

SEQ ID NO: 20992 - DNA, 1838 bp, Oryza sativa
  ref <308>: DATABASE ACCESSION NUMBER: AK071292
  ref <309>: DATABASE ENTRY DATE: 2001-12-06
gtgaagattcctcgtctcgcttcgctcttgctcttgactccgctctacccgccgccgccgcccaaacgaccaaacgacctcctccttgttcggactttggagcaagcaaaagcaatcgcaattagcaacacatcaatcaaatcctttgttagatttgatgcgagcgtcctccaatccaagattaatttccatctattattagggtactcctacgaaacaacaagtagctagctattagtgagtgagtggagattgagaattggatggggattccgaatcccagcgacgaggtggtgcaagtccggcacggcgatgtcgccggcgagccaaccgtggtgaccattagctgccccgacaagacgggcctcggctgcgacctctgccgccttgtcctcctcttcggcctcaacatcgtcaagggagacatgagcactgatgggaggtggtgctacatcgtgctgtgggtggttgcaaggcccggccgcgccatggcaatgagatgggacctcctcaaggacaggttgatccagctctgccctgtcgccgcgccattcggcctcgacaaccaccacctcgccgccgctggtctccacctccacgaccacgatgcacctgccccctctcccaacatcttcttgctcaaattcttctgctacgaccgtatgggcctcttgcatgacgtgacacgagtgctgtgcgaactggaactcacaattcgtagagtgaaggtctccaccacacctgatgggagagtgctggatcttttcttcatcacagatgctagggaacttctacatacaaagagcagaagggaagagacctatgacaaacttcagagtgttttaggtgactccttgacaagctgtgaaatagaatctgctacggaggaaatgtcctcttgcctccaagcttctactttgttgccacattctgcggtggaagagatgtttaacgtagaggttgtcgaggagcaatccaggtcttgtggtggtttgtcagttgcaatggacaactctcttagtcctgcgcacactcttattcagatccagtgtggtgaccataaaggcctcgtatatgacatcatgagaacactcaaggactgtaacatccagatttcgtatggacgattctatgccagccagaatgggagctgtgaggtagatttgtttgctgtgcaatcagatgggaagaagatcgttgaccagcacaagcaaagagcgctgtgttgtcggctgaggacagagctccaccgtccgctgcgcgtggcattggtaaacagaggccctgacacggaactgctggtggctaacccagtggaggtgtcgggcaagggtagaccgctggtgttctacgacatcacccttgctctcaagaagcttcacaaacggatcttcttggctgagattggtcggcatgtggtgggtgatagggaatgggaggtttacagggtgcaccttggtgagggagatcattcttcattgcggagcaagattgttgatggagtcaccaacatgctcatgggctgggacgacactcctccatcctaatcctactagtagtagttctagttagtttttttatggaacacacgtcctttgccttgtacatagttggtagtggctgctgtaaattgtgtgccttgttaagtcgttcgtggtagaatgcgttggcagtagctagctttgactaatcaatcagcagctaatttcagtctgtttagttagggagcactcccctctagttgtatcactatcaaaactgaatagtgctcaagttatctaacaggaggaaatgcttactcctaattactaaagtggtagtgcccgcaattagtaagc

SEQ ID NO: 20993 - DNA, 1822 bp, Oryza sativa
  ref <308>: DATABASE ACCESSION NUMBER: AK071293
  ref <309>: DATABASE ENTRY DATE: 2001-12-06
gtgtggcgggaaggggtcgtcgtcgagggggcctacacggatgcgcttcttcctcatcttcttcttcgcgagcttcgcctactacgcgctgccgggctacctgctccccatcctgaccttcttctcgtgggcgtgctgggcgtggccgcacagcatcacggcgcagcaggtgggctccggctaccacggcctcggcgtcggcgccttcacactggactgggccggcatctcggcgtaccacgggagcccgctggtggcgccgtggtcgtccatcgccaacaccgccgcgggcttcgtcatgttcatctacctcatcgtgccgctctgctactggaagttcgacacgttcgacgcgaggaagttcccaatcttctccaaccagctgttcacggcgtccgggcagaagtacgacaccaccaaggtgctcacgagggagttcgacctcaacgtggcggcgtacgagagctacgggaagctgtacctgagcccgctgttcgccatctccatcgggtccgggttcctgaggttcacggcgacgatcgtgcacgtggcgctgttccacggcggggacatctggaggcagagcaggtcggcgatgagctccgcggcggcgaagatggacgtgcacgcgaagctgatgcggcggtacaagcaggtgccgcagtggtggttcctcgtgctgctcgtcggcagcgtcgccgtgtcgctggtcatgtcgttcgtgtacagggaggaggtgcagccgccgtggtgggggatgctcttcgccttcgccctcgccttcgtcgtcaccctccccatcggcgtcatccaggccaccaccaaccagcaaccggggtacgacatcatcgcgcagttcatgatcgggtacgcgctgccggggaagccgatcgcgaacctgctgttcaagatctacgggaggatcagcacggtgcacgcgctgtcgttcctcgcggacctcaagctggggcactacatgaagatcccgccgcggtgcatgtacacggcgcagctggtgggcacggtggtcgccggcgtggtgaacctggcggtggcgtggtggatgctgggcagcatcgacaacatctgcgacgtggaggcgctgcacccggacagcccgtggacgtgccccaagtaccgggtcacgttcgacgcgtcggtgatctgggggctcatcggccccgcccggctgttcggccgccacggcctgtaccgcaacctggtgtggctgttcctcgccggcgccgtgctgcccgtgccggtgtggctgctcagcagggcgttcccggagaagaagtggatcgcgctcatcaacgtccccgtcatctcctacgggttcgccgggatgccgccggcgacgccgaccaacatcgcgagctggctcgtcacgggcaccatcttcaactacttcgtgttcaagtaccgcaaggggtggtggcagaagtacaactacgtgctgtcggcggcgctcgacgccggcacggccttcatgggggtgctcatcttcttcgccctgcagaacgcccaccatgagctcaagtggtggggcacggcggtcgaccactgcccgctcgcctcctgccccaccgcgccggggatcgccgtcaagggatgcccggtgttctgagctcgccggccggagctgcacacggtggtgtatgtaggtagcaagaatttgggtttggattggggaaaaaccatgaattcagcctggtgtcagttaactgatacagtcctaatagttgtcagctgttacctcccgtgtgatgagtgtaacaaattggcttcctgcaaggaaatgatatagtagctagtagttcat

SEQ ID NO: 20994 - DNA, 2013 bp, Oryza sativa
  ref <308>: DATABASE ACCESSION NUMBER: AK071294
  ref <309>: DATABASE ENTRY DATE: 2001-12-06
gactcctcactcccattccgccgcgatggcctcgccgcgccaaaaccctgcaccggcgccgccgccgccgcctccggtgatcctcactgacgacctcctggaagagatattcatccgcctcgacacccccgccgacctcgcccgcgcgtcctcctcctgcccgcccttccgccgcgtcatcactgacccctccttcctccgccgctaccgcgccctctacccgccgccgctcctcggcatcctcccccgggacgcggatgccttcctccccgccgagccgccccaccgcagcgcccccgccgccggcgccgtcgacctctcctgcgccttcctccccgaccgccacacctggcgccgccgcgacgtccgcgacggccgcatcctcttctcccgcgaggaggagtactacgcccccgacgacgacggcgcggacgtcctcctcatggatctcgcggtctgcgaccccttctcagggcgctacgccatcctcaccgaaataccgcaagacctaatcgaccccctcgatctcgagggccagagcttcctttgcttcgagcccttcctcgcccccgccaccgccgccgacgacgacgaggacgaggtcggcggcgcctcgttccgggtgatgtacatggcgcgcggcctgaccaagctgatggcgtttatcttcccttgggaagctggggaatggcgcgccgtggagtacgatggttgggctgctctgatcaacgggacatcgacttggctcgccgagatgttctggcgattccatgtacatggcaacatctgctggcttttggattgggcgaacaagctcctgatcctggacaccacaacaaatcagttgtccacaattgagatggttcccggcagctggaagaaagacattgtattcctggagacagaggaaggtcagcttgggctgttcgttctcatcaacaatttttataccagctttgacctctattatgctatttggcaagataatgataagggagtgaagcaatggcgtgtaatagaggctatccagttgcccttaaattattggtatgaaaatctcctggggattgatgggggttacgtgctcctgcaagggattccaaagggttcaaaatcgtcatggcaggcctcttcgcgtcaaaatggatcatcacaggcctcagaatcttcgtcagaggtgccggagcatgtttgtttttcggtggaggtcaagacttttcgggttgagaggttttgtgggactaaccatgccatcaaaactgctaacctgtttaccagttacccaccatcgttgtcgccaccgcgcttatgaaatggaattctactattctgctgctgttcgttggggaatagccgtgatctgtggtcctgctgcgtctgcactcgcgctaggctagtctagttcacctttgcctgcttttgctaagtacttcacgttacctgtcaaacacttgttaagcactaatccatggctaggtatatttaccagacttataatacactttcgttgtgtttcgatctaagctgcttgctaggtactagctagcttattatgttatcaaactattttctttcttctgaacgctgatatgcactgatgatgcgaatgctgtgctggtattcgtagcagagctctggtccatttccaagctaatgtgctgcgtgtggagctcagagtttccattagatatctggtatctaactacctcacttcttttggtgagcaaatcgcttcctagttttgttttattgcttctttctgctgcaattagatgtctgtgtccaaataggaaatcacggttcatctctagaagaatttcagccagaagatgtgtaaatgttgctatgatcttgatcccacggctcgtacaaatttcttgatcgggagattcatgttacaccagtaatatatgcttcgttacatctggggataaaaaaaaagagaggagagataatacttacgagtttgcattccagaattcactttggaagttgaattaatccatatgtagc

SEQ ID NO: 20995 - DNA, 1881 bp, Oryza sativa
  ref <308>: DATABASE ACCESSION NUMBER: AK071295
  ref <309>: DATABASE ENTRY DATE: 2001-12-06
agcaacgacttcttcttcttcctgctctaccttcttggcttttgcctctgttcctcttccaagatttgcgagatggtggcggtgacgccgggcaggcgccgccggcctgcaggatgcgccgcggggcaccaccaccagcaccagcagcagaggctgctggccgtcgccgcccgcctcgccgcggcgaagccggcggccactacggaggccgccgtgtacggtggcgtaggaggaggaggatgctgcctcgagttcctcgactgcgtgctccgggcgatgggcgtcgccaccctggccgagatcatgccccccgcggacttcaggtgggccgcgcgcccgatgcggcggcgccgccgcgggggctcctcgtcctcctcctcctcgccgcgcgaccgcgagccgagggacggccggatcgccgccaacggcgcctccgctgccgcctcgctctacacgatgcggggcaacaagggcgtcaaccaggacgccatgcttgtctgggagaatttctgttcaaaagaagatacaattttttgtggtgtttttgatggccatggaccatatggccatttggtgtccaagagggtcagagatctcctccctataaagttgagtgcaaatttaggaagagatggacacaaagaaacttcaactaacattgtcacaagcagcatgactgaaggtggtggcaccgaacgcatggatagagatactgaaactcccctgggaacggaggagaatggagactaccccgagatgtttgctgcattaagaacttcattattaagggcattttatgtaatggacagggatcttaagtttcataaaaccattgactctgtgttcagtggtactacagcagtcacagtgatcaagcagggacatgatctcctgattggaaacttgggggattctagagctgtcttgggaactagagatgaatatgaccagttttttgctgtacaattgacagttgacctgaagcctaccattccaagtgaagctgcacgaattagggaacgaagtggcagaatattctctctgccagatgagccagatgttgctcgtgtttggcttccgaagtacaacatgccagggttggccatggcaagagcatttggagacttttgtctaaaggattatggtctaatttctatgcctgatgtttcctaccaccgcatcactgaaaaggatgaatttgttgtgttggcaactgatggggtgtgggatgtactttccaactcagaagttgttagcattgtcagccaagccaagtcagaagcctcagcggcacgatttgttgttgaatcggctcaacgtgcatggagaacacggttccccacatcaaaaattgatgactgcgctgttgtctgcctgttcttgaatacagatgctagaaataaaccccccggttcaggaatcaaagatttggccaatgccatagaactgggtggtggtaatctttcttgaccatcaaatcaagcactagggctcttaccgatctcgttactgcattggtaacaggtgatgagtggcctgtccttgatggtgtctcgaaaaatctgcgatagcctacttaagttgcaagggaaagcataaaatccgtacttgtctatggattaggataaccattttgcccaagatttgtgcagcttattatacttgcaatgattcttctgcatgggaagacggagccagtttactttgcttgttggggagtggttgcttggtttattctgcactgcaattagtggttctaggacctctgtttcagttattctgtaaagtatcaaatcagcttagtgcaagtctaaagaaattcagtctagtgctgtggtattattacattttgttcataataatagcgaagatttatatgtc

SEQ ID NO: 20996 - DNA, 597 bp, Oryza sativa
  ref <308>: DATABASE ACCESSION NUMBER: AK071296
  ref <309>: DATABASE ENTRY DATE: 2001-12-06
gacacgcagtgacgcagacgcagccgaatccgaggagaagagagagaaagcgcgtggccggcggcgagaggagcggcggcgatgggcggcggcgggcacggcggcggcacgacgtacaaggggtacaccatcccccacaacaagcgctggcacaccgtcgccggcaagggcctctgcgccgtcatgtggttttgggttttctacagggctaagcaggacggtgctgttctcttgggcatgcgtcatccttgggatggtcatgatgatcactcacatggtcatgggcatgagcatgagggatcatcatcaacatcgtcgtctcactaaatcaactgcttcttggcggctgagggagactcgctgctttggttgtcgcgatgaaatcctcgaagataataaagtttcacactattaattttattaagatgggttcatgttgttggcaactgtttaaggcaaactggttatgtattttgcttttgagatagcctccctcgatggaaaacccatgtatgttgttgcttattaggctgtgtacatccttttggatgtagaggctgggtttttaatccattatctaaaaaaatgttgttgctc

SEQ ID NO: 20997 - DNA, 1611 bp, Oryza sativa
  ref <308>: DATABASE ACCESSION NUMBER: AK071297
  ref <309>: DATABASE ENTRY DATE: 2001-12-06
gcataatttgctcgatcttgtggcgtttcttcctcgtctccatctccaccgctagtgcttggctgcctcctcgtcagattctaggagatggcatcagcagcaatgtctactctgaacctgagttcatctcctctgaccaagcagcagctccgatttggagccagcacactcagtgcagaacacgtcagtggcttcagctctgcaaggccagctccatcgttgtgctgctccagctctcactggcgagcggtcaagctgagaccgagacggcggccatggcggcgcgccgggaaccgggtcgtcgcgcaggccggcggctacaaggtcgccatcctcggcgccgccggtgggatcgggcagccgctctcgctcctcgtcaagatgtcgccgctcgtctcggcgctgcacctgtacgacattgcgaacgtcgatggtgtcaccgccgatcttggacactgcaacacgccggcgaaggtcgccgggttcaccggaaaggaggagctcgccggttgtcttgccggcgtggacgtcgtcgtcatccccgccggcgtgccgaggaagccagggatgacgcgggatgacctgttcggcatcaacgccggcatcgtgagggagctcgtcgaggccgtggcggaccacgcgccggcggcgctggtgcacgtcatctccaacccggtgaaatccaccgtgccgatcgccgccgaggtgctgaagcggaagggcgtgtacgacccgcggaagctgttcggcgtcacgacgctggacgtcgtgcgcgccaacacgttcgtcgcggagatgaagggcctcccgctcgccgacgtcgacgtcccggtggtcggcggccacgcggcggccaccatcctcccgctgctgtccaaggcgaggcccaagacggcgttcaccgatgaggaggtggaggcgctgacgaggcggatccagaacgccgggaccgaggtggtggaggccaaggcgaaggccggcggcgggtccgcgacgctgtcgatggcgtacgcggcggcgaggttcctggaggcgtcgctgcgcgggctcgacggcgacgccgacgtgtacgagtgctcgtacgtgcagtgccaggcggtgccggagctgccgttcttcgcgtgccgggtgaagctgggcagggacggcgtcgaggaggtggcggcggcgggggcggagctccgggggctcacggagttcgaggcgcgcgcgctggaggcgctcaagccgcagctcaagaagagcatcgacaagggcgtcgcctacgcgcagcagcagccagcgacggtggcgatgggttgaaatttgacatacttttcgcagcattttgcgagtgattaccatttgctgaatgcatttccgtgccaattttgcagtggtgctccattagtgatgaccgacaaaagagagatgagagagtatgactggtggaccccatcattttttattcaaaaaatgctgactggattgccacacgtacgctacgtaggacaaaactgctttagattgggtcgaggggggtaaatcatctagaattaaaagtttagggcgaacaatgtctggttttcgggacaagggggtaattcgatcgattgtgatagttcagggggc

SEQ ID NO: 20998 - DNA, 901 bp, Oryza sativa
  ref <308>: DATABASE ACCESSION NUMBER: AK071298
  ref <309>: DATABASE ENTRY DATE: 2001-12-06
gagatcttgaataacaactagaaaagcttcattagcagagtgatcgacaaggaaattaaatggcgtcgtcgttgttgtccatggcgatgttcgtcgtggtcctgatgtgcgcctcagcaatggccgcccaggcgcgcctcccgccggggtctagcccgctggtggcggcgtgcacggcggggccgttctccaagctgtgcgtcaaggacctgggccaccgcctgctggacatccagacggtgctgacgtcggtgtcgaaccacggcgccgccatcgccggcgcgccggggcaggtggacttcaggtccctggtcgccgtcgccatggaggccgccacggagtccggcgcggtggcggcgacggtgttcgaggggaagctccccgggttcaacaagtccgtgccggacttcaaggcctgcctcgacaactgcagcgtgacggtgtcgagcgccatgaaggagatccacggcgccgccgccgcgctcaaggccggcgacgacgaggtcgccaagacgctcgtgcttcgcgccatcaacgacgtcaccatgtgaacgtacagctgcagggagctcaacggcgacatggcggtcatcctggagcacagcctcgtccagttccagaagatgatgaggatcgccgtcaacttcatcagcaagatgaagaagtcaccgcttcctcctcctcctcgttctactcctcctgctcctcctactcctcatcggctgcactgaatatgcttgcttcttcacttcagttcgctggactggattatccagcgattatcccttaattaagagagccccctagttaaccctcttcagtacgtacgttctctggttgcgatcatagttagctagccttcgttttgatttttcagaattgagtaccctaatttcttccc

SEQ ID NO: 20999 - DNA, 1860 bp, Oryza sativa
  ref <308>: DATABASE ACCESSION NUMBER: AK071299
  ref <309>: DATABASE ENTRY DATE: 2001-12-06
ggccttcgtttttttctttcttcccagactttttctccaagttcaactccgcctcctccctcctccctccccccgatctcgggagccatgtcgtggcggtgggctctcgcgcggcgcgtcgccgcgctgggcgcgacgagcggcggtggggacggcgccaccgcccaggcgcagcggctcttctcctcggcggctgccctcctcgggaggcaccctccaccgccgtcgccgccgcactaccagattcggagcaaggtggtgggttgcagaggagctactttcgtgagctcgcgatggttacatgatgctcagtaccaggttcgccaggatgggttatcaaggtctgaggaacagcaggatccatttgagttggttgctgatgagttgtcacttcttgcaaataggctacgatccatggtagctgctgaggtccccaaactggcatcagctgctgagtatttttttaaggtgggagctgagggtaaaagattcagacccacggtattattgttgatggcatcagctctgaaattccccttatcagattcaacagaagtgggagttttaactatactggcaaataagctccgcacgagacagcaaaatattgccgagataactgaaatgattcatgttgcaagccttctacatgatgatgtactggatgatgctgacactaggcgtggcgtcagttcgttgaattgcattatggggaacaagctttctgttctggctggtgacttcctcctgtctagagcatgtgtggcacttgcagcgcttgggaacacagaggtggtatctctaatggctactgctgtagaacatctagttactggtgaaaccatgcaaatctccacaagtagagagcaaaggcgaagtatggattactacttgcagaagacgtactacaaaacagcatcattgatatcaaatagctgcaaggctgtcgctattcttgcagggcacactgctgatgtgtcaatgctcgcatatgaatatggtcgaaacctgagtttagccttccagttgatcgacgatgttcttgatttcacaggcacttctgcatcccttgggaagggttcattaactgatatccgtcatggaatcattaccgcacctatgctttatgcgatggaagaattcccacaactacatgaagttgttgacaggggttttgacaatcctgcaaatgttgagcttgctcttgactacctacagaagagccgcgggattgaaaagacgaaagagcttgcaagagaacatgctaaccgtgcaatcaaagccatagaagctctcccagacagcgatgatgaagatgttctgacatcaaggcgtgctcttattgacatcacagagagagtcatcactagaacaaaatagcaactgttagcattcacaaggtggagaactggagataaggctgattttcgccacaggcgtggtgttccacatggaaatttttgtacactttggtcattgcattctttttcattgtccaagttttgtgtagcgtggatcaaaattaggatctgaatctatggatcggtattcctcaggatcacccccactctgcagctctagtgttcttagttacgggttgcagcaaaatctgtgcattagtattactgattgcaattatcaccagactgtagcactgtagccatataagtggaagcttgaaacataatatacgaggaaaatggatcggctctcctatcatgagagcacgatttcgatatgtttccctacacttctcttgttgcttctgaagagaaatcttgtatgcttaactttgattgttttcaatcttccaagattaggcgcattacaaaatatattgatgtgacccacattttcacc

SEQ ID NO: 21000 - DNA, 1748 bp, Oryza sativa
  ref <308>: DATABASE ACCESSION NUMBER: AK071300
  ref <309>: DATABASE ENTRY DATE: 2001-12-06
gtttccctcgtaccattttcgctgttggtctttattgcagcagctgctgctgttgctcgtgctgagctgagctgaacctgccaatctgcaacactgcaatcgttagcaagttcgctcaactggccagctgctacagatatatctgctgataattgagccccaaccacctttctcttccccctttaaacttccctggtctccgtcctcttcgatctcctctgccgtcgatctcatcggaagagagcgccaagcaagaaagaataattattcctgaagattcctcttctgcatgttgaagtgtacaagacagccacaacaactgaggatatgagctggtggtgttgcattccaaaatccaagaaaggagagaatccttactctcatggcgttagcggtattccgcctgagaaaaacatagggcttttctcttattctgagttgagatcagcaacagaaaacttcaaccgcagtaataaaattggccgaggtggctttgggacagtatacaagggaactattagaaatgggcgagatgttgcggtgaaagttctttctgctgaatccaggcagggcgttcgagaatttttgacagaaattgatgttattaccaatgtgaagcatcccaaccttgttgaattaattggctgttgtgttgaaggaaacaatcgaattttggtatacgagtatttagaaaacagcagccttgaccgtgcattgttgggttctaatagcgaacctgcaaattttacttggagcataagatctgctatatgcataggaatcgccaaaggacttgcatacctgcatgaagagattgcgtcaccgattgtgcacagagatatcaaggctagcaatatacttcttgacaagctttacaaccccaagatcggggacttcggtttagccaagttattccctgataatatcacccacatcagtacccgtgttgctggaacgacaggctaccttgcaccggaatatgcatggcatggccaattgacgaagagagccgatatatacagttttggcgtccttgtacttgagatcgtaagtggcaagagtagttcaaggagtctcctggctgacgataagattctcctagagaaggcatgggagctacatgaggtagggaagctcaaggagctggtggattcagaaatgggagattaccctgaagaggaggtcctccggtacatcaagacggccctcttctgcacgcaggcggcggcggcgcggcggccgtcgatgccgcaggtggtgacgatgctgtccaagcccatccgcatcaacgagcgcgagctcacggcgccgggctacatccacgactacaatggcacggtctccaaggccaccaactccagcaactcgaggttcaagcactcggcgtccgacacctccgacatgttcagcacggtggtgccacccacggtgtccgagatcagcccaaggtgaaaatggaaggaaaacatcaccaggctgattgatgctgatgctgggtctatgtttcttgtcttacctttgcatgttgagttgagtgacagtgcatagagggcacacgtttagatgtgtgccaattgtgaatcgtgttgtttctttccattccttgtgcaaattgcggcatctagatcttgtaaatagtagtaggttgatcctgacttgtttacgtcagagcaattcaagatcgctgcttgttggacattaattttgggggcaattgaacagaacagcttctgtagacatggcacagg

SEQ ID NO: 21001 - DNA, 1447 bp, Oryza sativa
  ref <308>: DATABASE ACCESSION NUMBER: AK071301
  ref <309>: DATABASE ENTRY DATE: 2001-12-06
gagcgcggcagaggaaagaggagaagaaaagatggcggctttcgcctccgctctccgcgttctcccctcgccgccggctgcggtgcctcgtcggcttcgctcgagagaacaaaggcagggctgtagatctcgaaggtattcaaaagtcgtggcttactacgctctcactactccgccgtataaacttgatgccctggaaccttatattagcaagaggacagttgaacttcactggggtaagcatcagcaagactatgtggatagcttgaataagcagcttgctaccagcatgttctatgggtacactctggaggaactaataaaagaagcatacaacaacggcaacccattaccagaatataataatgcagcacaggtatggaaccatcacttcttctgggaatcaatgcagccagaaggtggtgggtcaccagggcgaggtgtcctgcagcagatagagaaggattttggctcttttactaattttagggaagagtttatacgctcagcattatcacttttggggtctggctgggtttggcttgtcttgaagagaaaagaacgaaaattttcggtagtccatacacaaaatgccatcagtccacttgcacttggtgatattccactcatcaatctagacttgtgggagcatgcttactacttggattacaaggatgacaggcgaatgtatgttacaaactttatcgaccatcttgtctcttgggatactgtcactctacgcatgatgcgcgctgaggcttttgtgaaccttggtgaaccaaatatcccagttgcatgatatgagatgatatggatatgacctagagatatctatgcatgtattctcatcatgagcgacgccgaggaatttctagatcacatgatacctgatgctgagattcgcatgcatgagagacacttacaccacctcatgtcctgcacggtgaaatagtggaaatctgcttgaggataaacagctttggttttatcgtcaccttggaattttgatatagcatcaaagcaaccttgacactagagcatgattacagagtatgggccatcgatctaacttcttcttgaagctgcaccacttcttgcaaacgtttatgcttcagaactaggacccatggtcccattatgctttttagattagatcttcatcctaagtttcgacaactcatagctgtagtttttgtctttcttttggcacagaattctgtcattgttaagcctagctttgttccctctattatgtaacctgacctttatgtccccattgctcattccttttgtcgacattgaattatttgatgcgatattttcgcatccattactaagcttttgctcaaagtcacagcctattagccttcacctccaggttattttatcaaatgaatgtaatggcctttggaaataaagaagcatccttggatggactgtttcctgc

SEQ ID NO: 21002 - DNA, 2132 bp, Oryza sativa
  ref <308>: DATABASE ACCESSION NUMBER: AK071302
  ref <309>: DATABASE ENTRY DATE: 2001-12-06
gtgttataccccgtatttttaggatctgggagcggcgtcggcggtggcggtgtcctccagcggcgggcggcgggcgacgggcgaaatcggccagcgacaggtggaatcggctggagaggtagcgctcgtgggtcgccgctgcagtcgccggagatcggagccgggcagaggcgagcggacaagaacgggcgacgctaggatggaggaggagagccctgccccggcgtcggctcaggcttctgctccctctcccactcccgccgccgctgttggtggtgtagcgcctctggatccagcgggaaggtgaagcgcatcatgaagacgccctatcagttggaggttctcaagaggacttacacagttagggctcacagacaagcagctgcagatgtggttctgccaccggcggttgaaggaccgtaaaccaccgccgaagcggcagcagctggaggaggaggttcatgtgccagttatggcgccgcctcctgtgctgccaccaccgctgccacacagcgagctaacaatggctcctggtgggatgtatggcgagcagttgctgccctcctcttcccgtagaggaactggccggccatcagccattcttgatatgtctgatcttcagtgcctccccctactcacgagccacggttaacaaagcatattgagcacataatagatttgataaccaagatggattggattgtatttctgaactaccggactacatatggtcccattcaacatgctacggtttatcggaatgttttgacagaacatactttttcaggcctaatattcttaattttacttgtggccagcgacattgaagctgattgattgtattcctcatcaagggaaagcatggcagattgtacagcttgatgcacttgacgagaggtactcatccacttgatttctgcgtcctcagcggtgattatttccatctgtgcacaggtgagatctggctgcctatttcgttttgtgttattggaagcacatcgatcacaactctacaaatttctcatgagtgttctgggcaggcttgttagctgatatgcacacctctgctcatcttaatgatgtaacaaatgtcgatttatatcactagtgcttggcttttgggctatcggttcatcagtctttggaccacatttaattgataagccaacagtttcttaaatattctttttgatgtgcttgtagtttcttagattttctagttgatatcttgattggctaatagttctatgaatgtttttggttcacacagacatgcgcagaagtgacaatttttcaatctgtctagtggctgctctcaactctcatgttgatttgtaacggttattgctgaatgaaagatggactgagaattttcgttcagagaaattatattcagagctctgagtgtcatgttctctcggtttgcaagtgcagcccttttcataattttttagtttggtcggctggacaattagatactcacagttgggtcaaaagctctgaaatgttatgaaaattatggggctcatacacatatgatgctctaaatgtcaattagaaatatgtcatttgcaaatttgtgtgttgtattctcagaaatctgttcccatctgaatttccatttgttcactcatattggtgagcgttttgaccaaaagagttcctttatgtatttgttattggccttttcaattcactgaattgcgaaatgttcggttgcagggactaagtcaagccctggagagatgattcggctaaggtgggacaccaccgatagcgaggaggtcgttcgcacccgcatcccctcaagcacgccgggtcagcacaaggcgcgcgtgctcccggcggctggccgcggatggccagatacaagaggaccaccggccagccctccatggccgacccgttgccctctttcactccatacctatccaccacgccgccatcgcctccgacaaccatcggtgtaatactaacttggttactacgagaaactctgtgacaagaccaatatgttatgttgagaatcattggtgtaatttagttactaagagaaaatgttaagaaccattagtttaatagtaacttggttactacaaaaaattttgtggcaagatcaataagttatgttg

SEQ ID NO: 21003 - DNA, 1131 bp, Oryza sativa
  ref <308>: DATABASE ACCESSION NUMBER: AK071303
  ref <309>: DATABASE ENTRY DATE: 2001-12-06
gctcgtccccccccccctctctctctctcctccccctcggatctgcctgccctctgcccccaccgtttcaaacctccattcccccaggcgcacgaaccgagagggtcaggaggcgaggatcggaggggagattttcgttcgttccagattcgggacgtgaggggaggcgggagggggagatcatggcgcaccgggtggacaacgagtacgactacctgttcaagatcgtcctcatcggcgattccggcgtcggcaagtccaacatcctctcccgcttcacccgcaacgagttcttcctcgagtccaagtccaccatcggcgtcgagttcgccacccgcaccctgcagatagaagggaagactatcaaggctcagatatgggacacggcaggtcaagagagataccgtgcaatcacgagtgcttattacaggggtgcagttggagcacttcttgtattcgacataacaaagaggcaaaccttcgacaatgttcagaggtggctgcgggagctccgggaccatgcagacgccaacattgttgtcatgatggtcggaaacaagtctgacttaaaccatctacgatcagtccccgaggaagatggccatgcgttctctgagaaagaaggtctctccttccttgagacgtctgctctggaagcgattaatgtggagaaagcattccatactgtattgagtgaaattcaccagattgtaagcaagaaagcacttgcagctcaggaatccgcgtctacaaatgggcgttccatgcaaggaactacgatcaacgttgctgaagctccagccgccacaaaaggttcttgctgttctagttaaaaaagacttttctaaaggaaaagatctttcgaagcgtttgtttttgcagaactgcagaaccaaataggctaatactggtttcacataatctgtcttctcataccgaagcccatgactggtactccttatcacaaggaacatttctaccgtacactataacctgcctgaatcaaaacatttccattttgtatttatgaattaacttaccatggcatccgcttgtatactttgggggaattgaagagcattgtactatgtaacactgattctttcctagtaacaaaatattctttccagc

SEQ ID NO: 21004 - DNA, 952 bp, Oryza sativa
  ref <308>: DATABASE ACCESSION NUMBER: AK099171
  ref <309>: DATABASE ENTRY DATE: 2002-08-28
gatcgtgtactcgtcgtagccaccacaccgcccacacacccacaccgccggtagcgaggcagctcacatggcggcgacggcgacggcgacggcggcgccggaggaggaggaggggaagagggtgatgacgagggcgctggagtgggaagggtgcgtggtgtcgccggtgccgacggcgacggccgacgaggcgtgggctctgctgtcggacttcctcgccttccaccgctggcacccgcgcgtcgccaagtgccgccccgcctcgccgtcggccgcggcgagcacggccgccgccccgccgggctccgtcgtgcggtactgcgagggcacgccgcgcggcgacggggcgccgccggactgggcgcacgagacgctgctcgagcacgacgccgcgcgccgcttcttccgctacgagatgaacgacaacaacatgggcttcggcgtcttcgtcgccacgttccgcgtcgtccccgacgctggcggcggcgacgcggacgcgccggggtgcgagctccggtgggagttcgagggcgaccccgtgcgcggcacgcccaaggaggccctcgtcgcgcgcctgcaggccggcctcgacggcatggcggcgcgcgtgcaggagcacctcatgtccgcccgcgccgccgacgccgccgtcatcgccgccggcggcgtcgaggccgccgacgagctcaaccgggacaaatactctatcgcggtctgagtgttcgtccggtccgtcgatcgatcggtacagtacaccagtatatgcgcggttgctggtcaactttatacgtgaactaatttggctgcaaaaacgtatattgttcgatgaaaatacacgaactctgtcgccgtcttccgtatatatgtacgtacctacgtatacctacctacgtatacggtatactgtgtttgtacgtgcttggggtatgggaataaacgttactaagtactg

SEQ ID NO: 21005 - DNA, 1212 bp, Oryza sativa
  ref <308>: DATABASE ACCESSION NUMBER: AK071304
  ref <309>: DATABASE ENTRY DATE: 2001-12-06
ttttgggttccggggggaggaggatgaccaacggccagtccatcaagttcccgctcctccgcgagaccaccgacgacgtcgagaacaacctctacccgttcgtcaacctcctccccgacggcaacctcttcgtcttcgccaacgaccgctccgtcgtcttcgaccacaggacgggcaaggtcgtccgcgagctccccaagctcgccggcggcgggcggaaccacccggcgtcggccatgtcggcgatgctcccgctcgacctccgcaacctgacccgcggcgccgacccggagccggaggtgatcgtctgcggcggcgcgctcaagacggcgttcaggctgggggagaacaacacgtaccagccgacgctccgcgactgcgcccgcatcaacctaggcaagatcgacgcggtgtgggcggtggaggcgatgccggtgggccgcgtcatgggcgacctgctcgtcctccccaccggcgacctgctcatgctcaacggcgccgccaaggggagctccgggtgggggttcgcgcggcagcccatcctgtcgccgatcctctactcgccgcggcacccggaggggtcgcggttccggccgctggcggcgtcgacggtggcgcggatgtaccactccaccagcgccgtgctcccggacgccacggtgctggtcgccggcgggaacacgaacgcggcgtacaacttcagcggcgtggacttcccgacggaggtgcgggtggagcggttcgcgccgccgtacctgagcagggagctgaccgggaaccgggcggtgatcgacgtggcgtcggtgccggcgggcgggatgcggtacgggaccaagttcacgttcaggttccacacgccggtggcggcggtggagtggggcgacgtgagggtgaccatgtacgcgccgcccttcacgacgcacggctactccatgaaccagcgcttgctcgtgctgcccgtcgccggcttctcggcgcaggggcagatgtacgagctcaccgtcgacacgccgcggaagccggagctcgcgccgccggggtactacctcgtctacgtcgtatccaaggacgtgcccagcgaggccgcttgggtcaaaatacagtaaatgttggtgtaactaatccatgtacactcttcctctctctttttttcctgtgtctgttaccccttttacttaggtagggaaggtatatacggatatcagatcgacc

SEQ ID NO: 21006 - DNA, 1730 bp, Oryza sativa
  ref <308>: DATABASE ACCESSION NUMBER: AK071305
  ref <309>: DATABASE ENTRY DATE: 2001-12-06
gaacggattcgaccatggcggcgacgaggtcgaccgcgacggcggcgctcgcgctctccagaaccctcgcccgccgccccgccgcctcctcctcctctagaagaatctccctcgaactctccgccccgagaggcaccaatccattccaatccgccgcgttctcgtccaccaccaccggagatccgccgccgccgacgatggattcgccgatcaaggtggtgtcgcacatcggggggagcggtggggatgggggagggggagcgatcgacgcggggaggtcggcgaggaagccgctgagcctgtggcccgggatgtaccactcgccggtgaccaacgcgctgtgggaggcgcggtccagcatcttcgagcggatgatcgacgccggggccgcggggaagcagcagcagcagccaccgcagacggagctgctgacgaagacgcccgcggggagccggaccagcatcgtgtacaagttcgccaccgacgacatcctccgggagcagtacagggacccgtggaacgaggtgcgcatcggcaagctgctcgaggacctcgacgccctcgccggcaccatcgccgtcaagcactgttctgacgaagatagcacaacaaggccccttttgctggtgactgcttctgtagataagatggagctaaagaagccaatttgtgtggacactgatctgaagatagctggagctgttacttatgttggccgttcttcaattgatatacaaattgaagtgactcaagttgatcaagatagtgatatgcaatcagatccaatcgctctaacggctaacttcacgtttgttgcacgagattctatgactggaaagtctgctccagtgaaccgcctttcaccagaaactgaaaaggagaaacaactattcgcagagagggaagcaagggacaagctgagaaaaagaaagagagaagaacagaagggggtgtttgaaaatgggataaataagcttcatgttgaggctgagcgactaaatagtttactagcagagggccgtgttttctctgatttgcctgctttagctgatagagatagcatcttgctgaaagacactcgcctggagaactctcttatctgtcagcctcaacaacggaacttgcatggacgaatatttggaggtttcttgatgcaccgagcatttgagcttgccttctcaactgcatatgcctttgttgggcaaagaccttgctttcttgaagttgatcatgttgacttcttaaaaccagtggatgtaggagactttcttcgattcaagtcatgtgtcttgtatacccagctcgacaatgcagagcagcctctggtcaatgttgaagttgttgctcatgtaacaaggcctgagctccggaagagcgaggtttccaacacattccacttcaccttcaccgtctgcagcgatgcattgaagaacggactgaagatacgccatgttgttccctctactgaagaagaggcacggcgcatattagagcgcatggacgcagagggtttgttcgactagtcctgcagaaccgcttgtttcagccacatgtctttttttttttactgatcaacgtcagctaatgggaaatgtaaagatgatttaaataacatcagataagtagtagcatgctggcaatatagcggcaaaatgctagttatatgattacttttgcaattccttttgcagacatttgggggtatataataaacataaacctcgagactc

SEQ ID NO: 21007 - DNA, 1860 bp, Oryza sativa
  ref <308>: DATABASE ACCESSION NUMBER: AK071306
  ref <309>: DATABASE ENTRY DATE: 2001-12-06
ggtccgcgccgcgacgatgcgagcgcaaccacgtttgactcagccgacggcgaccggccgcgtagtacgcgtgtcatcgtcgagctcgagcccatccatccacgtgttcctcctccttcctcgcggcgacgccgacgacggctataaataacccgcgcccccatcccgaccaccgctcctccgcctccgcctctcatatttttcccatttttcacctgccttaattcgccctcctcccataaccgtagtagtaatcgtactcctccattctcgccggaatccagagcgaagctgtaggaaattgttgggaggaggagcaatgccttactgcgaggtggacaggtaccagaacggcgacgagtgggacggcgtccgcctcttctaccgccgcttcggccgcggcgccaccaaggtgctcctcgtcatcggattggcggggacgcacgactcgtggggcccgcagatcaaggggctgaccgggtcgctggagccggccgccgacgacgaggagtccggcgacgccgcggcggcggagggggacgacggcgatggcatcgaggtctgctgcttcgacaaccgcggcgtcggccggagctccgtgctcccgcacaaatcctactactcgacggtgatcatggcgagggacgctctggccttgatggaccatctggggtggaagaaagctcatgtattcggccattccatgggcgcgatgatatcctgcaagctggcagccatggcgccgcacaggatttgctcgttggcgttgcttaatgttactggaggtggcttccagtgcttcccgaagttagatgggcagatgctctcgcttgcattccgtttcttaagggcaagaactccagaagaaagagctctggtagatttggaaacccattatacaaaggaatatcttgatgagaaagttggatcatgcacgaggagaacaatcctctatcaagaatatgtgaagggcatatcatcgacagggatgcagtctaactgtgggtttgaaggtcaagttaatgcatgctggactcacaatatgacaactaaagaactagatacaattcggtctgccggttttctagtttcagttattcatgggaggtctgacattattgcgcaattatgtcatgcgagacgacttgcagaaaggcttattcctgttgctagaatggtcgaacttcatggtgcgcatctagtaagccatgaaagaccagaggaggtcaacaatgcactaatggaattaataaaagccacaaaatctatgatgaaacctgaggaatggtcatcccagccagagaattcatcagaaaccggggctcttatttctgcaagacctgtttccgtcacaatacgaacagatgatgggggaaatgccgcaatagcagtctataacttacttgccaagctgcaactaagctttctttatgtcatagaagtgatactgatggggtttgagcatatgaggaacattgtaaaagtaatgaagccagtaagggtcgcagcaatcgaatcataagaaacaaaactcatgtaaattactctcagagccgtcgaggagacctggtattttcatgtctcctcagtactgtggagatgatggttttagaatagcatctccgaagacttcctgagaaaacttctgctctaagcagaataagtgaacaatacggaagaaaattgatgaggtatttggtgcgcgccttggacagaagcgtcccagggcagaaatgcacaaactgatgtacccgtatgagtgtaaatgttgttaccgtatcacggccttatgctgtcgccattcttttgtatcagcatgaaatgtgattattcccatcaataataaacctggttccctgc

SEQ ID NO: 21008 - DNA, 2518 bp, Oryza sativa
  ref <308>: DATABASE ACCESSION NUMBER: AK071307
  ref <309>: DATABASE ENTRY DATE: 2001-12-06
gaagggcaggaggctccccccccctctcccacctccccgcgatcccatcgccgccgccgcagccgtcgccgccgcatccgtcgccgccatggccttcttcgcgagggcgatccgctactccagcccgtacctgcgctcgcgcgctcctcccccgcccgcggtcgccgcgtcgtgccgctggatctcgccgacggcggcggcggggtcgccggaggcgggcgcggcggtggcgcccgcggacccggagacgccgccccccagggagcccgtgggaggggcgcgggtggagctccccagcaacccggaggacgcgctcgaggtgttcgtggacgggcacgccgtgcggatccccaaggggttcaccgtgctccaggcctgcgaggtcgccggcgtcgacatcccgcggttctgctaccacagccgtctctccatcgccggcaactgccgcatgtgcctcgtcgaggtcgagaagtcgcccaagcccgtcgcctcctgcgccatgcccgcgcttccagggatgaagattaagacaaacacgccagtagcaaagaaagccagggagggtgtcatggagttcctgttgatgaatcatccgctggactgcccaatctgtgatcagggtggggagtgtgatctccaggatcagtctatggcatttggggctgaccgtggtcggttcactgagatgaagcggtccgttgtggacaagaatttgggcccattggtgaagacagtgatgacccgttgcatccaatgtacaaggtgcgtcagatttgctagtgaggttgctggtgttcaagacctgggtatgttaggtcgtggcagtggtgaagaaattggaacatatgtggagaaacttatgacaagtgaactctctggaaatgttattgatatctgcccagttggagcccttacatccaagccatttgcatttaaagctaggaactgggagctgaagggcactgaaactattgatgttactgatgcagtaggttcaaacattagagttgacagcagaggtcctgaagttatgcgtatcgttccacgtctcaatgaggatatcaatgaggaatggatatctgacaaaacacggttttgttatgatggtctgaagaggcaaagactaaacgaccccatgatccgtggtactgatggcaggtttaaggcagtgacatggcgggatgctctcgcagttgttgctgaggttttgcaacaagttaaaccagaagaaatcactggggttgctggtaaactttctgatgcagagtccatgatggcactgaaagattttgttaacaaaatgggttcggataaggtgctttgtgaaggaaatggtccaagtcctcctgcggatctacgttctaactacctaatgaatactagcattgctgggcttgagaaagctgatgtcttccttttggttggtacacagccaagagttgaagctgctatggttaatgcaagaatccggaagactgttagagcgacacaagctaaggttgcttatattggacctccaactgacttcaactatgaccatgagcatcttggcactggaccacaaacccttgttgagattgcagagggtcggcatcccttctgttcaactctgcagtctgctaagaatcctgtcatcattgctggggccgggttatttgaccgggaagaccaagatgcccttttctcaacgatagagactgtagccaaaaaattcaatgtggttagaccagactggaacgggcttaatgttctattgctgcatgctgcacaagctgcagcgcttgatcttggtcttgttgctaatcctacagagagcatcaagtccacaaagtttctgtatctgatgggagctgatgatgtagacttggacaaggttccggatgatgcatttgttgtttaccagggacaccatggtgacaaggctgtgtatagggccaatgttatcctgccatcatcagcattcagcgagaaagaaggcacctatgagaacaccgagggatgcactcagtggacaatcccagctgttcctactgttggtgatgctagggatgactggaagatcctccgtgctctctctgaggtggctggggctcaacttccttatgatagcctctcaggtgtgagggaccggattagcatggtagcaccaaaccttgtgcatgtagatgagagggagccgtgcactatttcctctgaagtgaagcctccggtaaagcaacaagtgagctctactccattcaaaactgttgtggagaacttctatatgactgatgcaatcacaagagcctcaaagataatggcccaatgcagtgcaaccttgttgaagaagtgaaatctacacctttcggaagctattcatcggcagaaaagattttagttccttgtttttgctccaaatttccccagttgttgcatgcttggttggaaattggagtataatttggactgcccttagatttgaagagcagcaaaacttggtctgtgaatttttcttgtgtatgagaagcagagcatactc

SEQ ID NO: 21009 - DNA, 1746 bp, Oryza sativa
  ref <308>: DATABASE ACCESSION NUMBER: AK071308
  ref <309>: DATABASE ENTRY DATE: 2001-12-06
gccccgccgagatggcggctgcgacggcggcggcgggagcagccgccgccgtatccctgctcgcgtgctacctcctcctacacagggacggcgccaagctgccgtgggtcgggcccacgacgaggtcctcccgctcgagcggccggcggacgcggcggaagggcctcgtggaggccatcggaaacacgcccctcatccgcatcaacagcctctccgacgccacagggtgcgagatcctggggaaggccgagttcttgaatcccggaggcagcgtgaaggaccgtgtggcagttaagatcatcgaagaggctctggaatctggtgatcttctctgtggtggtacagtaacagaggggagtgctggaagcacagctattagcttggccattgttgctcctgcttatggctgcaaatgtcatgttgttattcctgatgatgctgccattgagaagtctcaaataatcgaggcgctcggggctacagttgaacgagtgcgccctgtttcaattacacatagggaccattttgtcaatattgctagaagaagggctttagaagcaaacaaatcagcagcggcccagagagagtcaaggtacaaagaaactaatggttcagcgcatgtcaatactagaataatgcacagcaagataacagcaagcaaaggggagtcaaacaaggcactaactaactgttcagccaattctgaaatacaatataacgggaagtgtgatcatgactctgattcaaagggaggtttctttgctgaccaatttgagaatatggcaaactaccgagcccattatgaatggactggtcctgagatatggcaacaaagtaaagggacactgcatgcctttgttgctgcagctggcactggtggcacaattgctggagtctcacggtatcttaaggaaaagaacacaaacatcaaatgcttcttaatggacccacctggatctggtctgttcaataaggttactagaggggtgatgtacacaaaagaggaagctgagggcaaaaggctgaagaatccttttgacactattactgaaggaattggaatcaacagggttacaaaaaattttatgatggcggaactggatggagcttaccggggaacagatagggaagctgttgagatgtcaaggttcttgttgaaaaatgatgggctgttcgttgggagttcttcagccatgaattgtgttggtgctgtaagagttgctcaagatttaggtccaggacatacaattgtgacaattctctgtgacagtgggatgaggcatctaagtaagttcttcaatgaccaatatttggctaaccatggcctgacaccaacagctaccggtctggaatttcttgattgatgagaaaatttcatggggaatatacagtctcagcaagtttttcatgatgtgatgtctgccctgatagctggtgaatactgacgagctggaacatagcagatctcatccagcaagagaactgcttgcatctctggattggtacaaaaattttgtcgtacggctttaagttatcctcaaaatacattgtgatgtattttaattagctggcattgccattgataggggctggtatagccaaacctgcatttcttgtagttttggcatatttcattaggatgtattcagtaaactgtaaaaggatgtttttttcccactgaatcttatattagtgttttttggctaagagactgggaatttgttcgggagatcatttattcttttg

SEQ ID NO: 21010 - DNA, 1610 bp, Oryza sativa
  ref <308>: DATABASE ACCESSION NUMBER: AK071309
  ref <309>: DATABASE ENTRY DATE: 2001-12-06
gggctatatatacgaacaccagacgatgcggcccaaaaaagcaacacgcgtctcgcggagggaaacccgcttttgccgggaacaaacgaaaccaagcgaagcgaggagaagatgttgctgcaccggcaccggcacaggctgctctgctgcggcggcggcgtcgccaccgcccccggccggttcgccggcgatgccatcgcggaccatcagcaggcagccgccggcgccaagaacgcggcggccacgtcgtccgcgaggcagctgtcgtgggcgcaggtggaggccatgacgcgtgggttcacgtcggccgtcgtcggcgagggcggcttcagcaccgtctacctcggccgcgtcgccggctccctcgcggccgtcaaggtccaccgcagcagcgagcgcctccagcgcgccttccgccaggagctcgacgccctcctccgcgtccgccacccccacatcgtccgcctcctcgcgttctgcgaccagcgagacgagggcgtgctggtgctggagttcgcgccgaacgggaacctgcacgaacagctccacggcggcggcggcggcggcgcgatgccgtgggcgcggcgggtggcggtggcgctgcaggtggcgcgggcgctcgagtacctgcacgaccggtgcgagccgcaggtggtgcacggcgacgtcaagtcgtccaacgtcctgctcgacgccgccatgggcgcgaggctctgcgacttcggctcggcgcgcgcggggttctcggcggccgtccactgcccgcgcccgcgtccgtcggcgctcgccgtgctcggctcgccgggctacgtcgacccgcactacctccgctccggcgtggtcaccaagaagagcgatgtctacagcttcggcgtgctgctgctcgagctgctcaccggcacgcaggcgttccgcgacggcatgctgctgacggcggccgtcgcgcccaagctcaagggcgccgccgccggcgacgtggagaagctcgtcgacgagaggctagggtgccagtacaacgccgccgaggcggcgaccgtggcggcgctggcggcggcgtgcatcggcgacaacccgagcctccgcccgtcgatggccgacgttgtacggaccctggagaagcccgcgcaaaaggccggacggtgacgtgcaatgttgtgcgccgtaggatggttagatatgacgtggcaagtatcaggaccgtaggattggatgctgctcccgcgcgtggaaccccttgccgcgattgggttggtgaggagcaagaaagcaatagagacgaagcgtatcaaaattcaaaagcaaccaagcaagcaacgatcgagggtttggttcggacaaggactttttggaggatgtttgtgcagttttttcatagtattttggtggccgatcccgatcattgttgttcatcttctactaggtcgttggcacacaagtgcatgcagcaactgtaagagaggattcaatccacatccactgcatgcatattaaatttttagatgttttttgcacgccttcttcctgcttcagcaagcaccagcacgtaaaataaacgtgcacaaaatctgtaaatacatttgttcagagaatcatatgtttccaattctctc

SEQ ID NO: 21011 - DNA, 1872 bp, Oryza sativa
  ref <308>: DATABASE ACCESSION NUMBER: AK071310
  ref <309>: DATABASE ENTRY DATE: 2001-12-06
gggagaggaagcagtgaaagattagcggcggtgcaagagaagaggagagagcgagacgtcgcctgcgatgacaccggcctcacccgccgccgacaccgtcatcgccgccgcagccgcagccgctgacatccatctcatgggtgtgctgggtcttctccaagtccgtcacggcgcaacagctgggctccggcttgaagggcttgggcgttggggccttctcgctcgactggacagctatctcttccttcctcttcagcccgctcatctcgcccttctttgccaccgccaacatcttcgtcggcttcgtgctcttcctctatgtgctcgttcccatagcatactggggtttcgacctgtacaatgccaagacattccccatcttctcctcgcacctattcatgtccaatggcacgagctacgatatcacagccatcgtgaacgacaagtttgagcttgatatcgatgcttacaataagcttggcaggatcaacctcagtgtgttcttcgcgctcgcttatggtctaagttttgccaccattgcctccactgtcacccacgtggcctcttctatggaaaggaaatctatcaccgttttcgagcttcgcagaaggagaagcctgatatccacactaggctgatgaagaagtacgatgacataccagtgtggtggttctactcactgatggcgctttcgatgacagtggcacttatcctctgcactgtcctgaagcatgaggtccagcttccatggtggggtctactatttgcctgtggcatggccttcatcttcaccctacccatcagcatcatctctgcgacaaccaaccagacacctggtctgaacgtcatcacggagtatgccattgggttgataatccctggtcatcccatcgccaacgtctgtttcaaggtgtatggctacatgagcatgtctcaggctattgccttcctctcagacttcaaacttggccactatatgaagattcccccaaaatccatgttcctagttcagtttattggcacaattgtggccggcacggtcaaccttggggtggcatggtggctgctcggctccatccatgacatttgtcaggattcgctcccagctgacagcccatggacatgccccaacgaccgagtcttcttcgatgcatcggtcatttggggcctcattggcccaatccgcatctttggaccacatggcaactacagtgccctcaactggttcttcctcatcggcgcagcaggccctgttatcgtgtacatcttccacaagatgttcccaaacaagaaatggataacactgactaacttaccagtgctcatcggcgcgacagcctcaatgccaccggcgacggctgtgaattacaactcttggctgctctttggtaccatcttcaatttcttcgtgttccggtaccggaagaagtggtgggagaggtacaactacattctctctgccgcactcgacgctggcgtggctttcatggcggtgctgctgtacttctcactatccatggagaaccggagcatcgactggtggggcacggcaggagaacactgcccactggccacatgtcccactgcaaaaggggttgacttgggtccaacaagcgtttgccctgtgttctaagctaaatctctacttcatgctacaaggtacagctgcaggatagttatgatccattcgagttatgtttacagtctttagattccagcttcatggaagtaaatcctctggtatgtgtaaaggttataggttgatattgcatcgcgcacaaggcaaaagaattgaacaatgctggaacataaatgctgtaatataccaggtcatttgggcaatgcaaaggcatatgttggtacttgaatgct

SEQ ID NO: 21012 - DNA, 1156 bp, Oryza sativa
  ref <308>: DATABASE ACCESSION NUMBER: AK071311
  ref <309>: DATABASE ENTRY DATE: 2001-12-06
gcgcctccccccaaaatttccgacgccagagcgcgaggagacgcacacagagacttggcatttgtagagtttttagatttatagatagcaaagatgtcggcacaggcggagctttcccgtgaggagaatgtgtacatggccaagctcgctgagcaagccgagaggtacgaggagatggtcgaattcatggagaaggtggccaagacggttgactctgaggagctcaccgtggaggagcgcaacctcctgtctgttgcatacaagaatgtgattggagcccgccgtgcgtcatggcgcattatctcctccattgagcagaaggaggaaagccgtggtaacgaggaccgtgtcacactcatcaaggactaccgtggcaagatcgagactgagctcaccaagatttgcgacggcattctcaagctgcttgaatcccaccttgtcccctcttccactgcccctgagtccaaggtcttctacctcaaaatgaagggtgactactacaggtaccttgccgaatttaagaccggggctgagaggaaggatgctgctgagaataccatggtggcatacaaggctgctcaggacattgctttggctgagctgcctcctactcatccaattaggcttgggctagctcttaacttctcagtgttctactatgagatcctcaactcgcctgatcgtgcttgcaacctcgcaaagcaggcttttgatgaggccatctcggagctggacaccctgagcgaggagtcctacaaggacagcactttgatcatgcaactcctccgtgataacctgaccctgtggacttcagacatctcggaggacaccgcggaagagatcagggaagctccgaagcgcgactccagcgaggggcagtaaagccggctttatgtgccctagaagcttgtagctagtgctttgctactgtgtaatgacacctatgtggctgtgattgttgtcgggaaatctggggctcccccgtatgtgaggttgctagcgatggttttgcagtctcgcctttaagctactcgtagcagagcaggtgggggtctgtggagccaggcctggttgggggtgggggagcctcttgaactgcttggtggcacttcctgtttttctgtttgcctttttattggtgtttattgttatggtc

SEQ ID NO: 21013 - DNA, 401 bp, Oryza sativa
  ref <308>: DATABASE ACCESSION NUMBER: AK071312
  ref <309>: DATABASE ENTRY DATE: 2001-12-06
aaaatcactacaacatggtttgacattactgtagggacaaagttgaccattcttttctgctcaggatcaagaactgaccgtaccttgtcaaggtgccgttacataccaacaattctttcatgcttggagttccttcttctgttaaactggcctgtttcaggtgttcagtagccagaataggtgaataacacgtgcagaaaaataggcctgactgctcaacattcagctactatatatggctatacaaatatgcatttggtcttccggtcctttgcgttatatccaatttaatcattcaataaggcattgtgtgtactgttatgtgcatgaagttagaactctgaacttgtaccttttttacactctaccctgaacaagtgaacattgaacaccgggttttg

SEQ ID NO: 21014 - DNA, 871 bp, Oryza sativa
  ref <308>: DATABASE ACCESSION NUMBER: AK071313
  ref <309>: DATABASE ENTRY DATE: 2001-12-06
gctcctccactcaactcgagctccacctccaccgctccaatggcggcggtggccggaaccctagctccactcttcctcctccccctacgccgtcgtcctccactcccccaccccatctccctgatgccgacgtccccctccaccctccgcccccgccaccgccgccgcctcgccgtcgccctggcggcgaacggcggaggcggcggcgatggcgatggtgggcccccggcggaggagggggaggagaagcggcggaagggcccgtcgctcccggcgctgtcggagatccggtggggggagctgctgaccccggagccagcgaacgcggcggcggtggcgctgtcggccgcgctcgcctgggccggcgcgtcgctgctgctgcagctggcgctcatctcgttcgccatattcaccgccgccgtcaagtactccttcgtcgccgcgctcctcctcttcgtcctcatcgctctcctgtgactgtgatataacctttggcctggactagacttgaagctacagctgtggcactagtaacaaggagatattgaccttgtgttcctctcaaatcgaagtacacatgcaggtggatggcctgcttttatataccagtccaccttcaagggaatatgagtatgacctttggatagcactgattgctttgttgtaagccactgaaaagcatcttgcaggtcactgtacatctttcttcctgctcatgtagattcttataaatattgtcatatctctatatgatatacttgtataattgctgttcgtttgttatgattaatttagctgttcctctaagatcttatgtcacatctaatgacttctccattgttctttcccttaaagttggcttatcttgagc

SEQ ID NO: 21015 - DNA, 2081 bp, Oryza sativa
  ref <308>: DATABASE ACCESSION NUMBER: AK071314
  ref <309>: DATABASE ENTRY DATE: 2001-12-06
gatttccccttcccctcccgagtccgcatcgcatcaggcagaggcggcgccagggcacgcatctccccttctcctcccgagtccgcatcgtcatcaggcaaaggcggcgccagggcgcacgctgcatgacgaacgcatggatctcgccgtcggtggtcgccctctgcccctctcccctcccctcatctcgcctcccgggttctgtcctctcctgctggccggacagccgcggcatccggcgcggggctggcgaggggacagccggacagacgctgcggccggcgaggggattcactgtagagaaattaaggaacacagcaataacacgagctaactcagcctgtcttccaatggaggattgtgttggtatcaagtacagcagtgtcaatgagggcgaagagcgtaagggaggccatggcgtcccaaaggtttccatcatcccactcattttcctcatattctatgaagtttctgggggtccgtttgggattgaggatagtgtcaaggctgctggcccactcctagcaattgctggatttctgctgtttgcactcatatggagtgtcccggaagccctgattactgcagagatgggcactatgtttcctgagaatggtggttacgtcgtctgggtctcttcagcccttgggccattctggggttttcagcaaggctgggcaaagtggctgagtggtgtcatagataatgctctctatccagtcctcttcctcgactatgttaagtccagcattccagctcttggaggtggtctcccaaggaccttggcggtgcttatcctcacagttgcacttacttacatgaactacagagggttgacaatagttggctgggtggcagtctttcttggcgtgttctctctactcccgttttttgttatgggattaatagctattccccgaatcgaaccctcaagatggcttgaaatggacttggggaatgtgaattggggtttatatctaaacacactgttttggaacctcaattattgggactcaatcagtacccttgctggagaggttgagaatccaaagagaacactcccaagggcactttcttatgctctagttttagtggtggggggatacctctaccctctgatcacctgtacagcagcagttccagttgttcgggagttctggacggatggatatttctcagacgttgcgagaattcttggtggtttctggttgcactcgtggcttcaagcagctgctgcactgtccaacatgggcaatttcgtaactgaaatgagcagtgattcttaccagcttctcgggatggctgagcgtggaatgcttccagagtttttcgccaagagatctcgctatggaaccccacttattggcatcatgttctccgcgtttggtgtggtcctgctgtcctggatgagcttccaggagatcatcgctgcggagaactacctgtactgcttcggtatgatcctggaattcatcgccttcatcaagctgagggtggtccacccaaacgcctcccgaccttacaagatcccactgggcaccatcggcgctgtcctgatgatcatcccacctaccattctgatcgtcgtggtgatgatgctcgcgtccttcaaggtgatggtggtcagcatcatggcaatgctggttgggttcgtgctgcagccggctctggtgtacgtggagaagagacggtggctgaagttctccataagcgcagaactgccagatttgccgtactcgaacgttgaggaagacagcacaatcccacttgtgtgctgacctgcatatgcatgccatgaaagtagaatccccaaccatagccatgctagacggaaggaacactgcgatttgcgacttgtttcgtctcacggcttttcaaagcctcttcatctgccatgtataattagaagagaagcaagttcaaaattgtgatcatgctatttgtataccatgttggcgtcagggaggattgtaaatcccagggccagtttgaggaaaatacttcacttggctattgccaatagcacctggttattcgttcattatatatgtgctgctgctcttgttagagagattctgagg

SEQ ID NO: 21016 - DNA, 2173 bp, Oryza sativa
  ref <308>: DATABASE ACCESSION NUMBER: AK071315
  ref <309>: DATABASE ENTRY DATE: 2001-12-06
gagcccgctgctggtagaggagaaggcgaagccaagccaagcgaagccaagcaaagggaagcgaagcggagaaaagcttgtcttgtagagaggaggggtctctcgtcgtctcgcgtcggaattctcgcgttgtggccgcggcatgattggtccggcgagcgatcgcggcgagtcggcagcggcggcggccgggaggcggtgggattgatcagcgagctacaattatgggcatccaagggaacaaggcgacgacgcgcgagcacgacttcctctcgctgtacaccaccgccgctaaggatccgtctctccagctccacgacgccaagccgccgcctccttcccaaggtttcttcctgaggacgcacgacttcctgcagccgctggagaagccgacgccggcgccgacgccgcctccgacgagccagctgcagcagcagcagcagcaagcgttccccggcggcatcggaacgttcagcatcagccacgtcgccggcgcacgcccggtcgcggctgccgtcgtcaaggccgagccgacgccgttcgttctctggggccagcccgccgccgccgccgccgcgcacccggtcgccgcactagggcaccaccaccaccaccaccagtggacgctccccttcgccggcgtcgggcaggtggccgccaccgcggcgaggcagcagcaggagtggaaggggcgagtcgggggaggcgggttcatggactctggctccagatccagtggcggcgccgggttcgacgacgacgatggcgtggccgcgcggcgtgaggtctcgtcctcgctcaaagagttgacagtgagggtggatgggaagggtgggagctgcagtggaagtggtactgatcagcggcccagctcaccacgttcaaagcactctgctaccgagcagcgtcggcgcagcaagatcaatgacaggtttcagatacttagggagctgttacctcatagcgaccaaaagagagacaaagcaacatttctgttagaggttattgaatacatacgctttttgcaagagaaagtgcagaagtttgaagcttcagtccctgaatggaaccaagaaaatgcaaagatacttccatggtcaaacatatattttagatcgttctggaaaaattcacaaagtaaaggtcagaaccctggagatgatttgcctgatccttcacagttcatccggaatgggtcctcttctgggtataatttcactggcaaacctgatgataaccacaacatggtgacatcagcagctgcctcaggggcacaagaactggtggaaactgaccatgcagctagcgtgtcctacagatcagcagaaactccgacaaacattaccaacaatgttacatcccaagcccaagcccagtgggctagtccggctggtgtggatgactgtgcaatgaacagcgaaatgttaaataaccaacagttggcaattgatgaaggaacaataagcttgtcaagccaatattcccaacagctacttggtacgttgactcatgcccttgaaagctcaggtgttgatctgtcccaatccagcatatctgtgcagatcaaccttggcaagcgagctgttaagagacctggtgctgatggatcctccagttctaaggagctccccagtacatcagcgaacaacgaaaacatgggtcaccagctgacgatgttagggggtggtactgaagaacttccacacccaacgaagcgccataaatcgggcaacagctgatggcggttctcactctgttgcatcatccagaccgattgatcattctttcctccctaccaaccagccaggacattccagaattggatgtacattatgttagcagtgacggcatcgcgttgaacaaggcagaccttggtgtaattctttcattcaatcacttggccaacctgttttaagaaaaaaaaaagaccaaagaaaggcgcttctcattgtggattgtgaagctgctcttgtacacaggcttccattcctatgagaagctcccccctgacaagacagtcagtcctacgttgtaacctgtatgataactcagctgcacctgttagctatgtgaagtagtaattcgttgaagtattctagatctctagtgcttcattgcacatcacttctctatctctgacctattgtgctgatgagtgaagtattaatccttt

SEQ ID NO: 21017 - DNA, 1125 bp, Oryza sativa
  ref <308>: DATABASE ACCESSION NUMBER: AK071316
  ref <309>: DATABASE ENTRY DATE: 2001-12-06
gagtgttccagggatctgcaatctgttgctctccactcacccgactccaaatcaactccgcaacctccctgtggctctcttcccatcaccaatctccgccacaatccgctcacaagaacacgacgaattcgagcaggacaatctttggtttctggaaccaaccagtaatccatcctcctcatcgatatatactccatacacgtccgggcaagcagaaaccaaaacggaaaagctctcggatttccccgtccccatctcgttctgttcccactagccatggctcatctggtatggatgctgggggagaacggagaggagaagagcttcgagaatcccaacgagttgctgccactctccagacttgaagagatcggtgtgttgtattggcacttggatcctaagaagtctgaaagcgaagaagagctcacaaaaatccgcagagaaagagggtacagctactttgatcttactgagatatgccctgataaattggaaaattatgaggagaagctgaagagcttctattgtgagcacattcatgctgatgaagagatccggtactgcttggagggtagcggttactttgatgtccgtgacaaggatgacaaatggattcggatttggataaaagagggagacatgatcatcctgccagctgggatttatcatcggttcatcgtcgacagcaacaactatatcaagctcatgaggctcttcattggagaaccagtctggaccgcatacaaccggccacaggaagaccatcctgtgaggcaagagtatgtcaagaatgtgaagggggacaccggatttgctcttgccgcacattgagtttgctgaattgggggctcactatacaactgtcctatacatcacactactcatgaaatcatgaacccatgctgtttttatcatgaatcatgaaaacacatatgcagtacacttgaaaactatcatatgtagtactactatccggctatcctacaaaaattttagtactacttgaaacattgcagtatacacagtgactggtcctgtactcttgtgcaatgtactacaccaaaaattgtctataacaagtcggttggataccctaatgaaaatattgctctgtattccatttgg

SEQ ID NO: 21018 - DNA, 1523 bp, Oryza sativa
  ref <308>: DATABASE ACCESSION NUMBER: AK071317
  ref <309>: DATABASE ENTRY DATE: 2001-12-06
ggtccgccccagccttccaagttccaacccccccgccgcatcccctccccccactccactcctcccgaatcccaatggcgtcgtcgtcgtcgtcttcttcgtcgtcgccgccgccgcctccgccgcgccgctccgtgttcgacgccgcctacatccgcgcggagttcgcggcggccggcatctcccctcacttcatccctctcatctggaagtatgtgttgcagaaccccaggtgcggcgacctggacgccgtcccgtcgctcccggcggccgcgtacgcgctccttcggcagaagttccagccgaccacgtcgacgctcaccaccgccgcggagtccaaggaccgcaccactaccaagctccttatccgactcaagaatggggaatctgtagaagcagtgatcatgcggtatgacacgcgattggggaagtatgacgggaagcctcggcctggtggcgtgcgctcaaccctctgtgtctcctcacaggtaggatgcaagatgggctgtagattctgtgctacaggaacgatgggcttcaaaagcaatctgtcttcaggagaaattgtggagcagttggttcatgcatcccgttattctcagattcggaatgttgttttcatgggaatgggggagccattaaacaactatactgctttggttgaagctatccaagtcttgataggctctccattccagctttcacctaagagaattactgtatctactgttgggattatccattccatcaataagttcaataatgatcttcccaatataaatctagctgtgtccttgcacgctcctgaccaagacatacgctgtcatataatgcctgctgcccgggcctttcctttagtaaagctaatgaatgcactgcaatcatatcaaaatgagagcaagcagaccatctttattgagtacatcatgcttgatggagttaacgatcaggagcagcatgcccaccagcttggtaaattacttgaagtgtttaaagcggttgttaatctgataccattcaatcccattggctcatcaaacaatttcaagactagcagcgaacataatgtgaagaagttccagaagatcctaagaggaatttacaacatcagaaccactattcgccagcaaatgggtcaagacatagctggcgcctgtggccagctagtggttagcctccccgatgaaagatcagcgggtggtgccacccttctctcagacattgaagacatcaggatctgacctcatcaaagatgaaatcctcacaagatacctgtaactagcattatagtttcaatgcaggtttaaaatatggaaagttgattttggccggtgtggtgtgtttcccttcatatttgggaggcacaattttgtttgctacacattggcaaaaggccccagcttttgtgtataggcaactatctacgcgaaagtctgcgcaacaaaccctgttattgtagatggggtaatgttatctcagcaacccatccttgcaatgaactgtgaaaaatcgctttgccttgc

SEQ ID NO: 21019 - DNA, 2049 bp, Oryza sativa
  ref <308>: DATABASE ACCESSION NUMBER: AK071318
  ref <309>: DATABASE ENTRY DATE: 2001-12-06
gttcgaaaaagagaggaaaaatactacccgtcctctgcttctctctttctttctcttgctgtgttttcttcttcctccctactactcggtttctgtcagatctccggtgagcatcgaggaggtagaggccgcccccgacgccaacggcggcggcgaggaagccaatcggccccgcgtggaaggcgacggcgaaggtgtcttgcagagcaacgagtcctccgcgaaggtcgatgagccggtagctacagagaacagtgacgctgctcctgctgaggcatctgtagatgctgtgaacggcaagattcctcctaccaagttgattccccaacatcctctggaaggtgttacattgacagaaagaactgtacgtattactgggaataagaagcagatagaagcggcaaaagatattattaagcaagctatgagtcaggttttggtagaagcaaatggtgtaacacggacattggttttgaataggccaaagcagttgaatgccctctcctctgcaatgataacgtgttttttgaggtgcttcactgcttatgaggaagatgatggagttaaactattgattgtgaagggaaaaggaagagcattttgtgcaggtggagatgttgctgcagttgtccggtctataaataatgatagctggaaatatggtgctcattttttccgaaatgaatttctgttaaactatatcattgcaacatatagcaaacctcaggtttcgcttctaactggaattgtcatgggtggaggtgctggtgtttctatacgtggaaggttccgagttgtcacagatagcacggtttttgctatgccagaaacagcgttgggtctctttccagatattggggcttcatattttctatctcgacttcttgggttctatggagagtatgttggtcttactggtgtaaggttggatgctgctgaaatgcttgcttgtggcctagcaactcattttgtaccttcagataggctgtctttgctagaagaatcacttaaaaaggttgatacatctgatccatttgctatatgtggaattatcgatcaatattcgcaacaaccatctctgaaagaaaaaagcgctctgaataggctagaaatcatcaacaaatgcttttccaaaaaaacagtagaagaaatcatagcctctcttgaacaagaggctccaaatgttgctgatgaatggattgcttctgcaatccagtccatgaggaaggcttctcctactagtatgaaaatatccttgagatcgataagagaagggcgaacacaaactgttggtgaatgcttacgtcgagaatatagaatggtttgccatgtgatgcgtggtgacttcagtagagacttctttgagggatgcagggctatattgttggatagagatcgaaacccaaagtggatgcctccaaggttggaagaggtgcacgacgaggtggtcgaaaaatatttttccaaagtcgatgatccagagtgggaagatttggacctacctcctagacgttcccatggaaggaggcttgttcccaagctttgactgaatgaagcctctggtgaaaaactgaagcctttgttggtgcttcttaataacaaacagatcgtccccaatttgagggatatgtggagacaagcgatgaagtttataataaagctgaaacatataatactataggttaacaattttattagtagcaatttagagaagtccatctcatagtctcatgcgatgcttatattggtatcgctattgtgctttttcaaggtgtgaaggtacgcttcaagccaaagcccaactgcataacggcggcccatatgataccggtatcaggctatcctattaggctttgaagctatcttctgcttgtagattctaggtaatcttttatatatattgtataaaagaaattcataagtttgcactgtgttgttttttaagtaaggcctcgaaaaggtagatccctaatatcgagtgtgtcttgtaatgcacttgaactgattgcatttcgttgatgaaatgggaaaggtccactctctttgtcc

SEQ ID NO: 21020 - DNA, 959 bp, Oryza sativa
  ref <308>: DATABASE ACCESSION NUMBER: AK071319
  ref <309>: DATABASE ENTRY DATE: 2001-12-06
gggcctccgccgtccgccggtctgttccggccagtccatctataatagcgacccaacaaaattccgtggcttcctctcctccccccacgccctctgtcgcgctcaggctcagctccctccccgaccccgagagagatagcgtagcttcaattcgctactgctccccgcgcgtgctcctccaagctactagcagtctcccgcctccgtttacccggtccggctccggcatggacgacgccacgtcgtcgtcgtcgcgggcgccgcggcccaagacggaggagctggacgcggcgctccacgccatggggttcgagatcgagcgggtctcccccgcggaggtcaccggccgcctcctcgtcacccccacctgctgccagccgttcaaggtgctgcacggcggcgtgtcggcgctgatagcggaggggttggcgagcatgggggcgcacatggcgtcgggctacagccgcgtcgccggcgtgcagctcagcatcaaccacttccgcagcgccgccctcggcgacaccgtcctcgtccgcgccgccccgctccacgtcggccgctccacccaggtgtgggcggtgaagctgtggaaattggatccatccacgaaggagaagggggctcagatctctgaatccagggtgactcttctctgcaatctgccggtgccggagagcgtgaaaaatgcaggggaggcgctcaagaaatactctaaactgtaaacataataataattaaaagtacaaagcttcatttcgatgctggaaatgaaatggtttgatctcacgataatgtgacatattgtaagtctgttgtaataatgtatatgtcagaggagtcgaggtgtttggtttgggacaattttattgttcttcatgaccaaatttggtcgtgcgcaaaattaaatgtgtaaaaaaaaaaaagaaagggtgaatggtgaagtatttggattccaaacc

SEQ ID NO: 21021 - DNA, 1641 bp, Oryza sativa
  ref <308>: DATABASE ACCESSION NUMBER: AK071320
  ref <309>: DATABASE ENTRY DATE: 2001-12-06
gagcgaagttagaaaaaaaaaaggttgggaaatgaagtccaccacccacctactcgccggcggcggtggcggcggctccgtcgcgccaccaacggctgccacggcgccgacgctggccatggaagtaggggatccctctggcgccctcgtcggcggggccggcggcgccggagccggagggggagacggggatgcccgcgacgcgctcctccggttggttgctctcggcgaccgcatggccgccgtccgccgccgcatcgccgcatctatatccggagaatccgggcccctctcttcctccgacatccactccgtctcctccgagatctcctccgctgcccacctcgtcgtcctcaacgccgcctccctcctctcttccaccgtcgcctccctcccggctccacctccgcctccggctactaccgtccaggagctcccccccgtggtggtctccgtgcctcaggaacccccgcaagaagcagccaagggcgacggcgactacgacgtcgtcgagctcgacgcctccgagcttctcgcggagcacgtccacttctgcgacatctgcggcaaggggttccgccgcgacgccaacctccggatgcacatgcgcgcccacggcgaccgcttcaagaccctggacgcgctctccaggcccggccagccgaagccgcctgccggccgggaggtgcggttctcgtgcccctacgccggctgcaaccggaaccgcgcgcaccgccgcttccggccgctcaagtcggccgtgtgcgcgcgcaaccacttccggcggagccactgccccaagctctacgcctgcgagcgctgcggcggcaagaagcgcttcgccgtcctcgccgacctccggagccacctccgccactgcggcgaggaggcgcagtggcgctgctcctgcggcaccaccttctcccgcaaggacaagctgttcggccatctcgctctcttcgaaggccacacgccggcgatcgccgagccgaacaagggtgtggcgacagcggctgcagaggcatcgatttctatgatggaggaaggaggagttgaagcgaattgtgatcgagaggagggtgaggagggtggttttgatccgaagttcttccaggagtggatggaggagctcagaggtggcgctgttgcccccaattggtctgcgccgtcagaagctggacattagcagtgcagcaagagcaatttgggcctatggtaggaagagatgactgagaagatgaatgaagaagggtcctgtgaagaacagaccttcccccggcttgcctctgtctctctctctctctctcttcccctggtctccccatcttttaccgctcgctgttagcctgttatgcaactctcttttacccatgacaaggatctttataacctggaaagtagtggtatctgtttccgaagcagtcgaaataccaaatgatgaaagatattaaccgttggtacatcgtgttgtatgctcattgtgtatgtcttcatgattcagctttctacggtagtgtagatacaggtttctacacgttacagtagtattaaacacaacatcagcacccaacactgtaacgaacaccatacatgtgagatcttacaattgatcgaggtgaagtcacactgaaggcttctggc

SEQ ID NO: 21022 - DNA, 1024 bp, Oryza sativa
  ref <308>: DATABASE ACCESSION NUMBER: AK071321
  ref <309>: DATABASE ENTRY DATE: 2001-12-06
ggtgtgatcgatcatctggtggtagtgaaccgtgaacacacggcgcgacaggtaaactagtgagagagcgactgcgagatggaggagaagggcgcgtctcccgcggcggcggcggcgacgagcggggagccgggagcggcggcggggacgatgaaggtggtggtggccgtggacgcgagcgaggagagcctgaacgcgctgtcgtgggcgctggacaacgtcatcgggcgccgcgccggcgccgtttcggtcgtcgtcgtccacgcgcagcacggccccgaccacttcgtctaccccgtcgccgcgcacggtatcggatgtcagcacaccggctagaccatatatacaaactagtgttaacttttaccagttcacttcgcatttcacgagactgacacggcgtgtacatgtgcgtgtgtcacggaagcagccatagcctacgcccccgcctcggcgatcgagtccatgaggaaggcgcaggaggagatctccaggaaggtcgtgtcgcgcgcgctcgacgtctgcaagcagagagaggtgagcgcgacgggcgccatcgtggagggcgacgccaaggaggccatctgccaggccgtggaggagatgcacgccgacatgctcgtcctgggaagccgcggcctaggcaagatcaagagggcgttcttgggcagcgtcagcgactacctcgtccatcacgcgtgctgccccgtgctggtcgtgaagcccaccaaggcgcacgacaagtgaactcgatctgctgctcctttgctgcctgatggatgtcctgtgaagtgaagacttggctatcttttgctactgattactcatggagccggtggctgctgttattacttgtgttgaaaataaaaggatatgttaagcttctgaggctggcagttcttatgtagatgcaacgtgcaaactgaaactaatacatggaactgccgttgaagcttctgagctcctgtgtagatgtaatgtgcaaaactgcaaactgaagcaaatacatgagtagtacttgtgg

SEQ ID NO: 21023 - DNA, 848 bp, Oryza sativa
  ref <308>: DATABASE ACCESSION NUMBER: AK071322
  ref <309>: DATABASE ENTRY DATE: 2001-12-06
ggccgacgagtggccgccgctcgcctcccctccccgcaccgcgccgggcgccagatcttccagaagcttctagaacccgcccgctccatccaatgggggacaacgcctccgcctccgcctccgtgctggcgccgccggtgggagcgggtgagggtgacgcgccgtcgttctcctacctcgccgcgctcggcaactgcccgctcgtcgccgccgtcctcgccggcgccatcgcgcagttcatcaaggtgttgaccacatggtacaaggagaatcggtgggacgcgaagcagctggtggggtccggcgggatgccgtcgtcgcactcggccaccgtcgtcgcgctcgccgtcgccgtcggcctccaggaagggttcggcagctcgctcttcgccaccgccgccatcttcgcgtccgtggttatgtatgatgcttttggtgtcaggctacatgcagggaagcaagcagaggtcttgaatcaaattgtgtatgaactcccatcggagcatccactggctgaaacaagaccactccgagaactccttggacacacaccagctcaggtttttgctggtggggtgcttggatttgcagtggccacatttacaggcatgatagctgggcttggtaacactggttcattgccctgactgccggattggcgatatttgtagcttcacgccaaatttgttgaagtgttagaatccaaatcggttatgcgttttcgggtcgcgtacaggagtatgtaaagttttttttttcttttgtggaattcgtaagccaatctcatgtgagaaagaaaactcatgtcattcttttgtagctaagaaataatcagcttatttgtattc

SEQ ID NO: 21024 - DNA, 1726 bp, Oryza sativa
  ref <308>: DATABASE ACCESSION NUMBER: AK071323
  ref <309>: DATABASE ENTRY DATE: 2001-12-06
gacgggcggccacccgccggcacaccgccctgtccgccgccatcccctcctcctcgtcacggcaatggggctcttccagcggcggccgccctctccgccgccttccccgggcgagtaccccggttgcggcgcgcgcgcggggggttaggggaggagcaaaaccaacgccgtcgtggaggtcaccatcgataaggtcagggcgcgcccgccccgacggcgcttccccccgtccgcgtccgcctccgccctgggatcgagggtcgcagcccctgtgagctcaagggcgccgccgtggccaagatccaaggcaggcgctcgcccccacgactccatgcgcttcagcaaaaattcttgtttcgtattttgttgtataaggttgaagtctatgtatacatacgcatttgcctaaactggttggcggagaactgtggaatttattcaaataattcagtttgtgatacattatcaagggtgtaggtagaaattcctggctgctttttttgttcatccgaaaccttggagataaaaacggccatttggaggatctcaatagtttccctttcaaaaaattatagctcttactattggtggacacatgtggatctgtaaactagagagcaccagaattgcacagcagttcagacttcacttgattcagctaccattgctacacaactcaggccgatgtctatctaacgttggattgaagtacaacagcttgcagaacagtgacagtagcacagcacattcattttttttctacaagacagaacacaagagatttggttgagctctcacacagttgacacttgacagtccggctgcatatacaagttgcaatgtgcaatacgtaagaccatgcctctttgcaatcatttatccaggacagaatcaagtagtagaaaaaggataaagaggcaccagcatcttctgctcctgccttgagaaatctgggagaaacacaaattggaactgcagaatttgacgctaacaaagccattcaggacattacttttttttttcatgttagtgatggtgcaattgatactcacctgccaaatacatatattccttgggcatggtactattgagtcatttttcttactcatgtgcaagaatatttttttttccttacacaactctgatctcaagtcccaacgcctctcctagacagcttgaaagaaaaattggacaactccaagacctgaagaactctgcgcaagaagtttcatcagatgacacacttcagatgtttcatgagagcattcttcagagtagccattcattagaggaaccacatgcaacactaaagagagctacagattccagtaggttgcaatttctctcagaggatgttgcgatgctgtgttgcatgaatgcccagatatgaaagaaagtggagaattgacatgagattcataaacaggttggcagaatagcaagcaccaccaaccctattgccggcagagtctctacttgcatcgaattgcagtttgcttaacatcaagggattcaagatgttgattcaggggtggtgttggagatggaagtgattcgattccttgatccggcaaccctggtttcctgtttcaaactcagaaattcttaagaatgtttgtagatcatagaagcctttcctgctcctgctagctgtaaccggttttgtatctgtaacagcagtaaactaaactcgcaatatgaacttacaattataatttttttttcc

SEQ ID NO: 21025 - DNA, 1402 bp, Oryza sativa
  ref <308>: DATABASE ACCESSION NUMBER: AK071324
  ref <309>: DATABASE ENTRY DATE: 2001-12-06
gactgcgccgtgggcccacactgtcagcctctctctctctccctctactcccaccatccgggcgaaatcactcgagcttcacacctgtgtcagatctcggaatcactccgccgccgccgccgcggagctcgccgtcgactcctcctcctcctcctcctctcaccatggcggcgctgctgcttcgtaggctcgccgggacccaccgcggccgcgtgcctctggccgccgccgccgccgtcaccggtggagcggcgctcttctgcgcctcgtctcccccaaccatcgcgctcatggaggagaagggcgaggatgccgctgctaaagttgcgcttaacccagacaagtggctagagttcaagctccaggagaaggcaacagttagccacaattcacaattatttagattttcgtttgacccatctactaagttgggtcttgatgttgcttcatgtctcataacaagggctccaataggagaggaagtggagggaggaagaaaatttgtcattcgcccgtacacacctatctctgatccagattctaaaggatattttgacctgctaatcaaggtttatcctgatgggaaaatgagtcagtatttcgcaagtctgaaaccaggagatgttgttgaggtcaaagggcccattgaaaagctcagatatagcccaaatatgaagaaacaaattggcatgatcgctggtgggactggcataacaccaatgctgcaggttgtcagggctatcctaaaaaaccctgatgacaacactcacgtttccttaatttatgccaatgtgtcaccagatgatatcttgctgaaaagggaattagatagacttgccagtagctatcctaatttcaaggtattctacacggtggacaaaccatcaaatgattggaggggtggtgttggctacatatccaaggacattgccttgaaaggtttgccacggccaggggaggattctctgatccttgtttgtggtcctccaggtatgatgaatcatatatccggtgacaaggcaaaggatagatcgcagggcgagctcaccggcattctgaaagagttaggatacactgcagagatggtatacaagttctgagtgcgtcttcaagacgttagaatgctgacatgcttgctgcaatggcgccatggcaatgatcaaataaaccacagctgaacacttcttttattatgccacagcagttgggttccagacttgagaaagttttgacatttctcaataatgttcattgagaatcacatctttttgcgtggtttgcttctgcgatatgttcttgcggcccatgcacctggatatgcattgcttcagccgtttatgagatggtctggaattgccgtggatgatcttatagagatagatccattcacagatttgagact

SEQ ID NO: 21026 - DNA, 1376 bp, Oryza sativa
  misc_feature (251)..(252): "n"=any one base of a, t, c, or g
  ref <308>: DATABASE ACCESSION NUMBER: AK071325
  ref <309>: DATABASE ENTRY DATE: 2001-12-06
gatcgatctccgagtctccacccatcaagattgcagtaataatccaagctcaataaacgagccaatccgtcgaagaaggaagcagcggcgatggcggcgaggtccggcgaggtgcgggcgacggtgctgggcatggcggtgctggcgctgcttctgctgctcggccaccacgcggcggccatcgaggccaacgtcggcgtcacccgccaggccagcttcagcctgaacggcggcgccggcgacggcgcggnntgctcgcgctggcgctggtgctggcgctggcgctggcgtcggcgctggcatcggagctaacgtcggcgttggcgctcgcgccggcgtcggtgctggcgtcggcgctggcgtaggtgcgaaggtcggtgctggcgtcggtgcgaaggtcggtgctggcgccggcgttggagcacgcgctggcgttggtgcgaacgtcggtgctggcgtcggtgcgaaggttggtgctggcgtcggcgttggcgctggtgctggcgtcggtgcgaaggtcggtgctggcgtcggcgttggcgctggtgctggcgtcggtgcgaaggtcggtgctggcgttggtgcgaaggtcggcgctggcgttggtgctggcgtcggcgccggcgtcggcgctggagctcgcgttggcatcggtgctaacgtcggtgctggcgctggtacgggcgtcggcgctggtgctggcgctggcgctggcgcaggagtcggcgctggcgctcgcgccggcatcggtgctaacgtcggtgcgaacgtcggcgctggcgtcggcgctggtgctggtgctggcgctggcgctggtgcgggagtcggcgctggagctcgcgctggcatcggagctaacgtcggtgccaacgtcggcgccggcgtcggcgctggtgctggtgctggtgctggcgctggtgcgggagtcggcgctcgcgccggcatcggtgccaacgtcggtgccaacgtcggcgctggcgccggcgctggcgctggtgcgggcatcggcgccaacgtcggtgccaacgtcggcgccaacgtcggcgccggcgtgggcgtgcgcgcgaacaggcagaacagcttcagcatgaacagcgcgtgaccgtctgataccaccaaccccggctggttgatccttcacacgcggccgcatcaaactgatgattcttagtccggcttcgtgttgatcttcctgattaattttgttcgtgtgtttttaattattttttgttaatctctatttgttgcagttgcatgccatgcatgcaggctttttttctttcatcgaatcattcagtgttcttgtgtttgtaatctcttgttcttcttcgtgatctcggagatatataaatatatatatagcgattttaactgtt

SEQ ID NO: 21027 - DNA, 746 bp, Oryza sativa
  ref <308>: DATABASE ACCESSION NUMBER: AK071326
  ref <309>: DATABASE ENTRY DATE: 2001-12-06
gggatcggcgggcggcctcgtcctcgtcgggacgacggcagacaatggccgccgccgcgatgatcctcccattactattgctattgtgttggtttctgctgctgtctgtgggcgacgcgatgtgttggttcaacgacgacgcatcagcatcggcaccagcggggtggttggtgtcgtggaccaatgggatgggttggtacaaggggatgccgcgggagttcgtggacggccacaaccagctgcgcgcgcgctacgggctgcagccgatgaggtgggataacaagctggcgaggcaggcgcggcggtggtccgacgccatgcgcggcgactgccagatccgccactccaccggcaacagcttcgccgagagcctctacatcgggaggaacggctggaacgccagggcttccgacgccgtccgatgctggggcgacgaggagcacctctacgacagggacaccggcaaatgcaccgccggcgtcgacttccacgagtgcggccacttcgccttcatggtcaggcccaacttcaccaggatcggctgcgcccgcgccgagtgcttcaacggcggcgtcttcatcacctgcaactacttcaaagacgagcagcaccagccggctacccctcccacctactcctaatatgctcttcttctcttcaacaactgacctgcctgccttcctcattcatgtacattgatacagctgcacaaacaatacaatacaatggaaaccaaatcttcactc

SEQ ID NO: 21028 - DNA, 3429 bp, Oryza sativa
  ref <308>: DATABASE ACCESSION NUMBER: AK071327
  ref <309>: DATABASE ENTRY DATE: 2001-12-06
gatcatggcctagccgagccagagtcctcgacgcaacgatctcgctcttcccccttttcgttctcgcctcgccgcacgcgacgatcgccgccgcggccgactcgcctcgccgccgccggggcgggagaccgccgcccgatcggggggggggggcccgcggcagccatggtgcacagcgcgtacgacgccgtcgagctggtctccggcgtgccgggcgacatcgtggccgtggccgcctacgccgggaggctcctcgtcgcggggaaggacggctccctccgcatctacgcctccccgggccacgccggcggcgggatcccgcgggacgggccgtacgcgctggagcggcagcagccctcgctgtggcgccgcgggacgcccctggcgatggaggtcagcgccggccgcgagctcctgctctcgctcgccgagtgcgtcaacctccaccgcctccccgggctcgagaccgtcgccgtcatcgggaagaccaagggcgccaacctcttcgcctgggacgaccgccggggcctcctcgcggtcggccgctgggagcgcctgaccatcttccgccttgacagtgggagggagtttgttgaggtgaaggaatttggagttccggataccgtgaaatcaatggcctggtgtggcgacaacatttgtcttgggattagaaaggagtatatgatcataaatagtatgactggtgcattaactgaagtgttttcttctggaaggaatgctccacctttagttgtggctcttcctactggggagctcctcctgggaaaggataatattggagtatttgttgaccaaaatgggaaacttattcaagatggcaggataatttggtcagacacgcctgcctctgttgctatacataggccatatgcggtggcacgcctgccacggcatgttgagatacggtcccttagagcccccaatgcattggttcagacggttgtacttcgtgatgttcaaaagcttgttgaaactgagaactgtatacttgctgtgctagcccgctctgtttatggcttgttgcctgttcctattggtgcccagatagtgcagttgactgcatctggtgaatttgaggaggctctggcgttgtgtaagctacttcctccagaggattcaaacctacgagctgcaaaggaaagctcaatacacataagatatggacactttttatttgataatgggagctatgaggaggcaatggagcagttctctgattcacatgtggatattacttatgtcctatctctatatccatctcttgttctgcctcaaacgcacatcataggtgaacatgaccggctgcaagatctgccagaattagcaagagaatcatctgatgtgacagatgatatggaaccatactctctacaacttcatgaatctgatgataaatctccattggagataaagaaaatgagccacaatgctctaattgcccttgtgaagtatttgcacaagaaaagaaatggaataattgagagagcaacagctgaagtcaccgaggaggtggtctctggagctgtgcaccacagctcaatcttatctgagtcatatcgatcaaagaagccaaataagaagcgagctcagacgcatacaagctctattgctagagaaatggctactgtactggacacatctcttcttcaagctcttattcttactggacagtcttcaggggcaatagaattgttgaagggacttaactattgtgatctgaagatatgcaaagaatttttagaggaaaggagcgattatatggtgttacttgagctctacaaaagcaatgagatgcaccgtgaagctctccaactgcttaatcaattagttgaagaatcaaaggctgagatgggaaaaaatgattttaacaaaaagttcaatccacaaatgatcattgaatatctaaggcccctctgtcggtctgacccaatgctggttttggaatcatctttatatgtccttgaacgcaacccttcagacactattgagctctttttatcagaaaatgttccagcagatttagtaaattcatatctaaaacagcatgctccaaatttgcagtcaacttacttggaactaatgctttcaatgagtgtatctgggatcaaccctaatctgcaaaatgagctggtacaactatacctttctgaggttcttgactggcacaagattctgaaggaagagggaaactggactgagaaaacatattccccaacacggaagaagctgataactacattagagaacaattcaggttacaacacagatatacttcttaagcgtcttccgcaagatgctctttttgaagagcgcgctatattgtatgggaaaataaatcaacatctccgtgcactctctctttatgtgcataagctccagatgccagagcgagcagttgcatattgtgaccgtgtttacgaggaaggagcacaacaaccttccaaatcaaatatctatttcaatctcctacaaatctatctgaacccaagaaaagctgaaaaggaatttgagcagaaaattgttccagtggcatcacagtaccctggaattcagaaggttactaaggttagaggggcgcgtatgggtaaaaaggttgttgagattgaaggggctgatgatgtgcgctttagccccagtggaactgatagtggtcgaagtgatggtgatggtgatggtgatgatgttagtgatggaggcccaataatgttgaatgaagcacttgaattgttaagccaacggtgggatagaataaatggtgcccaagctcttcgtttgttacctagagacacgaaactccaggatctggtgttatttcttgaaccacttctgcggaactctagtgaacatcgacgcaattatatggttatcaagaacttgatttttcgggcaaatttgcaggtaaaggaggatctgtataaacggcgtcaagctgttctgaagattgatggagatagcatgtgttctctttgtcataagcggattgcaaatagtgcttttgctatttatccaaatgggcagacgttggtgcattttgtctgctttagagaatcacagcagattaaagctgttagaggagtaaactctgtgaaacgtagatagcatgtacattcaccaggaatcgcttaatacggcctaaccgtggtgggattacattggacgcaattacttcagaaccggtaaaaccagctaaactttggacgcaattacttcagaaccggtaaaaccagctaaactacttgcataagcctgtaaaatactgtgatcggaacttggcaatcattctaaacatccatgaaaataatgcacaccaccataggcacatgcatttgcacacatgagataagcatgtcttttttttttctcaaaggaaatgtacaaacatgtcttgtggacagaagagcaggcttt

SEQ ID NO: 21029 - DNA, 1175 bp, Oryza sativa
  ref <308>: DATABASE ACCESSION NUMBER: AK071328
  ref <309>: DATABASE ENTRY DATE: 2001-12-06
gttctccggttaatttcatggacacaacgacgaccatggcgcctctccctctcctcaccacgacgtctctgctgctcttcttcttcctcgcgtcgtcgttcgccgccgacgtcgtcgtcgcgggcggcggcggcggcggcggcggctacgacggcggcggcgacggcgaaggcggcggcggcggcgacggcgaaggcggcggcggcggcggcggagccaagatgccgcacgtgaaccacggcaggtacaagtgcgggccgtgggtggacgggcacgcgacgttctacggcgggcgcgacgcgtcgggcacgacggagggcggcgcgtgcgggtacaaggacgccgacgggtacggcgcgatgacggcggcggtgagccccgccctgttcgacaacggcgccgggtgcggcgcgtgctacgagctcaagggggattccgggaagaccgtcgtggtgacggccaccaaccaggcgccgccgccagtgaacgggatgaagggcgagcacttcgacctcaccatgccggcgttcctctccatcgccgaggagaagctcggcgtcgtgcccgtctcctaccgaaaggtggcgtgcgtgaggcagggcgggataaagtacacgataacggggaacccgtcgtacaacatggtgatggtgaagaacgtgggcggcgcgggggacgtggtgaagctgacggtgaaggggaccaagcgggtgaagtggacgccgctgcagcgcagctggggccagctctggaagacggaggccaacctcaccggcgagtcgctcaccttccgggtcatgaccggcgaccaccgcaaggccacctcctggcgcgtcgccccccgcgactggacctacgacaacacctaccaggccaagaagaacttctagctgatcgatttttttcaacttatttacttataatatttttacctctccctccgttctctccctactcaattgatgaatttttggaagtgaaaactaattaacactgaatttttttcttacgaattaatcctctgcgtatttactaatttgagtttgaaagaattcgttgatagtgatatttgatggatattcatgtaagctttggaatcttaaattttgatgtactggtcgaaaatgccattagcatagcatttattctgtttttattattattattttggctcc

SEQ ID NO: 21030 - DNA, 3038 bp, Oryza sativa
  ref <308>: DATABASE ACCESSION NUMBER: AK071329
  ref <309>: DATABASE ENTRY DATE: 2001-12-06
gctccccaccccaccccaccccacccgtcctcctcgcggcgagccatggcggcgccgttcgtccgccgcccgacggatgacggcaccagcggcaccagtgcgagcgctctcctggggcggccttagatgggtacctcggacgactcgaagggtgcttcctctcctcatcttcgccgtgtccatcccacccgatcgatctgtgtaggcatgatgggaaactattctaaacatatttatttacgtgccactataatgattataatttttctaaaagaatttaataagataaatgtgatagacctactttaactagctgtaatttaatttgttttttttctcgttggacttgtaaaagttgaatacatgtttatggagtgatatatcacattttaatctatcttcttaattgtttcataaccatttagatagcaagtgaggggatgccccttttgcatgctcctgtgtgcttttccgcccttaggtttgagtgatgcttgtgtacttgtgttgcgtttgcatcgatggttgtattgttgatttgaacatggaaggaaaagttttagcctagctgcgcttcagcatctagcactctcgttgccttcagaactttgccacattctattttccgtatttctaggttctctagatggatttgatcgtttgtgaaagcttttaactgtttaattcccaggtccatgaattacgaacttatcttatctagagattgcaagatttgaggcttccttgccttcgataaatgcgacaaatgttgtgattatcctctattacatttacgcctccaagtgtgactgtttgtgatgtgtagtcaggtagtaatctgaacaaatgttttcaagttgcaaagtacaggtttacatagacgacccagtgagtgtataggtgcacatgactcagtgaggatattgcacattacacatatttgttacttttcttttcgtgttataggtagttaatccgtccattctattcctcaatgagatgacgtttctgtgtttttctttaggagaagatattataaagagccttgatatggggaaaggaaaggcccgagatgcagtcttagctcgtaaaaaggatgggattgggttgctgcatgccgcagcatgccagggccatctgactgtttgcaagttcttgatggaggaattgggggggttgccatgtctacgtttggtagtatgatgtgaagtataccaatgtgctgtttatcacatatgtttaacaccgtttatggcctgtgctgagtctggtgatgttcctactgtgaagtattttcttgatcatggtggtgatgtaacaaaatcagatgataaaggatgcacacagttctccaccatgctgctggcacagatccccctcaatatccagttcattcttatatatattaccaattgtattgttgtacaaggctctataatactgcaatactattaatggagtatgtttcaatcacagcttcaccgtaatcatttcttatgtccttgtatttatagcaaacgcctgcaaataaaccatttctctcctcctttattaatgaaaagaggagtcctcctgcccttcgaaaaaaaaggtaatcatttcttatgtggcaatctagatacctttagtttctatatatcaccactcaaagttatataagtttgctctatttatacttgatcacatgtaatctgttccaagttgtttattgtaatggtcattgtttattcacataacccaatttctatagtatctctctcccaggatttatagctcatctcattcacgctcaggatgctgtaaggtaacagagttcttgctttcaaaaggaatacctattgacatagacggcgattattatacatcttgacctttagtaatactcctaagtcttaagattaccatttggcatgctctaagtaaggcttgggtgatgatttcggcggaaagagtgaaaacttgggcgttcaattcatgacactaataaaacctatcctgctctatgagctattcaactctaaatgattgaaatgcttttggattatcatgtcattgtttgtaccttcagtaacttcattgccgaccttctcattttatattgacatcactaaatgtgcattaaaatctcttccaatgcggcaactccatcttggcttcatgaactctgaactcgtttttaagaattggcaaacgatgatcagaaaaaaaaaagttaaagtattgtatttctttcctttttctttcacatattctgcttttagcctaacgtaattgccaacaatggagcctgtagtaccctgataagtgctcttgactgctgttcgttgaagtgcatgaagctactcataaaggccagtgtgttatcgagtctgtatttgttcaactactgctgtgcttttattttgctaatcaaaacatgatccacaatgcttttcatgatctcaggctggtgctgatgttaataacaagggtacaggtataactcccttaatgtttgccgcgttgcaagggtgttatacttacttcatcaagattctcctggagactggagcaatccctaatattcccaatgttttgggttggttgccagtagagcatgttgcatcatgtgattgcagggaaggagttgaaatgctatttccattcacatccccaaattccaaatgtcccaaactggagtgttgatggaataatttctcatgcaaaggtcaaccatacaaagccaacgactcgtggaccaactgcagttctgtacgcaaacaagagcatttgtagattgctcatgggtgatggtgaaggtgctctgtctgatggagatgccgaatgatgcagcctaactgggcaaaagctcacatgctactcaaggagtagaagcatgcatgcgatgctcacttggatacgcaaaaattggatcctgggagcgttgagattgagagggaacttaggtatcatcttctgtttctcttgagcatgttttccaatcacaaatgcggttgtgcacggaacatgactgttattattaagatgacgttgtggcc

SEQ ID NO: 21031 - DNA, 1207 bp, Oryza sativa
  ref <308>: DATABASE ACCESSION NUMBER: AK071330
  ref <309>: DATABASE ENTRY DATE: 2001-12-06
gacggagaggagggcagaggtgggagcgaaaatatccgaagagagagctcgcggaaatggcggcgatggtgggggcgccgctcgccgtggccgcggccgccgccgcgccaggggcgcgagtgttcctggcacggccgctcctccgccgctcgccgcggggcgtcgcctgcgcccttcgccggaggccctccaagtacaagaataaaatccagaatgaggaggttgtagtagaggatgatattggcggtggtggtgaagacgatgacgacgcgctggaagcactttttaagcagttggaagaagatctcaagaatgatgatttgtctgttgaggatgatgacgatggaatttcagaagaagatatggcaagatttgagcaggagttggcagaggcaatcggggatattgctgatgctgatgaatctggagagggttcgtcattaggctctgaggcttatgggaatgatgaaaaaacggatgaaatcaaacggccagagctgaaaaactggcaacttaagaggctggctcgtgctctcaaaataggtcgccgtaaaactagtataaagaatcttgcaggggaactaggcctggataggactttggtcattgaattgctccgaaatccacctccaaaacttctattcatgtctgattctttgcctgatgaagacccttctaaacctgaaatcaaggaaatagagccctctccagtagttgataacgctgatgtcactgaaaccaagccacagacggaacttcctgttcatgtcatgtgcgcagaatggtcttcacagaaaagattaaaaaaggtgcaactggagacattagaaagagtctactcccgaaccaaacgccctacaaatacaatgatcagcagcatagttcaagtgacaagccttccacggaagaccattgttaagtggtttgaggatagaagggaacaggatggggtacctgaccatcgagttgcattcaagagatccctatctgagaccatagctagttgataattacttcaaattagcatgtatgatggtttcctctttgaactatttgcaaattctaaatttgaatttttgaagtagaagaatttctgcaagcccaatatggagtatgttttatattagtactcccatatcaaccaatgtgacaggtacaactcttaattgccactttgataattttatttgttgcactctggaccacc

SEQ ID NO: 21032 - DNA, 1594 bp, Oryza sativa
  ref <308>: DATABASE ACCESSION NUMBER: AK071331
  ref <309>: DATABASE ENTRY DATE: 2001-12-06
ggcggccgcgcgcgatctccacacctcccctgcggaggcaaggaaggagaggcgcccctccacacgcggagcagaagagagccatgggcctccaggtcgcggccgtcgcgccatccccgtgcgcgcgctcctccgcctcgtcttcgccgccctcgacatcctcctcgcgtcccgccctcggcggtgcggggctcgcgagatcccgcgccccggttaattggggcgccggtgttatggcgcggcgccgcgggttgcggcagccggcgaggtgcgccctgagcgccagtttggatggcgtggggggcggggacgcggagttcttgcggcggatcgaggagctcgcggcggcggtgggtgtgcagcccacgggttgcgggtggccggcgagcgtggagcgcagcgcgagcagcgccgggatgcctctgtcgctccggatgctgaagcggaagaagcagcagcagcagctggtggcgcggcagacgcggtgggacgagcggctgctgggctccgccggcgactcggtggggcgcgccttctcgtcgatggtgctcatcgtgcgggagctgcagagcttcgcgctgcagcagatgcgggaggcaatgctgggcgacgacctgcagagcgtcctggcgcgagtccatggcgagatgcacgcctccttcgtctggctcttccagcacatcttcgccggcaccccggctctcatggtctccctcatgctcctcctcgccaacttcaccgtccactccatgggtcacagtgtcgccgccgccgcagccatccctcccgctccacctacctccgcggctgtcgcggtggtcgacacccagcacgccgacccatccctcccgcggttcgacgcggcctcggtcaagacgttctctattgggcgtgccgcctcggtcggcgggagcagcggcggtggcgggaaggttcggcccgtcgcgggcgccactggcgacgaccggtgggacgaatccctagctcggctgagcggtgtcgcgccgcagcaaccagcgccgccggcgggaacgggagctggtatggccgtggacgagcaggccatctgggaaaggatggtggcggaggcctcgaacatgcaggagaacgcgcgtgcagaggagctgagcgacccggacgtgctcggcaacctcgtcgcaccggtggaggcggagatcgagacggagggccacgctgagtacacgcggacggagcagcggtacgagctcgccgtgtccgaggagcccaataacccgctcatcctggccaacttcgcgcagttcctctacctcgtgcagaacgaccacgaccgggcggagcagtacttcgagagggcggtgcgcgcggagccggcggacgcggaggcgctgagccggtacgcgacgttcctgtggaaggcgaggaacgacctcgcggcggcggaggacacctaccaggaggccatcgcggccgaccccggcaacgcgcaccatgccgccgcctacgcgcatttcctctggaacaccggaggtgaggacacatgtttccccctcgattgacgcggccaccggcacaacaatggccactcgaaatcagacagaaaattaggaagcgg

SEQ ID NO: 21033 - DNA, 2530 bp, Oryza sativa
  ref <308>: DATABASE ACCESSION NUMBER: AK071332
  ref <309>: DATABASE ENTRY DATE: 2001-12-06
ggcctcgcccatcgaaacccaaatcccaaatctcgttttattacgaagcctccccgttccgttccgttcctcgtaaacccagaggcgcgcgagagagagagagagatgggggaagagaccctcgtggccatgccgctcgcgccgccgcatcaccaccaccaccacgcccacctccccgcgctcccgcacctcgccgcgccgcccccgccgccaccgccgcccgcagagaccgaactcacggaacagcgagaagaggaggtcccggtggacgacgtcgtcgaggcggcggcggacgtgccaaggagggaggagggccttgtcgtcgatgggggtgaggacgtgtactacgcgaggaggatgctgcagggggtggtgctccggccgccgccgcacctgccgcagccggaggcgccgccggggctgaccagggcgctctccgcgccggcgcctgacgggtacgtcgaggaggaggaagagcagaggcccgtcgagaggtccgcctccgtgaactccgcggcgtccgccgtcgtcgtggacgtggcctccatcgggcggttcttccgcgaccgccgcgacgtgctctcgtcggccatcacccggcgaatctcctcgctgaaggaggcctcctcctcccctcctcctccggtggggatggacacctacggcgtgcaggagatccaccttcccaacgtgaaggtcaccgtccgcctcaaggacgccatcgaagccgacgcggaggaggacgatgctgtgggcggcggcggcgacgacggctactcgttctcgggcagccacatcaagggccgtgtcagcttcttctcccgctcgggctgccgcgactgcgccgccgtgcgcgccttcttccgccagtccgccctcccctacgtcgagatcgacctcgacgtcttcccggagcgcgaggccgagttcgcctcccgcgcgggcgcctccgcgcgcgtgccccagatcttcctcaacgagaagctcctcggcggcctcgtcgtcctcaactccctgcgcaacagcggcgagttcgagcggcgcgtgcgtgacctcgccgggagacggtgccccgacaccgcgccgcgggtgcccgtgtacgggttcgacaacgatcccggcaaggagggcggcgacagggaggacgccatggtgggcatcgtgagggtgctccggcacaggctcccgatacaggaccggatcgtgaggctcaagctcgtcaagaactgcttctccggcgccgacatggtcgacggcatcgtgaaccatttggaatgcagcaggaagaaggctgtggagatcggaagagaactggcaaggaagcacttcatccaccatgtcttcagagagaacgacttcgaggatggcagccagaacctgtaccggttcttggagcacgaccctgccatcccaaagtactacaacttcatcaggggagccaccaacgacggcgagccgaagctggccgccgccatcgggcagaggatgaccaagatcatggttgccatcctggaggcctacgcctccgacgatcgccgccacctcgactacagccgcatcgccgccagcgaggagttcagaagatacgcgaacatggtgcaggaactccagagggtggacatgtcggcgctcccggccgaggagaggctgccgttcttcctgaacctgcacaacgcgatggccatccacgccgtcgtcagggtcggccagccgggggccatcgaccggcggtcctcctccaacttccagtacgtcgtcggcgggcacccgtactcgctggcgacgatcaggaacggcatcctccggtccaaccgccggcagccgtacaccatcgccaagccgttcggctcgtccgacaagaggctcgagttggtgcaggggaaggtgaacccgctggtccatttcggcctctgtgacgccacgaggtcgagcccgatcgtgcgcttcttctccacgcagggggtggagccggagctccggcacgcggcgaggaagttcttcctcaacggcggcgtggaaatcgacctcgagagccggacggttcacctcaccagtatcatcaaatggtacagtgttgatttcgggcaggacagggaaaccctcaagtggatcctgaactatttggacccgaccaaagctgggctcttgacacacctcctcaacgacggtggggcgatcaacatctcatatctgaactacgattggtccttgaatgtttgaggagaacttgtagttgtagttgtaatggcataatacattcagagccgctgtcatgtgctttctgtttaattggcaaaatggtcaatggaaagaagagcattgagcatagaggcaatcagcatgtggagcttgttgcaagatttgagtctgaggatgtatatagtattgtaagcatgtcaaagtgggttcacagcatagatgaaaaagggaatatgtttgtgaggataaaatgcattagtcatttactattccttctttctgtctaccaaattataccgaaatctcatacgactgatcttgtattcaaatc

SEQ ID NO: 21034 - DNA, 1518 bp, Oryza sativa
  ref <308>: DATABASE ACCESSION NUMBER: AK071333
  ref <309>: DATABASE ENTRY DATE: 2001-12-06
ggcgaaggccaccaatcctcttcttcctctccggccgcctccttcctcaccatggcgctcgcgctgcgctgccccgccgctgcctcgccgtcgccagccaagagcaccttcccgccctcctcctccccgccgccgtcgaggctcccgaggaggccgcccgccagctgcaggtgctactactacggcgacggcggtggcttccgcaagaactacgaccacatccccaagcagttccgcgaggagaacctcaaagatggcctgatggataattacaagaatgttcctcaattcctttatggcttaagccctgctcagatcgaaatgtttatgaacgatgataatccatatgatcggcaatcacagagagttacagaggaaagcatttctgcttctaggagctatgatgaatttggcatgtacaacttgtccggtatgcatgagggccctgcaggttacagcatgggtatgggaatgggcaccatgagcatgggcagggcagggcgaggatatagaagaatgagaagttcagctccagatctgccatcattgctattggactctcgaattatattccttggaatgcctattgttccagcagtaacagagcttattgctgcgcaatttctgtggctagattatgatgaccgcaccaagccaatttacttgtatataaactccacaggaaccatggatgaaaacaatgagctggttgcatctgaaactgatgcatttgcaattgctgattttatcaatcgaagcaaatccaaggtctacacaatcaatcttagcatggcatatggtcaggctgcaatgcttctgtcccttggcgtcaagggtaaaagaggagtgctaccaaattcaatcactaaactgtacctgcctaaggtccacaaatctggtggagctgctattgacatgtggattaaggcaaaagagttagacacgaacacggattactaccttgaactgttgtcaaaaggagttggaaaaccaaaggaagagctcgcagagtttctcaaaggtccaaggtacttccgtgcgcaggaggccatcgattatgggcttgcagatacaatcttgcactctttggatggttccttcaaaccaaaggatctgaccgcgcagttggccaaagcacaggagatgcggcaatcggggaagcgcccagcagctggagctgggcgatggtcaactccaagtgtccctagatagactagaacgtcagatcaaaaccatacactagcttaatatcgacgatgatacgcgtggttgtcctattcagagcagcctacctgttacatttgcatgcaagaagaaatcctgtcagggtttggaatagattcaggctgacgaaaacgttgcttactgcagtggcttttgtgttattgggtcatctatgaatacgatgaatatgtagtttatgctgccttcctgccaaggttgttgtatttttcagatagaattcactagtggagatggtaatccagtaatccatgtgaccaagtattcttcttattc

SEQ ID NO: 21035 - DNA, 3709 bp, Oryza sativa
  ref <308>: DATABASE ACCESSION NUMBER: AK071334
  ref <309>: DATABASE ENTRY DATE: 2001-12-06
gacagattttgaattcccctcctcctcctcgccgccgccgccgccgccatgtcgtcgcggcaggacaaggagaagtcggtgaacgtccaggtcctcctccgctgcaggccgttcagcgacgacgaggtccgcagcaacgcgccccaggtcatcacctgcaacgactaccagcgggaggtcgccgtcacgcagaccatcgccggcaagcagatcgaccgtgtcttcaccttcgacaaggtgtttggcccgacagcgaagcagagagacttgtatgaccaagcgattatccctattgtaaatgaagtcctcgagggtttcaattgcaccatcttcgcttatggccagaccggcacgggaaaaacatacaccatggagggtgaatgcaggagagccaagagtggtccaaagggtcagttgcctgctgatgctggagtcattcctagggcagttaagcaaatatttgacacactggagagccagaatacggagtacagtgttaaggtcacattcctcgagctgtacaatgaggaaataactgatcttcttgcgccagaggagatatctaaggctgcccttgaagaacggcagaagaagcccttacctcttatggaggacgggaaaggcggggtgcttgtgagaggcctggaggaagagatagttacgaacgatggcgaaatattctctcttttggaaagaggatctgcaaagcgccgtactgcagagactctgttgaacaagcaatccagtcgttcacactccctattctcaatcaccattcacataaaagaggctactcctgaaggagaagaattgataaaatgtgggaagcttaatttggttgacctggctggatcagagaatatctcccgttctggagctagggagggacgagctagagaggctggtgaaataaacaaaagcttgcttactttaggtcgcgttattacagccttggtcgagcaccttggacatgttccttacagggacagtaagcttacaaggttgctccgtgattcactaggagggaggaccaaaacttgcattattgctactgtttcaccctccgtgcattgtctagaggaaacattgagcactttagattatgctcaccgagcaaagagcatcaaaaacaggcccgaggtgatctagcttcattttctcacatctacagtcaatgtgctgatagcagtgtggtgtgtaaacagaacagcttaaaatagtagtaatcgctttattcatattggctaaacaattgtacaaaaacaagtaaataattcaaataggaggtgcctagtacataccaaaattataatgggtttgaagagtacaagctgaaaatttttattaactccttaaagcttgtaattgcatagtgtggcctgctattaatatatcgtttattttgtattccaggtaaaccagaaaatgatgaaatcaacattaatcaaagatctttatggagaaatagatcgacttaaagcagaggtctatgctgctcgtgaaaaggttggagtctacatcccaaaagacagatatcagcaggaggagaatgagagaaaggccatggctgatcaaattgaacagatgactacttcgttggaagcaaatcagaaggttcgtaaagtgcttgttgtgtatatttgatatttgttcttgtttaaaattgatcttttgcttgggtttcagcaaattaatgatcttcaagaaaagtacgactcagagcttcaacattctgctgatctaagcaaaaagcttgaagccacagagaaatgtctggaccatacaagcaacttactatccacaaccaaagaagatttgaaacaagcccagtataatctgaaggagaaagattacataatctctgagcagagaaaagcagaaaatgctttaattcaacaagcctgtcttctgagatcagacctggaaaaatctaaccgtgagaatgctgcactctattcaaagattgctcgaggagataaactaaatgctgcaaataggtcagtggtgaactcattccaagctgaccttgcttcaaagttggatattctctccactacccttgccacatctatagatcagcaaaataaacaccttaaatctgtggagaacttatgcaagtcttgtgttgattcccatgacacggctacttcggagataaaaaagaagattttggcttcaaaggcactttatatgtcacatatggaagccttccaaaatgttgtgctcctgcataaagcaaattcaaattctacactagaggatatatcatccctatctgctgcaagctgttgcagccttgatcagcttctagcttgtgtcgagggagaggcacagaagatatttggtgatatccagaatttgctagctgatcatcgaagcgaagtggcacatttcactcaagagttgcgggagagtttccgcattagcttggataggacgaaggacatgtctagtttcatccttgggttgttcgataagtatgtggaggaaacttcgaagttgcagagccactccaatcacacacatgaagcacaagtcaaaagccttgaagatttccagaaggcttatgaggagcaatcaaaatcagaagaacaaaagcttctggcggacatcaccagtttggtttctaaacacgttactcgacaacgagaactggtgggtggtagactaaactctcttggtgacgccgctcgtggaaacaaagcatttttggatgagcacacgtccgccatggaggtggtcacgaaggacgccaagagaaagtgggaaatgtttgcagagcaggcagagaatgactgcaaagttgggtccaacttctctgcagctaagcattgtcgcatggaaaccattctgcaggaatgtgcatgcaccgtcgacactgctgctcaacaatggaaagcatcacatgcaactgttaacgatctatgcagaaaacaaatagctgaagttgaagcactcgtcaggagtgcaatcgaaaccaacgagcagcacgaagcagagattgcatcttcccgtgccacggccgaggagcatgcgtccaacagcagcaaggacctactccaagatgttgacaatatgctgcaggaggcgcgcaattcgtcgtcgagagtggtgtcgacggtggaagctcatttgggagagagccagcatctacaggagagccactccagccataccgccggcatcaacacccacgccgacaacgctttccagagcagctacaaggactacgagccgaccggcgaaactccggtgaggtcggagccggaggtgccgagcaaagacgcgatcgagtcgctgcgagcgatgccgatggagtccctgatggacgagttccgcgagaaccacccctacgagccgagcaaggaccgcaggccatcgctcatccctcgctcgccgctcgccaccatcaacaactgatgaaaatccattggaaacgcaacgcaatgcaatctgtctctgtgtgtgtactagtgtaatcttattagccgtaagtaggtcatcaaatgctggcttttggtgtcctttggttgttgtggctcagtgccagtgccagtccagcttcttgttgtgggttgcgagctatctcagcttcccccggcgcccttacctaactttctttcacattttattattttgatgtaccaatctgttgcttttctgtgtgattattggagctgcataagagatttgttgagcattgcattcc

SEQ ID NO: 21036 - DNA, 3021 bp, Oryza sativa
  ref <308>: DATABASE ACCESSION NUMBER: AK071335
  ref <309>: DATABASE ENTRY DATE: 2001-12-06
gtccgtcgccgccaccgccaccgccttcccctcgatcgccggagcggcgagcccacggcggcgagcgccgcagccatgtcgcgggctctcctcccgcgcggcagcattctactcgtccttcgaccgcgagtcccgtccacaccccaccgatgcttcgcgattggggcggcggcggcagttgacggcggcgagacgtggcgggggcaactccggcagggggagggggaggggaggagcagggcggtgaaggtgtcggtgtggtgggacttccagagctgccacctcccgcagggcgccaacccgtgccgcgtcgccacgcgcgtcacggcggcgctgcgggacgccggcatccgcggccccgtcgacatcaccgccttaggcgacgcctacatgctcccccgcgccgtccaggaggctctcgccgccaccggcgtcgccttctcgcacgtcccttccagtggaaagggcggtcccgaccaattgttcatggctgatctgacctattggattgctcagaatcctccaccggcccatttcttccttatatctggcaacaaaggccttgcaaacattctgcatcgcctccggatgagcaattataatgtactgcttgcctgccccagtgctgactctagtgtattgtgcagtgcagcaacgattatgtggccatgggatgctttagttaaagggttggatttctcaccaaaacattttaaccaaccacctgatggtatatccttttcttggtacagtcactataggggaccccttgatgacttgttcttgaactcagagtcagatgactctatggcagagtcagaggactccctggcagagtcaagggactccaaggcttttcaaccacataccaagtcagtgaaaccacctattttacccaaatctgtggccaatggggttaggcaagtactgtactcctttcctgaaggtatcagtcttccaaatcttcgagcagagcttagaaagaagcatgtgttcatggataaaggattatttggcttcaaaaacttctcttctcttctccaagccatgcctgatgttgtgaagtttatagatcctctaccaggtgaaagaaaccagcctgctgtggttggggtttccaagagatcaatggagcctgctgagcaaatttacaagggaaagagttctgctcaaagcagtggtgagttcaaacgcctcgttcagactcttaatgagaaaccaccatcatcacatgtcccatcttcttcatcagatattttatctgcggaccgcaagaaagttctagcagttgatgccccatcttcccaatctgacttgttatctaggaaccaagagaaagctccccctgttgatttgactacacaacctgaaacacctgcaagctgtatggaagctgatgtggagagtgttgctggagcttctgcctttacaggagagcaaattactgttgacaaaaaggggctatttgaaaggatttgtgtactatggaatgatacagagcctgttaagcctatgctttctccgtctcaagatgatacccattctaaaggctccaatgatttactaactcagtatgccaatagtaacgaacataacagtcttttgacaaggaccttgaagatcttttccacaactgacaattcagatggagacaatgttgacagcacttcagcaattagcagcagtttctcaaatatgactgccaatgaccattcggacaaattaaatgtcaaggagaatgtagggaatacgatcatccattctagtagatcagttgacacgagcaacgctgaacataaagttgggtttatagaaaaaagcaaaggaatatttagctgggctgcaaagtggtgggcgtctggaaaaccagacacagatgacaatttaagttcagtacatatcaatgatggaacaagggaagaatcagaaaaagaatctgcatttgtaaagacagctgctactgcaagtgaacagcaagtaggagttgaactgttcatgaaaccttacttctgggatgcactacagcaatatttgtctacccctcatggatcagatcttgtttcaaaagcaaagacaagggaggagttagcgcatggactacagaagcaaggccattggcctctaaaaagccttggtgggaaacaccaccaccaattagtagatttgcttatctcagaaaagcaatggatcaaagaatcttcatcacaaacgtctccttttcgacttgccctcccccagagaagagctcgttctccactactttcattttttacgaatggaaggccatcaggccagcgtaaacatgtcgatgacagaagcccaactctgtctagaacgtcggtccatgttttacctacaaagaatgggaagggtcaggccagctgcaagagcaatgagaatcaaagtaagagtgatgactttttggagaaagagcttggtccagtatctgacagtggtaaaccatatcgacaaaatgataaagcagtccggcatcatcctcctacctgttcagatgatgaattttctgatgatgaaaatcatgaggtggtccaagaggctgggagagatgcagcacaaagttcactcttcaaaattattgattcgtggaacactagtaagactatttgttctagcaagaaacagcacggcattggtggtatagtggactgctctagaatcaacagaggtaatggtggtgacaattcgatcacagaaaatgcagaaaaggctacaagcttatcaaaacattcttatatgacctcagattcagattcagattcagatgaagagaagttattcaacagtgtcttgggcagtctgcagaatgcaaagaactcaagtttgcccggttgaaatgatgtggaggcgtggagcagcttgaggatgctttagaaacatcttcccaagctcagttagatttatgaagatcacgttacagtagaatgttctgtttattttttattttgttggagaggaatcctcatattcttttgagatgctaaggtttgtgctggtgtagtc

SEQ ID NO: 21037 - DNA, 2260 bp, Oryza sativa
  ref <308>: DATABASE ACCESSION NUMBER: AK071336
  ref <309>: DATABASE ENTRY DATE: 2001-12-06
gagatccgcggggacccagccgattcgcccagccacgccaccgagcgctcgtctcgtctcgtctctcgacccaatcccgtcccccggcgcgacgccccgccgcgcgatggccgacggcgccagcagcagcggggccgcctcggcctccggccccggtggcgggggcggcggggagtcggtggtgatcgactacggccggcgccgcacggcctgcggctactgccgatccaccggccagacgagcatctcgcacggtctatgggctaacagcctgagagctgatgactatcaagctcttcttgaccgtgggtggaggagatctggttgttttctttacaaacctgagatggaacgtacttgctgtcctcaatatacaatacgcttgaaggcaaatgatttcatttgttcgaaggagcaaggtcgtgtacttaaaaagatgcaaaggttccttgatggtgagcttgatccacaggttggaagtccacagaataaaactagccctacaaaacattcactcgctgaacctatgaatatgccggtctcaaaaatatccaagacattaacaaatgattttcaagcagccaaatgtccaaatttatttgaagaagatgagttcatcagttgcctgtctagcaaaattaatgaggcagtgggtatgtccttccaagttggtacattaggttctgatgttcaactccctaaagctgttgtaaagactgttaaaccacaactaaaaaagaaagtaggaggagcatcacaagacaagaaagtaggagaagcagtacaagatttattgtacacatgtaatataagctttcaaatagtggcagaaatcagacgtgcattgcctaaggagaaggatgctaatcacaataaagtagtagcagatatttctccaaactctattgcagaaaagctggccatgacaatggagtgccatggagatattgctggtttagcagtaaaagcctgcaatggccatctgaacttctattcagtcaccaatcagacaaagcagaacaaaaccagtatcattgtgtctacacatgctccagataaatctagtagctcaaagcaaagctctgtgaacaaaaatactgtaagagttccccagaaaagaagaaagcttgaaattaaaatgagaaggtcacattttgatcctgaggagtttgctttatatcaaagatatcagacaaaagtgcacaaggagaagaaagtttcagaaagctcatacaagagatttctagtggatacaccaatcgtgtttgttcccccgcggagtggtgataatacagttccaccttgtggatttggttcatttcaccagcagtacagaattgatggaaaacttgtggcagttggtgtagttgatatccttcctaagtgcctgtcaagcaagtatttgttctgggatcctgactttgctttcctatctcttggaaagtatacagctctgaaggagatagattgggtcaagacaacacaggagcactgccccaaccttcaatattattatcttggttattacatacattcctgcaataagatgagatacaaagctgcgtatcgaccatcagaacttctctgtccagtccgtttcgagtgggtgtgctatgacagtgccaaacgtttactagataagagcctgtattctgtcctatctgattttgcccaaatacaagatgagatgcctcagccacagaattctcatcttgatactgagttatcaaaaaatgacaattgtgagtctcccatcgatgaggatgatgaagatttgtcctatgatgactcagacatgatggttgatgaagagatggttcgatcagaatccaacactgatgtaatggaggattgttccagcataattgattttgaaaatgtcatgatggatctgaatggttctcgagttaaatataaggatcttctgggagtcgttggacgaatcgagaggaggcacctcgaacagctagaaaggcaattgagcaaatacgtgaaagttgtagggaaggagctatctgatcgcatggtttattccctgtagttggcctgcaattctgtcccaagggagcaatgcgaccatttagaggtacaataacatgtttatgctaatcgcttcgcagtcgaattctggtgggttcaggttggaggctggaatgacacatttttccggccgattcgttatctgtcattgaagtccgtattccataaactgttggccgaagggtatagcacaagtcgtttggtttctgcacatgattct

SEQ ID NO: 21038 - DNA, 2784 bp, Oryza sativa
  ref <308>: DATABASE ACCESSION NUMBER: AK071337
  ref <309>: DATABASE ENTRY DATE: 2001-12-06
gtccgcggtacacgtgaagctcccgttttcctcctccgtccactgggcacgggagtgggctgagaagaagacaccataaacgaactgtctccctcgtctcgtctcgtcccgtcgtcccgcgcgtcacctctcctcttccgctacgccgcgccaccgccaccgcctccgccgccctagggcccttcccatccccaccggctgcgcccgccgtccgcagccgcttcgttccctccccccaccccgtcgccactcgccacaccgtggccgggaacggcaagccacaccgcacctgctgctctcctcctcctcatcttcgccgccgcggaccgagccactctccgatcctacggggaggtagatctgtaattgcaaagtttaggccctagccaaatctcagaatggaaatatctggtccaggtggtggcagcaaccacacgcatctaactgagagaggagaaatattagaggatgcacatgataagaaagatgagctgcgagctgaagatcttgaactgaagttaaatgaaccttttcttaacttcatgagactcagacttataccgcagtggggtcaaggctttacttctgagtgccaactcaaaactgcacaagatcagcttgaatggcacagccagataaagccaacaagattgcctgtcctggcacttcacattggcaacaaaaagttcgctcggacaaatgaatgcgacatatttgttaagttcttctaccacaaaaagtcagttatattccaaatgtccaaggacaagctgtgtaggaaggttgacatccccttcgacgacattacatccttttgtttcgttttcggacagcagtctgatatcctgacaatagaggtcaaatcttcattgatacccttaagtgctgctaagccacttccagggaagtttcttgattggaaagtagattactcaaaagatgatgagtactattttcctgaatcaaagtaagaaactagtttatttttacaagcctttttgttctgttctatgctgagcattttgaggtgaactacaattcattggaaccatttatcttatatgatatgatggtattattttcctatttgactatttcctttgagggtcaaaggctatttgacaatctgaaggtcaattctgtctctgtacaccattactttacacgttagtatttggaaagagaaaaaaaaagaaggaaaggaccaatttataaaaggaaaacatgccattgattctctggtgccttccattaaaaaagggatacatatgctatcactagatattaaactacacagccagtttatgtgtaaaaaactattcatatgttccataaatttattataaatctcagatatattatgtgattaatatgggaattataattttgaaatatcatagttggttttaccttttaagattataatatcctctctaatttgaattgtacgatatttttcttcagcctgttattgtacttgtcatacaactagggtggtaagttatgtttttttttaaggtctcatgtaccctattattgtatttttactccagcctgttattgtatttgtcatacagcctgttattgtatttttaactattgctttaaaggtctcatgtaccctattaagagttatgtttttttttttacagtatgcacacatgtgcatgaactgtccactcttttcaatgcaatggatcagattagttaaggtcgggctatacatccacaaccatttatatcatctaaaaaattccacaaccatttatattggttcttggagtatttcataggccaaattcttagtataattctggcaaataaaaattttatggtaaatgataatgcctctagaacgtcgcatttccacaatctgtcagattacaaagccaactttcataacttaaagaaacaacttcctgaatttttgccaaactgaaatttttttaattgctcaatacctgtccatagttggcttaacaaatgtcctgtataccagtatgcattttgtcaaccttcaattgattagaccacgcaggtggattactagacttatttgcaatccatctaacttatttgcaattataacaatagttcatgttccccgttttaaattaatcattagatctgatttgtttcctcgtatttaagggattacaatgtcctaaacgttctattcctactaatatatgagccaagcctcctgcctctcgttttttgttaaaaaaaaatatattctgctttttaaatcatattagcatacatgtccatgctacaaatcccagcattcacttgggcttttttttatatttcagatctttatgggttgaggctgagaaggggagcttggaaaagacctatgcaaaactcaagtacactaatcctcatttgacatgcttgtttacggatgcaggggaacaaggagaaacatctgcaagacatgccacctgatggtgaatgcatggaagaaggaggatctgactggctgcatgcaccatactggggttgggaggcaacaggatcgccatgcttccgaataaatcaactgcaccagtgtggaagccgcatcctatgtattgttaagagacctggagcttcgataggacacaaaactcattgcaccaggagtggatcggttcacatcaatcgagttctttgttgacgatggtggcagctacacgatgtgccctccatgggacaccgtctgtggcctccccagccatcgccgcggtcacgctgtgcttgcagataccttcaggatagttgaatttcacctcgtcgtcg

SEQ ID NO: 21039 - DNA, 1924 bp, Oryza sativa
  ref <308>: DATABASE ACCESSION NUMBER: AK071338
  ref <309>: DATABASE ENTRY DATE: 2001-12-06
gatacatagacacaaaaggcaagtcttgttctaaaataccgtgacttcgtggttttagcttgtcagatatggcaaaaaggaaagatgaagagggaagatgtgcctgaatttcttgagcagctcgaggccgcggtagagcgccatgaaggcgtcgcggatgttcttctcggcgtgctggatcttcttccggtggacgaacgccgcggcggggtcggcgccgtccttgcggagcacgttcacgagctcctcccacaccttgagcgccgcccgcccggggctcgtcgccgggatgtcgatcctcaccgtcgctggcagctgcagcacgcctccgcctccgccgccgccgccgccccgccctttgccgctgccgtccttggtcttgccgtccttcttcccggcgagccccacgaagctgacgccgttccgctccagcgccgccatcacctcgtccgccaccgccgcgccctccgacacctgcgcctgctgcaactccaggctcccatctgcaaaacacgccatcgacgacgacgacggcgacatcgacatgacatgacattgcatgcataaagagatgtgcagctagcccaggattcatgtgtgtgggtggttggtgtcacctacctgacatggactgcggcgaggagaggccggagaggaggtagcggccgctggagccgtgcaccgacgacggcggcgaggaggacggcggcggcggcggcatagagcggcttcgggcgaggccgcgggcgcggcgggcggcggcgtggtcggcgaggatgcgcttgacgtcggcgaggatccggagctgctccagcagcgcgtcgccgcgcgccagcagctccgcctcctgccccgtgtagaacgcgttcaccttctccagctcctcgtccgccctctccatgaactccctctcctacaccatccatccatgcatctccatttttacaatcaatttaattacttagttttatttacaatcaaattaactaattaattttatacatgcttgtccgtggatcgcacgagctcccctctgtccgggcactcctcatcctcctgcgaaatgcacatacgtattaacatcagaaatgtgtattaattaattaatacacgtttattagttagtatttgattcgagacacaacgacgacgtactgaggcagaaggctgttgtccagcggagaagcgggcggcgatggcgcgaacggggtcaagaatggagaacccatagccaccggcttccttctctgcgggcggcggcgggagaaggtggtcggctgcggctgcggcgttggcggcggcgaaggagtcgtcgcggcgggtgaccttgatcctcttgatgagcttcttgagccgcttgtagtcgacgaacgcagccttccactccggtatgatgctcgcctcgtactccctcgagaacttcaccatcttcttcttcttcttcttcctcgttgcagcagcagcagcagcagctgatcgatcgatcgatcgaacaattaactgaaacgtacgtacgttcacatgtgtggaatcgagctaggagaagatcaagatggatggatggatgcaggaaagggacaggcaggcagggatgatctcgcaagcaacaaccgtcctgccttgttagcttatatagatagacagttagagagagagagagagatcaggctactagcttggtgctcttctccttcttcttcaatcctctctctctgctcacctcgagtgctcctgctatataagcttagcttagctaagcatgcagcgaaatttggcactgctggtgcacatacagggacagatagtggccttgtatgttacaatattaggtagagctagctagcttagctaaattaaagtagaaaggtgtatctgaattcagagatatatatatacacttacatagtggggatcgaccatgccg

SEQ ID NO: 21040 - DNA, 979 bp, Oryza sativa
  ref <308>: DATABASE ACCESSION NUMBER: AK071339
  ref <309>: DATABASE ENTRY DATE: 2001-12-06
gaggaattaaaagcaaaaaaaaaaggaaaataaaggagaaaagagtggcggccatggcggcggcggcggcggcggcggtggagagcgtggtggtggtgcacaacgtggcgaagcggcacaacgtggggacgctggcgcggagcgcgacggcgttcggggtggcggaggtggtggtcgtcggccgccgcgacgtcagcgccttcggcagccacggcgccacctcccacctccgcttccgccacttcgcctccctccccctcgcccgcgcctacctcaaggacgagagggggtgtgacatttgcggcgtggagatcacccacaacgcgctgccggtgacggcccatccgttccgccggagcaccgccttcctcttcggcaatgagggtacaggactctcgcagaaggagtgcgagatctgcgacttttttgtctacatccctcagtatggtggtggaaccgcatcattgaatgttacagttgcagcgtcgattgttcttcatcactttggagtctgggctggctttccagaacgagggcgagaaggtaataaattcgttgtagctgataaaccaaagggccaatctaggggactctactgtacagactcaattgaagaagtgattgaagaacggaagatgcgaagagaaaatgcctgtgacatatttgaggaaaatggaagtagcgagcatcaggaatcaaatgttttaggcacgatgctgtcagactagagtatcccatctcttctttgcttaccaatccagtctctgcattggttgagggatgaaactaatttgcaataccacatacagcacaatatccagcactggtttctcttttccagggtggcacaaatatatgtagagtaaatttcagagaactccatttttatggtcaaagttgcagtttcgcgactcggtaaggagcataatagcaccctttcaaaccaaattcttgtggcaatgattaagagaataccttc

SEQ ID NO: 21041 - DNA, 944 bp, Oryza sativa
  ref <308>: DATABASE ACCESSION NUMBER: AK071340
  ref <309>: DATABASE ENTRY DATE: 2001-12-06
ggcctcctcctccctcctccccattcccccgccgccgccgccgagggcgccgcgacctgagagcacacgcacgcccgccatgtggcgccgcctccaaaccctggccccggccctgcgccgcgccgcctccgcctccgcctccgcggcggcatcgggcgccgcgggccccgcctccctcgcccgcgccgcgccgctctccacggcggccgccgccgccttccgccgcaccagccctctcctgtccggggacaagccggcgacggtggaggacgtcatgcccatcgccacggggctggagcgcgaggagctcgcggcggagctcaagggggagaagcggttcgacatggatcctcccgtaggcccatttggtaccaaggaggccccagctgtcattgaatcctactataacaagaggatagttggttgtcctggtggtgaaggagaggatgagcatgatgttgtatggttctggttgaaaaaagatgaaccgcatgagtgcccagtctgttcacaatattttgtgcttaaggtcattggtgatggtggtgatccagatggacatgatgatgacgacgagcatcaccactaaggacgcccatgcctcgtggttctgataataagaatttgatgaggcagatgatttcatttaaacctttttagcaccagactgctctacggcgtccttgtttatgaatgcacacatttggccatcaagcaggtggtagttttttccttagggattttgtccaaacaaaaaactcatcgaggcttgacctgtgcatttccttcggagcatcatcgaataaaagatgactgcatcagctgcgtttttcttgtgtatcctaatggccatctggtgtgatggacctgttctattcagatcatgcaacagtttattttcagtgctcagtgagtccctgtttgcaagcagccactaaatcttt

SEQ ID NO: 21042 - DNA, 1079 bp, Oryza sativa
  ref <308>: DATABASE ACCESSION NUMBER: AK071341
  ref <309>: DATABASE ENTRY DATE: 2001-12-06
gagttgagttgaccaacttaactacctttcgccgagctcgcggagagaagaagggattccagtggagcacgcgatttcccatctgctcgatcccctcctcctcctagggtttcctgctcctccgcccgcctcgccttgctgctgccgttgttggtgcgatggctctcacttcggctcaacggattgctctcactgtctctttctttggccttctctccttcttacttggtgtcatcgcagaaaacaagaagcctccttatggaactcctatcaaaggaaaggatgttgtcatctgcaagttcccaagtgacccaactattgcaatgggaagcctctccgtggtgtcacttgtgttaaccaccatcgtagggcatgccgctatcttctatccatacaagagcaagtctgttcctcgcggagcattatttcgaagcgccagcttatctgcgttcttcgttattgctgagcttgtctcagctctggcgtttgcaatgttgctctgggcaacggtcaccgagggtcttcaccgaagcaacaacatccaccatgacctggatacccagtgccctactgcgaagactggcctctttggaggagccgctttcctggcccttgatgctgctctcttctggcttgtttgccagatgctagctctcaatgcaaggtctgactatctggatgaggatgacaagggcgattatggccaggtttttgcttctgatgttgatggcacaaaggtctgaggctttgactgggcagggtttcatatttagtgtcacttagctatattatcttatcgacaaagctggttcgattagctctctaaaatctgtagatatgtgctatgccagttgcaaagtcgtatatataagggtatttgctcattgcacgtttaagcttacgttgtgaaacaataacagtattctcagtatggtccgtctgttagtaatctccgtggagctaagtgtcctactattaatttttctggtgttactctgtgtttttctgtgacgctgattcttgaagtataaatctaacattgtgggaggtatagatatatagataggtaaagataaatg

SEQ ID NO: 21043 - DNA, 1298 bp, Oryza sativa
  ref <308>: DATABASE ACCESSION NUMBER: AK071342
  ref <309>: DATABASE ENTRY DATE: 2001-12-06
gccttagagaaaatgcttcaagaaaaagaattcgctttaaagagtcttgaagtttctaggaccaaagccttgacaaacttgcaacaactgttgacaagtttgatgagttgcatagcttgtctgaaagccttcttgctgaagtggaaaacctacagtcacaactgcaagagagagattcagagatctcttttctgcggcaagaaatcacgagaagtaccaatgaactgctaacaactgaagagagcaacaagaagtactcatctcagataaatgattttactaaatggttggaaactgcactattgcagtttagtgtacactgtgatagcacgaatgattatgaatgcactcaagttcctgtatatatggatatgttggagaagaaaataggatctctgatatctgaatcagatgaattaagggtgaccctgcaaagtaaagattctttattacaggctgagagaaccaggatggaagaattgctgcgtaaatcagaggctcttgaatcttctttgagccaaaaagattctcagatagggttgcttcgtcgagacaggacatcaggccaacctagcagatttataaacttgccaggcacttcagagattgagcaagtgaatgaaaaagtaagcccagctgcggttgtcactcagattcgaggggcacgaaaagtcaataccgaccaagttgctattgatgtagaggtgaaggacaagccattagatgatgaagatgatgataaagcacatggtttcaagtcactgacgatgtcacacattgttccaaagttcactcgacctatatcagataggattgatggaatgtgggtctcaggagatagattgctcatgagacaacaacattgagacttggcgttttgctatattggattgtgctgcatgcattgcttgctagttttatttgaagattatatgtaaagctgtagtgatctcctttggtgagctactgtacagtagtatgtctatactccatagcaagctacacaaagaaagtagtccgcgctaatgttgttgattcttttggatacgttacaaggatactcgtattggcagctgcgaatcaacttcaggttgtcttcgagatgcatttgtcctgcctcagctggaatagagaactgaagaaagcagcagcagcagcggcaaagatcccctctgtaaatactctcatttttgtttgctctattctttgcttttagaaagatgtagggcataattttgaatggtagtagaatctacattatacgtaacagctttacagaagaatgacaagtagttccc

SEQ ID NO: 21044 - DNA, 1658 bp, Oryza sativa
  ref <308>: DATABASE ACCESSION NUMBER: AK071343
  ref <309>: DATABASE ENTRY DATE: 2001-12-06
ccccgtctcaccctagccgccgccgcctcctcctcctctcgccttctcccgtcttctccttcgagttagctacctccttattcaaccatgggtaaggagaagacgcacatcaacatcgtggtcattggccacgtcgactccggcaagtcgaccaccacgggccatctgatttacaagcttggaggtatcgacaagcgtgtgatcgagaggttcgagaaggaagccgctgagatgaacaagaggtccttcaagtacgcgtgggtgcttgacaagctcaaggccgagcgtgagagaggtatcaccatcgatattgccctgtggaagttcgagaccaccaagtactactgcacggtcatcgatgcccctggtcaccgtgacttcatcaagaacatgatcacgggtacctcccaggctgactgtgccgtgctcatcattgactccaccactggtggttttgaggctggtatctccaaggatggccagacccgtgagcacgctcttcttgctttcactcttggagtgaagcagatgatctgctgctgcaacaagatggatgccaccactcccaagtactccaaggcccgttatgatgaaatcgtgaaggaagtctcatcctacctgaagaaggtcggctacaatcctgacaagattcccttcgttcccatctctgggtttgaggtgacaacatgattgagaggtccaccaaccttgactggtacaagggccccaccttgcttgaggctcttgaccagatcaacgagcccaagaggccatcagacaagcccctgcgtcttccccttcaggacgtgtacaagatcggtggtattggcaccgtgcctgtgggtcgtgttgagactggagtcctcaagcctggtatggtggtgacctttggtcccagtggcctgaccactgaggtcaagtcggttgagatgcaccacgaggctctccaggaggctcttcctggtgacaacgtcgggttcaacgtgaagaacgttgcggtgaaggatctgaagcgtgggtacgtggcctccaactccaaggatgaccctgccaaggaggctgccagcttcacctcccaggtgatcatcatgaaccaccctgggcagatcggtaacggctatgctccagtgctggactgccacacctcccacattgctgtcaagtttgctgagctggtgaccaagattgacagacgatctggcaaggagctggagaaggagcccaagttcttgaagaacggtgatgctggtatggtcaagatgattcctaccaagcccatggttgtggagaccttctctgagtaccctcctcttggtcgttttgcggtgcgtgacatgaggcaaacggtggctgttggcgtcatcaagaacgtggagaagaaggacccaaccggtgccaaggtgaccaaggctgccgccaagaagaagtgagcctcgttcaaatggtggtttgcatgtctgcagttgagatatctagttctagtatttgttaagttttgcccacggccatggctctcgtttcatggaccgttaatatctgctcgcaatgtgcactatgtcagtcgtttaatactcgtttatttctgttcggttaaaactgatgctctgagtccgattattgtccatcggctgttttggaatgcgagtatttacattgcc

SEQ ID NO: 21045 - DNA, 1114 bp, Oryza sativa
  ref <308>: DATABASE ACCESSION NUMBER: AK071344
  ref <309>: DATABASE ENTRY DATE: 2001-12-06
gctcctccgtcctcctctctctccccaaatcgaacatcgagagagagagagagagaggtctaaaaccctaacccccgaatcgaatctcgtcggaagccgccgccgccgccgccgccgacgacgacgcccgcgacgccatggacatgggagcgatgagcgatcctgagaggatgttcttcttcgacctggcatgccagaacgccaaggtcacctacgaacagaacccgcacgacgccgacaatctcgcgcggtggggaggcgcgctgctcgagctctcgcagatgcggaacggccccgagagcctcaagtgcctagaagatgcggaatccaagctggaggaagcactgaaaattgatcccatgaaggcggatgcgctttggtgcttgggaaatgcacagacctctcatggattcttcacttcagacactgtcaaggccaatgaattctttgaaaaggcaacgcagtgtttccagaaggctgttgatgtggaacctgcgaatgatctttacaggaagtcattggatttgtcatccaaggcgccagaactgcacatggagattcataggcaaatggcatctcaggcttcacaagctgcatcctcaacctcgaatacaaggcaatcaaggaagaagaagaaggatagcgacttctggtatgatgtcttcgggtgggtggttcttggggttggcatggttgtctgggtgggtcttgccaaatctaatgccccgccccaagctcctaggtgaggtgggtcgtcttccaacactacctgcagaaggcagcgtgcctacgttaggtgcctcagacttcaaatcttgctagtggctagttaatcatggagaggaactggtgtttccatgttacagtttggtcagattttcaatgcctgatatccttttccagctttgatgaggtttagatgagtcataaatcaacacttattgatacttgtttatcccggtattgttttgaggcaaaaactattattactatgttttgatcgttttatcaatgctatctgcattatatatactgccacactgggtgctattgtatggtgaacggcatcctttcttttattaagcacataatgctcagctgttgtctgaatccc

SEQ ID NO: 21046 - DNA, 887 bp, Oryza sativa
  ref <308>: DATABASE ACCESSION NUMBER: AK071345
  ref <309>: DATABASE ENTRY DATE: 2001-12-06
gggtggtggtgtccgtcgcacgcctccccccaatcctcgtgagccctatccgattccgcaccaccgctactcgccgccgtctcctcccctcctccgcgctccgcctcacccgcccgctctcctcctcctgctccgcgtcgccgctcgccgtcgtagcctccatggagacgccgccggagaactaccgcaccaacgtcggcatctgcctcgccgacccctccctcaccaagattttcaccgcgtccaggatcgacatcgccaacacatggcagatgcctcagggtggtattgatgcgggagaggatccgagggaagctgctttcagagaattgagggaggaaacgggtgttacatctgcagaaatggtggctgaggtccccgtttggttaacgtatgatttccctgttgatgtgaaagaaaagctgaatgctaggtggggaggaacgaactggaaaggacaggctcagaaatggtttctatttagatttactgggaaggaagatgaggttaaccttaatggtgacggatctgagaggccggagttttgtgaatggacatggatgacacctcagcaagttattgaaaaggcagttgaattcaaaaaaccagtatatgaggcagccctgaaacactttgccccatatctacagtcagatccagcaactacaacttcatcatagctgcaacgaatttcctgaagttctttatatagagcgctctcatgttgccatagatccacaataatttattagtatgaattaacggatgctagtatctttgaatacttggcattatcctgacaattattatcccaacattggatcgaagtgtgcaaactgatacaataattatcttgttactttactccgtaccgtatttctacctcc

SEQ ID NO: 21047 - DNA, 561 bp, Oryza sativa
  ref <308>: DATABASE ACCESSION NUMBER: AK071346
  ref <309>: DATABASE ENTRY DATE: 2001-12-06
ggctcctccggctagctaaatgtagccaacctcctccactggctaaaggtgggtcccaccaccactcccatccccatccaacatctctccctgccggcgacgaactgagggcatatgccggccatgagcgccccccgccaatgtcgtcgtctaggccaccgtccgccgtggcagtcgtcgtcgtcgccgtcgcgcctcacgcacgagccgtcgcagccatcgccgctgctgcgcagggagccaccgccgcctccgcctcgcgcgctggagccgtcgccactgccgctggatcgatgggtcgatgctgccacgcgggagaaaagaaatgggaagagaaagagaaagagaaagaggaggaagaggaagggaatggagatgggaggatgacatgtgggtttctttgtgattttggagatgtaaatagagagactgttggagcatacatctagtttgactacccaaatcagttggagagttggctaaatagatatttgaagagtctaatttaaagatgctgttggagatgctcttaattcagaaggaaaaaacaggtgaactacc

SEQ ID NO: 21048 - DNA, 901 bp, Oryza sativa
  ref <308>: DATABASE ACCESSION NUMBER: AK071347
  ref <309>: DATABASE ENTRY DATE: 2001-12-06
gaggtgagctctctcgtctcgcctcgtcttcttcttgctcagggcagatagaaatggcggcggagacgttcctcttcacctccgagtccgtgaacgagggtcacccggacaagctgtgcgaccaggtgtcggacgcggtgctcgacgcgtgcctcgcccaggaccccgacagcaaggtggcgtgcgagacgtgcaccaagaccaacatggtgatggtgttcggcgagatcaccaccaaggccaccgtcgactacgagaagatcgtccgcgacacctgccgcggcatcggcttcgtgtccgacgacgtcggcctcgacgccgaccgctgcaaggtgctcgtcaacatcgagcagcagtcgcccgacatcgcgcagggggtgcacggccacttcaccaagcgccccgaggagatcggcgccggcgaccagggccacatgttcggctacgccaccgacgagacccccgagctgatgcccctcagccacgtcctcgccaccaagctcggcgcccgcctcaccgaggtccgcaagaacggcacctgcgcctggctcaggcccgacggcaagacccaggtcaccgttgagtacctcaacgacgccggcgccatggtccccgtccgcgtccacaccgtcctcatctccaccctgcacgacgagaccgtcaccaacgacgagatcgccgccgacctcaaggagcacgtcatcaagccggtcatccccgacaagtacctcgatccgatccgttacctgattttcttccgggattgatgtgtgttgttggcttgaaactatgcctgatctcagtgatgttgttgtcagctttagctttggtatgcaggatgttacctcgttgtgaacttgtgaggagttcgttcatctctattgcctgggtctacatttcg

SEQ ID NO: 21049 - DNA, 1910 bp, Oryza sativa
  ref <308>: DATABASE ACCESSION NUMBER: AK071348
  ref <309>: DATABASE ENTRY DATE: 2001-12-06
ggggtcccacattcttcctccctctgccctccctccatctctttcccttcctccgtcgccgccgctacccttctctctctcttctgtgttccggcggcggcaaggccgacctgctcccccgccgcctctcctcctcctcctcctcgcgcgcgcgccgccggcgaacggccgccgtatacttacccgcggtgcggacgggctcctcttatctcctcccccgaccgcatcctaccccctctctctcccttgtgagccctcctcggcgcgcacggcccccgccgccggcgagcaggctcggaaccagggggggtgggggactcgacgcgacgagccctcgttccatcggcctctgtctcggttgagtcgaattgaagtataatggcataccatggacagctggatggacgccaagcttcaggtttgatgcgtgatggcgccttccctgcagccagcctttctggccgccaacctttggatcgcgctgccaccgctctggagatcttggaaaagaaacttgctgagcagaccgccgaggcagaaaagcttatcagagagaatcagcgattggcatctagccatgtcgtcttgaggcaggatattgttgatactgagaaagaaatgcaaatgatccgtgctcacctaggtgatgttcagacagagactgatatgcatatgagagatttgatggagagaatgagattgatggaagcagatatacaagctggtgatgcagtgaagaaggaacttcatcaagtgcatatggaggcaaagagacttattgctgagaggcagatgctcactgttgagatggataaagtaactaaagagctacataagttctctggtgacagtaagaaacttcctgaattactgactgagctagatgggctccgaaaagagcatcagagtctaagatctgcttttgaatatgagaaaaacacaaacatcaagcaagttgagcagatgcggacgatggagatgaatttaatgactatgaccaaagaggctgacaagttgcgtgctgatgtggcaaatgctgaaaaacgagctcaagtggcagcggctcaagcagtagcagcacaggcgggggtggcacatgtgactgcttcacaaccaggggcagcacaagctgtggcagtgccagctgcctcaaacccatattcaagtgcatttaccggtcatccctctgcatatcaccaaggagccacccaagctggggtttatcagcaagggaccacccaagctggggcatatcagcaaggatctacccaagctggggcatatgcttacccaacttatgatgccgctactgcttaccagatgcatgctgcgcaagcaaatgcatacgcgggctatcctggttatccagttgcagggtacacacaggccgctttgcccggttatcctagtgcgtatgctgcaccgcagcaaccaataagcagtggtgtagctacagatgttgcaagcatgtatggcgcgatcagtagtgctggatatcctgctggagttgttcagtcaagcagtggagctgccaatgcaggacaagcaccagctacttatcctgtcgcatacgacccaaccagagcaggccagaggtgaaatcgtagtttcagtctcagacccaaatcactatttgctaaacccattttgtggtgtagctgtagtaagatccttggagaggccaacaacagcatggctctagttcgtttttcttgtagattccttccctatacattttagcggtcaatgaaaattagttgtatatcgaattgctgctcttggttcgatacttgaatttaattagttgtataccgaatagatcacggtcaacttgaatctctgtaattcccggttaagaacgacacccggcaattttctgaatgctttagctccagtgctcttgagacatg

SEQ ID NO: 21050 - DNA, 966 bp, Oryza sativa
  ref <308>: DATABASE ACCESSION NUMBER: AK071349
  ref <309>: DATABASE ENTRY DATE: 2001-12-06
tagatcatgcaacaaatgcgaacggatactgtcttgttaaccaaagaagaaggtggttcacctatccgaaatcctccaactgctgctgaagatgcacgattggcatctctcatatctttagacaacatcataaaacaagtgaaggaagtaatgagacaaagttcagcaaggccattgagaaaatcaaaaaagaaagcgttgctagaatcattggatgatctattggcacaaatgccttctcttcttgacgttgatcatccttgtgctcagaagcagatcatggaagcaaggaaagttgtagagtcactgcaagaggatcccgatgaacctgccacagatttgaattcaaacacactgggcgagagcgaagtttcacagtggaacgtactacagttcaacactggaacatcagccccattcatcataaaatgtggagcaaattcgagctgtgaactggtcattaaggctgaccaaaaaattcaggaacctaaaggtgatgagataatccgagttgttccaaagccatcagttcttgcagaaatgagctttgaggaaataaaaggtgtctttgaggaattaccagaagcaatcagcttgcttgccctggcacgaaccgccgatggtacaagagccagatattctagactgtacagaactctagctaacaaagtaccagccttgaaagacatcgttgcggagatggagaaaggtggtgttttcaaggatgtcagatcatagttttagttcattcttagagtttatatattactccctatgttgtatatggatgccaattgagggcattcggtgtaacttccttttttttgtttatacaatgaacaagcctatgttgtaacattattttttggtcgagagagttactttgcctctctgattgccatactcaggatgcttgatgtttcataatattaaggcagccgtagctgataaatgcttgttcaaagc

SEQ ID NO: 21051 - DNA, 2161 bp, Oryza sativa
  ref <308>: DATABASE ACCESSION NUMBER: AK071350
  ref <309>: DATABASE ENTRY DATE: 2001-12-06
gacgcttctcgccgccgccgcctcctcgctcctctcctctccggccatccgccgcgaacccccgaaatctcccgccggcgaagatgcacctgtggccgtcgctccggatccgcgactccttcaaacacgcctaccttgataagctggagttcaacctcgcccgcatgaagcgcgcgcggggcgaggaccaggaccaggaccagcagcagccgcccggcgacgggaaggcgccgctgctcgagggcctccgggctccgaggagctcgttcgtcgccggcgcgcttgagctcgccatggacgccgccatgctcctcacctgctgctgctgttgcttctgctgtggcggtatgtaacacagactgaatcctgttttcaattccatttctaattattgggatcgcagaaattcaaccatgctaccatctatttaatttatcattattttttgcacagattcagcgtttgattgtgaaaaaacgcatttatcatgatagacgaagtattgtctactaattttcagtttttctgaatgccctaaaaaatttccacttgtatttctacttgaatcagacagaacaaaatcatgtgatagattacgactgcgatagctcgtagagttgtaggttcaattgattgagatggtataggaattaatattctggtcgtgtatggtatggattggtttcctgatcgatcaagttgaatctgtctccttaacattggggcttcagacttgatcgcttatgcttaactacttaaccacatataattcgtaagaaatcatctcctacaagagcacccaacctttttggtaagttggcaaatggcaaccatgggaattcactgtacacagtttctattggaggctgtaactcacacctctgtcgttgttagcaatctcaaatgattgcagttatgcaatgtggggtgttcacgaatgttaacaagagttgtggtgtgatctggttacattgagggcatagtgtgtcagagcgtggctgtagttcagggttaattgatgaatttacgatggcagtgaaactgtgaaagtcaaggtttgctgttggacgcacctgattatgtgcttttcctttttgtcctgagtcagcagtttgatggtccttccgtaatacgttctcgtgggctatcccgtcttcagtttgatttccttgcaaacagagtcacagactcaagtcaggacatttgaaaacaacttcatttcttcaattcataaattgtggccaagttgttttgaattatgattactgattagacacttttgtggaaaccctcatatccaaacatctgaagatattatgcatgtttgtttgaaatctcaatactaggccaaaaactcatttaggacgacaattttgagaaaactatccagggaccagggcggcctactatgcctgttgaaattgtttctgcactgatttttctttttagaactagattcctggactctgactgaacaagaagattttcccgctgaaagtggacattgtatattgttggtgcttcagcggacattgtatattgttggtgcctagtacgatcacgagttgctatggatctatcgtgcatatgccgcatgcagatctttggagggacacataattgactctccttaatttaatggctactgctaattggtgggcatatgcaccttcctgttttcgaacttatgatttgtcactgtgataaaataagttgaagccgttttccatatatatttggtaattcatgttcttgcgatctccattttgttccatgaccatcatgttcttcatttgcaaaagaaaaagagaaccgctaaaatcccctttggtttctttcctgaatttgatctagctaactttattttttctaactcgtatataaccaaaccatctgttttgttccagcttgtggtgacgaggaagatcatcctattgctcgctgagaatcaccttcagaagagttccctgaagaaaaccagaaaatgcatggacacagtcaaataacatcgtctctgtatatatggatttttggttgttcgctgatgtggctcaaagatgccactggcaaatatacatagaagtattttttttatgtagaaaattaatgtagttatacttcagaatcaacatgtgtgctctagaaagtcgtatttacattc

SEQ ID NO: 21052 - DNA, 1564 bp, Oryza sativa
  ref <308>: DATABASE ACCESSION NUMBER: AK071351
  ref <309>: DATABASE ENTRY DATE: 2001-12-06
gttcgtcccccaccccgctgagccatcatttctctcaaatttctcctcctccaatccaaggccccaaggaattgaaggatgatgctgctcgccaaggagttgggcctgtcgccgccggcagcggtcactcctcaccggaggccgccgcctgccagggtccccgcctctccctccggtggctcgcccgtggccgtcggagacctctggctccggaccaaaggagccggaggaggaggagacgggttcgggagccacagccacgagagcgagatggatttggccatgctcgtcaccgacttccttgagaacggcggcaccggaggcgccgattcccgcgccagcagcgactccgactccgccctctccgaccacctcgccgataacatttctatctacaagcaaggcggcgatgagaaagaaaacgagctactctccatggtccactcgctgttattctcgatccatgagtcagaccttctggctttcaaaagaggtcaatgcagtgccagctgcatccgtcatttacttgtgaagctcttgagatattcgggatatgatgcagctgtttgcgtatcaaaatggcagggattcgacaagatacctggaggtgatcatgagtatatcgatgtcatcatgaatagtgatactgaatatcgtctgatcattgatatcgacttcaggagccactttgaaatagccagggctgttgattcttatgacagtctgctcaattcacttccggtggtctatgttggcactcttcccagactgaaacagttcttgcatgttatggtagatgctgcaaaatggtcgcttaagcagaactctatgcctctgcctccttggagatccttgccttatctccaagcaaaatggcattccaagtatgagaggatagacctgcacattgagcaagacttccacagcacagcttcagatcacgcactatgcattgggcacctcaaaaggctgaaatcctccctgcagtcagaactggataccgaaaggttgcttatgatgccaatcaagactgatatgaagcggagggcaaagtttgagaggcggcggcgccgttccttgctcagcttctgattcatatttgtgcttcttggatactgaagtactgagagaaggaagaatagcttcccatacttttttctgtgataaaaggagttctttttaacagttttggacatacaagggaaatagatgacgggtactaacaaggcaggagagttgagagagtgtgccagcttttttttgaaggcatatacaaaaacataaaattctttttggatttcatttttgttcttccggcgatgatggctgctagtggttaatctgctgcataccatgtacaatgatgagtgtttacagcgtttttttcctccttatattcattcttttatcacatagatggaccttgtgtattttgaacacacttccttttcccccttgttgtagagtggacatgatacatgctgttggttccctttgtaataatagaatgttcaagcttagttacactctgttttgaaatgatatactctaaaatgttctggcc

SEQ ID NO: 21053 - DNA, 832 bp, Oryza sativa
  ref <308>: DATABASE ACCESSION NUMBER: AK071352
  ref <309>: DATABASE ENTRY DATE: 2001-12-06
gaaatgagctatagctgaaggtgacaaacaaccaaacgtacccggcggacccctccccggctcccctcccctcgttctcgatcgatccagatcgatcggtgtcggcaaccgccgccccgtgcaatgcgtcgcgcctcttgctccctgcagcctcccctcatcccgcgctctgctccctccatcttgcttcgcgtcgcccgtccagtggtcggcgctcgctgcttgctgctggttcatgccccaggacccaagcagccgtgcggaggcgctgtcctatgccgtgagatgcccactggtcgccgtcggcctcgcgatgagcaacccaggccgagtgcgtccctatccaacatggaggaggaagatgaggtgccgccgtgcgtcggtccttccgctgactaaccctaaggattagttaatagtactggagtatttgacggggtggttgcgacttgggagtaggattttacggagaaaatggaacaccctgcaatacaagccaaaggaaggcaaggaggagatggttttctcgacgaacatgaagtactcgtaactctctcgccagggagcttccctccccggcccaagcaaggatggaggtgaagccggagctcaatcgatctgcacagggttacacgaggcacttcttggttcttcgatccagctagctttgggatcgatcgtccggtaataagctcctggtatgctcctcttcagtaccccctggccctgtcatgctcctcttcccccctttagttcggattttcgacgccattcctaaatcctgtgacattttcatgaacatgttgtcttccagatggatctccatggttct

SEQ ID NO: 21054 - DNA, 754 bp, Oryza sativa
  ref <308>: DATABASE ACCESSION NUMBER: AK071353
  ref <309>: DATABASE ENTRY DATE: 2001-12-06
ggaattcttgcttcgccagaggaagaagagaagagagaaggggaggaggaagaaatggctgccgtccaagcagcaatctccacctgctgctcttcgtcttgcctgtcccggccgccaccgccgttcgcgaggaggcggcgcttcaaggtcacggccatggctccccagaagaaggtgaacaggtacgacgagaagtggtcgaagcagtggttcggggcggggatattcgcggaggggagcgaggaggtggaggtggacgtgttcaagaagctggagaggcggaaggtgctgagcacggtggagaaggccgggctgctgtccagggcggaggagctcggcgtcacgctctcctcgctcgaggagctcggcctcctctccaaggccgaggacctcggcctcctcagcctcgtcgaggccgccgccgccgcctcccccgacgccctcgcctccgtctcgctcccgctcctcgtcgccgccatcgccgccgtcgtcctcgtccccgacgactccgccgccctcgtcgcgctccaggccgtcctcgccgccgtcctcctcgccgccgccgccggcctcttcgtcggctccgtcgtcctcgccggccgcaggagtccgactgatcgtcgccgcagggtttgatgatcactaggacatgtacgtattaatcaccgtatttatacagtgcttagtgtgttactagtatcgactggttctcgagatgaaaatttgttgtaaatttcaaggagtttcaggctgc

SEQ ID NO: 21055 - DNA, 4512 bp, Oryza sativa
  ref <308>: DATABASE ACCESSION NUMBER: AK071354
  ref <309>: DATABASE ENTRY DATE: 2001-12-06
gagcgagatctcgccgcggctgaaagctacgggcctaccactactacctgcgtgcgtgcggtgcgtcccccatagttgttctgtactcaaaacatggcccatgttttcgttcaaatccaaggaagctgacagcatgtcccgctggtcgaagtaccttagtactgaagagtcacccccttcagcatcactaagctggagggctatgggtgtcgatggccctcaaggttctgcaagtggccagaaacatcttcagatggagccagttgtccaactgtcaaaggtcgctgaaggattgttagccaaaatgtataggctgaatagcatcttggactatccagatccaaatgcgcacacattttcagaagcattttggaaagctggtgttatgccaaatttcccaaaaatttgcatcacattgtcaaagaaatttcctgaacatcctaacaagctgcagcttgaaaaagtagataagtttgctcttgatgcgctgaatgaaaacgcagaaggttacatgcaaaaccttgagcaatggatcacgttgcttcttgatttgctggaattccgtgaacaagctcttcgacttattttagatctgagcagcacagtcataacattgctgccacatcagaactctttaattcttcatgcttttatggatctcttttgctcttttgtgcgagttaaccttttctctgacaagataccaagaaagatgatcctccaagtttacaatatcttgcatatcatgctaaagggtggccgtgattgtgaattttatcatcgattggttcagtttgtggacttatatgatccaccagtcaaggggttgcatgaagatctaaattttgtgagcccacgtattggagaggtcctggaggctgttggcccaattatctttctttcaactgatacaaaaaagttaagaaatgaagggttcctcagtccatttcatccacgttatcctgacatccttacaaactctgctcatcctatgagggcccaagacctggctaatgtaacatcatatcgtgaatgggttcttcttggatatcttgtttgtccagatgaactacttcgagtgaccagtatagatgttgcaatggttgttctgaaagaaaatttagtactctccctgttcagagatgagtacatcttactccatgagaactatcaactctatgtccttccaaaagttttagaatcgaagagaatggctaaatctggacgtactaagcaaaaggaagctgatctggaatacaatgttgcaaagcaggttgagaaaatgttaatggaagtacatgaacaagcattggtgtcagctgatgctctacatcatgaaaggagaattcttctgaaacaggaaattggaaggatggttttgtttttcacagatcaacctagtcttcttgctcctaatattcagatggtcttttctgctcttgctttggctcaatgtgaggtggtttggtacttccagcatgtggggattgcatcatcgaaatctagtcgagggagaacagttgacattgatgcggcagacccaactattggattcctattagatggaatgggcaaactttgttgcctggttcgtaaatatatagcagcaataaaaggttatgcattatcatacttgtcatcttgtgctggaagaatacggttcttacttggtactccaggcatggttgctcttgacctagatgccacactgaagggcctgttccagcaagtcctccattgtctggaaaacattccgaaacctcagggggaaaatgtccctgctattacttgtgacttaactgatttgcggaagcactggctatccatcttgatgattgtcacatcatcacgatcatctgtaaatattagacatttggagaaggctactgtgtctactgggaaggagggcctggtctcagaaggcaatgctgcttacaattggtctagatgtgtggatgaacttgagggccagctttccaaacatggaagcctgaaaaaactttacttctaccatcagcatcttacaacggtcttcagaaacacaatgtttggtccagaaggccgtccccaacattgttgtgcgtggcttggagcagcttgctgctttccagaatgtgcttcttccattattcctgaagaggtcaacaagattggcagagattctatctcatatgttgagtcccttatcgagtctataatgggtggattggaaggtttgataaatattctagattcagaaggtggatttggttcattagagatgcagctttcgccagagcaagcagctatccgattgaataatgcaacaagagcaaaagctgtttcaggcttgttagcaccagggcatgagagctatcctgataatagttcttcagttaagatgctggaagctgctatgcaaaggctgacaagtctatgctctgtgctaaatgacatggagcctatttgtgttctcaatcatgtttttattctccgagagtacatgagggactgcatcataggtaattttaggagaagatttcacagcatgattagaactgatagctgccttcaacgaccatcagtcatagaatctcttctaagaagacacctgagcatcatccatctggcagagcagcatatcagtatggaccttactgaaggtatacgggaagtgctacttgcagagagttttactgggccatttcccaacctgcaagtatttgagacaccaacagaaacacatggaggaggatctgccatagacataatatctaattggtatattgataacttcgtaaaggatgcatctcgcactggagttgtttttgatgcatctcagaattgctttaggagctcacagcctattggtggtggatatttagcggaagcattcacagataaaagagaactcaaagcacttgttcgtttatttggtggttatggagtagataggctggataagttgttaagggaacatacatcagctctactaaattgcattgactcagcgcttaggtcaaaccgcgatgccttagagggccttgctggaagtgtaaactctggtgataggattgaaagagatgcaaatctaaagcagataattgacatcgaaacattggctgacttctgtatccaggcaggtcaggcaataacttttcgccggttgttggtagaagctgttggagctgttcttgaagagaaagtacctctcatatattctctgctcaagggattagctatgcagttgccagaagaggtacctgataaaaatgagatcattagactaagaagggttgctagcagtgttggtgtcggtgacaaacatgatgccgagtgggttcattctattctggcagaaataggttctgctaatgataattcttggaccttacttccatatctttgcgctgcatttatggcatccaatatgtggagcactactgcttatgatgtcaatacaggtggattcagtaacaatttgcattgcttagcaaggtgtgtaagtgctgtggttggaggaagtgaatacactaggatggaaagggaacatcggagaagttcactttcaaatgggcatatggatgagctgcaagagcctgaattactgagccgtgtctcagctgaagcaaatattaaatctgctatgcaactctatgtcaaattgtctgcagggttagtcctggattcatggaatgacactagcaggccatacattgttccaaagctaatattcctcgatcaactctgtgagatgtccccctacctcccaaggagcaccttagaagttcacataccttacacgattctgcgttcaatctaccatcaattatatggagcttcactgatggccacagaaccaatggagccatccccaaggcagtcccctctgatatctctggctcatgcatcaccatcaatgaagcaaaatcgagcagacacaacgcccaggtctcatactttcgagcctggataccacagttcatctgggtcccagtacgatgaaggttatgaaggggatagaagaactggagagaggcaactccgaagcatgaggcgatctgggccactagattacactggaaccaggaaagtgaagtttgtggagggttcaagttctggaagccatggggctggctcaggctcactacagagatttgctgtgtcaagatctggccccctatcctacaaataagatcatgttaacaagtaacaacagcattctactggcaatcatagtttgccagcatcagtatctagcaatttgtatttgagtggactccagtcaatgctcccattcgtctttgtagagcatctgagcatatatgttatttagctcctttgcgtgaagtaatatgtattctagctgtatttacgtacctagtgctcttgtaagtctatatgtatggtacctattgctcttgtaagtaaaccctcctctgttgctacatgaattagcaatgtgctagttgtatgtctgttaatgtaaatggattgtataattgccttctatcccagatgtaacgaacgacc

SEQ ID NO: 21056 - DNA, 1775 bp, Oryza sativa
  ref <308>: DATABASE ACCESSION NUMBER: AK071355
  ref <309>: DATABASE ENTRY DATE: 2001-12-06
gattttgcccttccccaccgctgccgcctccgcctccgcctccgccgatccccatccatccatccggcgagcgagcgagcgaggagggtcgccgtcgctcgccctgctgcttccgccgcatccgttccctacttatattattttgaagagatgggtagatctccaaggggccggaacctcccagctcgtcgacgtggatcatcttcatcttctagtgatttaccttcctgctgctggaagatgaaaggaacatgcgagcaaaatgatatagcattggtctctgagaaaaaagaatggaaaggagcttcttgcccagtttgcctggagcatccacatgatgctgtcctcctcctctgtacttctcaccacaagggttgccggccatatatgtgtggtaccaaccaccagcattctaactgcctcgaacacttcaaagaagcttacgcaaaggagaagttggcccacagtgtattaattgagtcttcacctggcctttcattatctttgaattctcagccagccagcaagcaacaatgtgcaatggaacttgcatgccctctttgtcgtggggatgtcaaaggatggactgtggtcgaaccagctcgccagtatctcaatcgcaagaaaagagcctgtatgcatgatggctgctcattcattggttcatacaaagaactttgcaagcatgtgaattccaagcatccttcagcaaaacctcgtgaagttgatcctgcacatgcagatgagtggaaaaagtttgaatgtgaaagagagcggcaggatgccattagcactatcagaagcatgaccccaggggctgtcattatgggagattatgtggttgagtttaatggtggcagcaacaacaatttactttctgatggagatgacttggaggagaggctcaacttcttcacatccttagatcgcactctgaatgagaggcttgacttctatgagtcatcagatagtagtttggatgacagcattgacttcttggcatccttatttggccatggcaggagaattgccagtggtgattcatacaccagagcttacagaaggtacagggagaggcctaggcgtaatgtcacagctagctcggtcgctgcctctgatatccagcatgattcagctaacactcgaaggggacgtgtcagtggtattcgggccatagggaggacttcgcggcggtaccatcctgtggtgactcatgtaaggtcaacacatggcatctaagaaagggagctaccacgggttctgttcattctatccatccgcaagggaggcaaaataacataccgcggcatttgatgcctggttttcagaggatcatcatgttcttccagtacctttttctttgctgagacaggcagcaaccgaggatacaggttggacggagatctctgttagggcactgctcatgcctatatagggcaaaaacagtgctgcttttttccggtgctgccttgcatggattttgtgaatgcccttttcttttccttccattggatcgacgcaaatgggtttttttgtttggcagcgattgctgttccaaaacatgaacatcatgaaaacttattgggcatatttgcttgtcatgtgctgccgttttgtatccatgttctagtggatcgcacgtttgatcctagcgacttattagctattattatcatccatgagcatatcttttgtttgttgttaccatgctgcaacctgttactgttgatttgacaggaacgctacagcagtcatatcagtttgttgctattgag

SEQ ID NO: 21057 - DNA, 1043 bp, Oryza sativa
  ref <308>: DATABASE ACCESSION NUMBER: AK071356
  ref <309>: DATABASE ENTRY DATE: 2001-12-06
tttgatgaatgtgacaagatgctcgattcacttgacatgcgtagagatgtgcaggagatcttcaaaatgacaccccatgataagcaagtgatgatgttttcagcgacccttagcaaggagatccgcccagtttgcaagaaattcatgcaagatcctatggaaatttatgttgatgatgaggctaaactgacccttcatgggctagttcagcactatattaaactaagtgaggcggagaagaaccggaaattgaatgatctcttagatgcactggacttcaatcaagttgtgatatttgttaaaagtgttagtagagctgcagaactgaacaagctgctttgtgaatgcaactttcctgcgatctccatacattctggaatgacacaggaggagaggcttacccggtacaagaacttcaaggaaggacacaagaggattcttgtggctactgatttagttggcaggggaattgatattgaacgtgtcaacattgtcataaactatgacatgcccgattctgctgattcgtatctacacagggttggaagggctgggcgttttggaaccaaaggacttgcaataacatttgtttcctctgcctctgactctgatgttcttaatcaagtgcaagaaagattcgaggttgacataaaggagcttcctgagcagattgatacttcgacatatatgccttcttaaagatccgggtggattgcttaaagcttacattcgaacggaaacgagagtatctccttgagatacggcatattaagaatctatcggataactaaaaacttagtgtgagaaatgctgccctatctatacttagacagcagtttagatctgctgctaagtgctgaatgccccgtaataatacttgaaatgatgtatctgggcaattgggcatgtacgtatttgaattgcagtcgttcattgtaattccgagaattttattaggatttgtttgtgttaattttgctactccgcagatgctaacgtgggttagtttatagtactttgtttatggtacttttgaggatttc

SEQ ID NO: 21058 - DNA, 2117 bp, Oryza sativa
  ref <308>: DATABASE ACCESSION NUMBER: AK071357
  ref <309>: DATABASE ENTRY DATE: 2001-12-06
tggagcccgaacgaaccgaccggaccgggggtttcgttggcagatctcgccggccgccgccgccgccgccgccgcgagcagttcggccggccagccagccacatcggcggagtgagtgtgtgtgtgtgggggggagatgcagagcgtgacgcggctgacgctgctgctgtgcgcggcctgggcggccgcgctgctctacggcgagatgggcgcctactgggccgcccgcctctcctgctcctggccctcctcctcctcatcgccgccctcgtccttgtctccgaataatcatgtgaagattgctgttgttgccgatccacagcttatggacagcacctcccttggccttccaccgagctcaattgcgctgcaagctgctgagttctacacggatttgaacatgagaaggtcctttcagtctgttgtacttccattcaagccagacatgctattatttcttggtgatcactttgatgggggcccatatatgtccaatgaagagtggcatgaatcgttgtctcgctttaagcatatattcagcatgaatgaacatataacaaatccaaacatcccaatctactacctttcaggaaatcatgatattggctactcagcatttcacaaaattcatcctgaggtgatttctcggtatgaaaaagaatttggatcaagaaattaccaatttttggctgggaaggtggattttgttgttgttgatgcccaaactcttgatggagctaaagaaagcaaagaaagatcctcctcttgggagttcatcaaagcattgtcacctggtaacaaaacaaacccaaaggttctactaacacatattccactctaccgacctgacaattctccttgcggtccacatcgttcttcacctgttatcaatcagagggtatctaatgcagccatggatcaagggataacctaccagaattatctgagcaaagagacttctgacctcttgctacacttgttgaagcctgttcttgttctctcaggccatgatcatgaccagtgtacagtagttcatcccactccttttggaccagtaacggagcatacccttggtacaataagttggcaacaggggaatctctatccatcttttatgcttctatctgctgggcccaagctgccagcaaattctactgatatagaacatgaggttctgacgaatctttgttttctgcctaaacaaactcatatctatatatggtatatcttccagtttgtggtgacgcttcttctgcttatcttgtggccaacaaatggtctcagatctcttccgtacgtgaactcatttgtaagcttcatgcggtcagtggctgctgaattgttttcaagaacgaaagaaaaagatgacgaggaagatggtgaatatgaaatggtctgggatgcagagggatccatgcacctggttaaaaaggccgtggcaagaacccccagcactagctcagactcaagaactacaggacggggaaatgttgttgcaaggccaacagccagaaagaatcaaccggagcctgattcatcggttcttgttgagatgagctcagaaatgatatcagaagatggaggaaaggtgcctcgctcgagcaaattgaaaataaggagggtgcttcagaggctgtttcgtgtcattcagtcaattgttgtcattgccgcattgaatgtccctctatacatgatgcttctgttcaaggattggatcgaccgttgaatagagtgcgaaagcctagttctatcagtaattaagggatacaactataggaggacttgcaaatgcaaggtcgaataattaatttgatattgctttggttgacacagaaaaatgatttaccagttcaaccagggtgatcgtgttgtgcatcaacgttcagtggcccgttcttttgtctgttaggcctagagctatacttttttgtacaatgttcataccagtagatattgcttgaagatcacagatggttcagtagaagtatcagattttggttgtatctccacctgacctgacacacgtaatgcggcatataggagagggcattgtactgtatattccaacaatctttttatgttcttctaaaagtccaccagatattattaattacatg

SEQ ID NO: 21059 - DNA, 2117 bp, Oryza sativa
  ref <308>: DATABASE ACCESSION NUMBER: AK071358
  ref <309>: DATABASE ENTRY DATE: 2001-12-06
gatccatcccgctctctctctctctcgacgagagagagaaagtgcgaagatatgctttccgtcgcccgccggcccctctccgccgccgtccccgtcggcaacctcctcggcatccacctcttccaatgccctgtaactactgtctactcctattttccctcctcaatccatctctacccttactacttctaatttttttatttttatttttattttttttggaaaaataataattatatcattacgatgttagtattgaggaggaggaatcattaaaatggaatcccctcccctcaaacaatacagcaccaaccatggtttggtttgtccaaatcgggggaagaagaaatttaggaatggactggagtggaggaacaagatgactgatgctccatggtggggatataataaataacaagatgaacgtgtggagacacactggacatttgggtttctatttcacccattggaactctccaaatctcctctctgtttttttaattattatttctttcatctaaattaacgtcgtctacatagtcttgtctgttttaaagattatatttgctagctattctaatcttattttcttataataaggtggtcgaggtattccttcacctctctacattttacttgctcttctctcatcctctccctccatgactgatatttcattcaaagctgaatgtcaaattgcacacttctaagatttaaggcgtgtttacgttgcttcactctctttaccatttacgcattggcatcagcagcgaacaagagcatcaccaatgggttctgccaagggaccaagctggattgatgggttcgattatttctgaaattttctctacttcactgattttcaggaattccggaccacattttggtcaaagtttgaaaaaatcgatcaaaatctgccattggaccaccgatttttcatgatttctttttctttttttaaaaaaaagaaaaacagcgagtgatccctagagtggtttccttagtctgccatttcctgcgcatgcatcgattgattgatttatgggtgggttcctcattttgaatgaatatgaacaggacacggtgggcattgtggcgcggctgtctgagtgcatcgcctcgcgtggtggcaacatccacagtgtcgatgtctttgtccctgacgacaaacccgtcttctactcccgtagtgagtttacctacaatcccatgctatggccgcgcgatgtgcttcgcaccgacttcctcaatctgtcacaacacttcagcgcacaaagatctactgttcgagtccctgatcttgacccgaaatacaagatatctgtactcgcttcgaagcaggatcattgtttgtttgacttgctctatagatggcaagagggaaggcttccggttgacatcaattgtgtcataagcaaccatgatcgacttaaagataaccatgtcagacgtttccttgagagacatgggatcccctatcattacctaccgacaagcccaggaaataaaagagagcaagagattttagaattggttcaaggtaccgattttgtggtactggcaagatatatgcagatattatctgaaggctttctcaaggcttatggcaaagatattattaacatccatcatggtcttcttccctcatttaagggagggaatccttcgagacaggccttcaacgctggagtaaaattgatcggcgcaaccagccattttgttaccccagaacttgatgctggcccaatcattgagcagatggttgaacgggtgtcccacagagacacgctacagagctttgtggtgaaatctgagaacctagagaagcagtgcctagcagaagctataaagtcgtactgtgagctccgtgtgctaccatatgaattgaagaagacagtagtgttctgatatcttttgaaggaagcgattttgtttgtttgtttttatttgttgataagaggaaattactacagtacaaaattttgtggtgttgattgctttggtgataaggaggtgggtgtgtgggcgtggctggacagtgcattttgtaattgattgagtataacaatactccaaagcaaataaaatgataatgcataatagtagtaattggtatg

SEQ ID NO: 21060 - DNA, 2374 bp, Oryza sativa
  ref <308>: DATABASE ACCESSION NUMBER: AK071359
  ref <309>: DATABASE ENTRY DATE: 2001-12-06
gtccttttcttcctcctttttcttgtactcgcaacctctctcacgttgcgtgttggttgatgtcttgatgactccgccgcgggacaaatggcgaggggaaagtgagcgcgcgttcttcgccatggtttctttgccgtgtctggtggtgctgcttcttgccgcggccgtcggcgtcgaggccgccggcggcggcggtggtggtggagtggagttcgtgtatgatgggttcggtggcgcggcgctggcgctcgacggcatggccaccgtgacgccgggcgggctgctgctgctcaccaacgacacggacatgaacaaggggcacgcgttccacccggatccggtgaggttcgtcggcggcggcggcggcgggggcggcggcgtggtggcgtcgttctcgaccactttcgtgttcgccatcgtgtcggagttcctggacctgagcacgagcgggttcgcgttcctggtggcgccgagcagggacctgtcggcggcgatgccgcagcagtatctcgggatgttcaacgccagcggcaacggcgacgcgcggaaccggatcttcgccgtggagttcgacacggtgcgcaacccggagttcgcggacatcaacaacaaccacgtcggcgtcgacgtcaacagcctcaactcctcggcggccgccacggcgggctactacgacgacgccacggcggcgttccagaacctgagcctgataagccggcagccgatgcaggtgtgggtggactacgacgccgccgcggcggaggtcaccgtggccatggccccggcgcggcggccgcggcccaagaagccgctcctctccacggccgtcaacctctccaccgtcgtcgccgacgcggcgtacgtcggcttttcgtcggcgtccagcatcgtgctgtgcaagcattacgtcctcagctggagcttccgcctcggcggcggcggcgccgccccggcgctcgactacgccaagctgcccaagctaccccgcattgggcccaagcctcggtccaaggcgctcaccgtcgcgctgcccatagtcaccacggcgatcgtgctcaccgccgtcgccgtcggcttcctcctcctccgccagcggctcaggtacgccgagctgcgcgaagattgggaggttgaatttgggccgcatcggttctcattcaaagatctttacgacgccaccggcgggttcaaggacaagcggctgctcggcgccggaggattcgggagagtgtacaagggcgtgctacctcggtcccggaccgaggtcgccgtgaagagggtgtcacatgagtcgagacaagggatgagggagttcatcgctgaggttgtcagcatcggccgcattcgacaccgcaacctcgtgcaattgctcgggtattgcaggcgcaaaggggagctcttgctggtctacgattatatgccaaatggtagccttgacaagtacctgcacgggtgcgacgagaagccgatcctcgattgggctcagaggatctacatcatcaaaggtgtcgcgtctggcctattgtatatgcacgaggattgggagcaagttgtcatccatagagatatcaaggcgagcaatgtgcttcttgatagcgagatgaatggacgactaggtgactttggacttgcaaggttgtatgaccatggagctgacccgcagaccacgcatgtggttggcaccatgggatacctggcgccggagatggttcgctccggcaaggcgaccactcgctccgacgtgttcgccttcggcgcgtttctccttgaggtcacctgcggcaggaggccaatagaggaggaggaggaggtcgccggcgccggcgctgacgacgacgaccgcttcgtgctcgtggactgggtgctcgggcactggcgcgagggcgccatcaccgacgcggtggacgccaagctccgcggcgagtacgacgccgcggaggcggagctggtgctgcggctggggctgacgtgcctgcacccgtcgccggcggcgaggccgagcatgcggcaggtgatgcagtacctcgacggcagcgcgccgctgccggagctgccgccgacgtacgtgacgttcaacatgctcgccaccatggacacgcaccagaacgtctacggggcgtggtcggtccggcggtcgtcggcgatgagcgtcgccaccgtgtctgacattggactctccggcggcagatgacgtaggccaggtgttcgacattaggactccagttgattaggatcaacttcacgttggtagcactaattgtagactgtgatttgactttttagcttgcaattagcaattagcaacagatgttatttgggggagatggcgtttgtttgttagatagtatgaaattttgatctgaacagtttcagg

SEQ ID NO: 21061 - DNA, 2453 bp, Oryza sativa
  ref <308>: DATABASE ACCESSION NUMBER: AK071360
  ref <309>: DATABASE ENTRY DATE: 2001-12-06
ggcagcatcacacgtactcagaattcagaaacacacaaccaccaagagagaattaaccaaatgaccaagcttctccactccgcctgccttctcatctgcatttcaggcgccatcgggttggccgcggctgctgccggacacccaggctgccagacgaggtgcggggacgtcgacatcccgttccccttcggcatcggcgatcactgcgcgattcacgagggttttcggctcgagtgcgacaacgccacgaaaggcaccagcaatcagaagcctttctggggggacttcgaggtgatcaagatctccatggaagacggcaaggtctgggtgaaggcgtacatgtccaggcagtgctacgaccaatccacgggcggtatgtcatacagcgacgcatcggcgaatttgagtggttcatctttctggttatcggacacggataacaaaattaccgtgatcggatgcaagactctcgcctacatgacgaccgattcttatgtaatcgggtgttcgtagcatgcgacaacaaagtgaacaaactaactcccaagaatggttcatgctctggcgctggctgctgccaggcaaatgttcctaagagcatacagtactaccagggttatttcaacgaaggctacaacaccactaaaatatggatgagcagcccttgcagctacatggcagtgatggaaaccgcagcattcaactttagcacaagttacctcacatccagcgtattttatgacacgtacaaggggggagttccggttgtctacgactgggccataacatcaaaaacatgtacagaatctagaagaaacaagacttcctacgcatgtattagtaacaacagtcagtgcattgacaacctgacgaatgcacaaggttaccgctgcaagtgctccaatggatatgaaggcaacccgtacataaaggatggttgcaaagatattgatgagtgcctcaacaatgctacttacccttgcaaggggatatgcaccaacacgttggggaatttcacctgctcatgctccccaggaagttatatgatgaatggagattgtatgccaaagaagaaactacgttttgactcagtgcctgtggtagtaggcgcaagtatcatatctgttgtcctggtgattaccataatgtgtgcttacttgatcaaagagagaagaaagcaacagctcatcaaacaacattacttccgacagcatggtggtctgctgttatttgaagagatgaaatcgcaataaggtgttgcattcaaaatcttctcacatgaagaattacaggaagcaacaaataggttcaatgaacaacagattcttgggcaaggaggccatggaactgtttacaaggggcttctgaagggcaacatggaagtagctgtcaaaagatgcatgacaatcaatgagcatcagaagaaagaatttggtaaagaaatgctaattttatctcaaatcaaccacaaaaatattgtcaaactattaggttgttgtcttgaagtagaggtccctatgctagtatacgagttcatcccgaacggcacgcttttcgatctcatccatggtaaccatggtcagcagatctccctggccactcgtcttcagattgcccatgagtcagctgaggcacttacttatctccattcatgtgcttcaccaccaatccttcatggtgacatcaaatcatccaacatcctccttgatagaaacctgatagcaaaggtttcagattttggtgcttccattctagcaccaacagatgagtcacagtttgtcacactggttcaaggaacttgtggatatcttgacccagagtacatgcagttgtgtcaattaacagataagagtgacgtatatagcttcggagttgttctcgtagagcttctcacatgccagaaagcgttcaacctcaatgcacctgaacatgagaaaagcctatcgatgaggtttctcaatgcaatgaagaataacaagcttgcagatatattagatgaccagatcaagaatagtgagaatatgccatttctcgaagagattgcagagttggcagcacaatgcttggagatgtctggtgtgaataggccatcaatgaagcacattgcagataatcttgacaggctgagaaaggttatgcaacatccatgggcagaacagaattcagaagagttggagagtttgcttggagaatcgtccatggtcagctcaaggtataccagtacaggaaatttcagcatagagagaaaaggtgtcatggagctagattcagggaggtagtagctatactttttttttcaaaatcttggtgggcaatgtcagtattatctacttaaaataatcatatcacagatcttattacagtaaatatgcaatatcatattgttggcaaaattacttgcattgtatgtaggacaacaaagtaatgttggcggctgctcaaggaataccctc

SEQ ID NO: 21062 - DNA, 1134 bp, Oryza sativa
  ref <308>: DATABASE ACCESSION NUMBER: AK099172
  ref <309>: DATABASE ENTRY DATE: 2002-08-28
gaaaagcaagaattcgatcgagaatcaccatgatgacaagtagaatgttttcggcaatgcagatgctgatcatggtggtggtggcattggccgggctagctgccggagcgcgcgccggcgacatcgcgatctactggggccagaacggcaacgagggcacgctggcgcagacgtgcgcgaccggtaattacaggttcgtcatcgtggccttcctgcctgtgttcggcaagggccagacgccggtgctgaacctggccggccactgcgacccggcgtcgaacggctgcaccggcgtgggcgccgacatcaagtcgtgccagagcctcggcatcaaggtcatgttctcgatcggcggcggcgtcggcaactacggcctgtcctcccgcgacgacgccaagcaggtcgcggcgtacctgtggaacaactacctcggcggcacgtcgccgtcaaggccgctcggcgacgccgtcatggacggcatcgacttcgacatcgagagcggcgggggcatgtactgggacgacttggccaggtacctcaaggcgtactcgcggcaggggagcagcaagaagccggtgtacctgacggcggcgccacagtgccccttcccggacgcgtcgctcggcgtcgcgctcagcaccggcctgttcgactacgtgtgggtgcagttctacaacaacccgccgtgccagtacagctcgtccaacggcgtgggcaacctggcgagcgcgtggaagcagtggacgtcgatcccggcgggacgggtgttcctcggcctgccggcggcggcggaggccgccggcagcgggttcgtggagacgagcgacctggtgtcgaaggtgctccccgtggtgaagaagtctcccaagtacggagggatcatgctgtggtcgcggtactatgacgggctcacggggtacagcgacaaggtgaagtccagcgtttgagctagccagggtaagctcgtgtcaggtcggcgttcgcgtagaatcacacgtgccgcgcgttccctgcaagatggagtagtttctacacatttcagaacaaagcgaacatgttcaataagatggccggcttgtatactcatttagaagcagaaaaaattgtgagaaatttacgtgtttggtgtgttct

SEQ ID NO: 21063 - DNA, 1206 bp, Oryza sativa
  ref <308>: DATABASE ACCESSION NUMBER: AK071361
  ref <309>: DATABASE ENTRY DATE: 2001-12-06
gctgcctccatagctagcccactcgagcccttcaacttctcgcccaagttttgaagggatccagcgccgccgccgccgcgatggagcacgccgtcgttgagggggagtccttctcgcccgactgctccaccctcctcatgccggcgctctcgatcggcaacgtggggcagctcgccgtcgacctgctggtgtcttcgtcgcgcgcgaggcgggtggcgtacctcgacgagccgtccgtgctgccctgcgccggcaacgacgccttcggccccgacgccgtcggtgatctcgcgctcgcgctggaagcttatgaatctccatcccataggctggccttcatacagcaacggtccccaattattacagggatggtggtttcatttgcaaaaaatgttgctaattttataagcagcattgaaaaagaccatgttgttatcctttcaagtttagattcaggcaagagaaggataattgatgcatccagtgatatgcaagtatattacctttcaagttgcaacgaggacggttctgatccgaaatgtgagaacttaggctggaggaagcttgaggaatacgatccatctcagcaaaggtggaagtgtcttgctagcctagttgaaggtggtcatctttcagaagatatgactggtgatcctgaggagatgacgataaatgattactactcgagcttgccatttgcagcactattctctgcctgcaaggctaaaggcttgaaagttacttgtgtactatgctactgctcagaaggggacaatatgccagaatctttccagttggctgaggcagcatgcaaacttgttgctcaaggccctgaacagttccatggaaatgggtccaatggatggactattccattgtcctggaaatcagtatatggaccaccacctgacctctctattttctagacttgaagacctatctagtgaggttgctatcatgagcactatttaggattgaggatgttgaacttttagcatgagggttgaggggttgtgcaagaagtctccaggaaggtgatgagtatcaaatggtttaggtaaagcgacaaaagtgtaattccagttttcttgctgaactcgtggcttgattgtacttattttttttaagatcctgttatccggctatattgtaagggtatgattgtacttgaacctacaattgattagctggaacgtttatgtgact

SEQ ID NO: 21064 - DNA, 2547 bp, Oryza sativa
  ref <308>: DATABASE ACCESSION NUMBER: AK071362
  ref <309>: DATABASE ENTRY DATE: 2001-12-06
gcgtggcaagcagaagtgcagaaccctcgccgccgccgccgccgccgccgccaccgactacccatcgacggtatgtatttctctatctctgttattttttttctctcctcgctcgtactgtggataaagcggatccaatccatgacatttgggtgatttgtagtgggtgctagtatcgatccctttcgtggattctgggtgctactggttatcgttaggtttttttaggggaacatttctagcttctttgtaatttttttttgaacctgttaggagttttggcttccagttcagtctggaattttttttttcattcttgaacatttcacacacaaggaaccacggtatgtcttagcttcaatttaggggccttttgacaccacagtgtgtcataaagttgatatggatatatatcccctcaaagtaacttagttgattgaacttaatagcagtgaaatgctaacgtgtgttgtttcttgtatgtgcatctgaaagttattgcatgtcccaaattttctttgtttgaaccaaatagcaggggaaagagccattcattaggaaatactgagattgactttgacatgtaaattcaggattattattatttttaatttaatgtgcacaaaatgctagctcattctttgaagaagcaatttgcagcccgttgcacatgcacactatttatgctatggaagaaaagaaaggtaggattcaaaagagaagatgcctacctgatacaatcttcctagagtaaagttgtcatttcctgcttgtggtattgttagcaagtcctgcaagtctcaaatgtcaagacagctgcgtcagtgttatcagctacattttgttgatttgctgctgcttttagaatttcagtgatgtattcttatggagaaaggtgatttctccttgcttatttttttcttgtggagaacagttctcacctttttttccctgtgatattctcggggttttagccttttcaccctggaatctctttaactcttggatgttgcaaaagcaatggcagtgcgatatatctctaagtcttcgtttgcttttttttgtacagtcagaaattcaaatcccccctgtggcagtttgaacgtgtagtattttcttccatcaatccttttataagtgaaatgcttcttgtttcaaaatttaaacaatttccagcattttggcctggaagaagaaaggtttcatccacaggcaagatgtctacctgatacaatctctctaaaataaaatttccatttcatgctgtcatggtgttaggatgttttacaggtttaatcagtccaataaacccccttaataccatatctgataagcatatgttcacctgacctatagttcctaaggttcaactcaaattgcggtaagccctaattaacagtggtaggaacattaaggtaactaattttccatggatccttcaacactgtaaaccgtgatttagatgcccattctatgtcacattttcactttctgtactatgtaatactatatatacatatggaaggtaaaaactcagcaactttagcactacataatggaagttcctgaattttggcagtaattgttgtagctactgcgtactgaatcagttctttactaaaaggctaatgatgagaacttgtggacaactgaagtttcatgcaaaaattgtgaactagttcactatcccatgctttccctagtttcatgtgacataatatccgtctgcagtggtgaagcttcatggaggccagagtgggtttggccccctccagttccatacaaattacactatgttagtgtatggtatattcataggttttcattagctgtctttgacaactattgatgcataacccatgttaacacccccttcttaacagtctgtgaagctctgccatctcaccgtctgatgtcgatgcacattgtatgctatgtgctatgtttacgactttatgtagtcctgactttattatagtctgaaacatcaattattggttctctttattcatcctcgccatctggatgtgcttttggctaatcctctttttatttttcttggcttgcaaagctgcttaattggccgatatggttatccctcctccagctagggctcctgcaatcaccaagttcctgaagccctatgttctcaagatgcatttcacaaacaactttgtgagcgcccaggtcatccacaccccatctgccacggttgcatgctcggcgagttcacaggagaagcttcttaggccaagcatggagtccacacgtgatgtcgccgcggcggcgaagatcgggaagctgcttggcgagcgcctgctgttcagaggcattcctgcggtgtcggtctccatgtcaagggaccagacgtaccatggcaaggtcagggccgtcatggattctcttagagccgccggtgtgaagttgctgtgatggaagccgaccatttgtagcatctctgcttgcagtttctgacatgtaaatatgttttgttgggtacgtactgccgtcctctgaaatttcattttagcttgcataatgtcgtcc

SEQ ID NO: 21065 - DNA, 2303 bp, Oryza sativa
  ref <308>: DATABASE ACCESSION NUMBER: AK071363
  ref <309>: DATABASE ENTRY DATE: 2001-12-06
ggccggcctccccgtcccttcgcgcgccatggcgcagcctctcctcctcctcctcctcgccgccgccgccgccgccgccgtcgcggtggtggcggtggcgcagacgaacatggccgacgccgaggcgctgatgcagctgaagaagtcgttcaccaactcctcctcgctgtcgtcgtggctcatcaccaacacggacggcgacaagtcgccgtgcgcgccggggtcgcacgagtggcatggcgtcgtgtgctcccgcggcaaggtcaccggcctccgcctcaatggcctccgcctcggcggcaccgtcgacgtcggcgcgctcgtcggcttccacaacctgcggtccgtgtcgttcgccggcaacaacttctccggcccgctccccgccgtcgaccggctgacgtcgatcaagtccatgttcttctccgacaaccagttcaccggtgtcctcccggacgacttcttctccaagctcagccacctcaagaagctctggctcgatcacaacgagctctccggcgccatcccggcgtccatcgcgcaggccacgtcgcttcttgagctccacctcgcgcacaacgccttctccggcgagctcccgccgctgccgccgccggcgctcaaggtgttcgacatctcctggaacgacctcgagggcgtcgtcccggaggctttccggaagttcgacgccggcaggttcggcggcaaccagtacctctgctacgtgccgacctccgaccggccgtgcaagcgtgtgcaggcggcggcggcgagctcgtccaagaggtcgcccatggcgttcgtcacgctgctcgtctcggtcgtcgtggtggcgctcgtgctttgcctgtgctgcaaccggtcgagccgcgtccacgacttcgaccccgcccaccgcggcggcgacggtctcgacgagaggccgccggtgtacatggtgaagcagttctcgacgacggggaagcggagcgcgtcgtggctggggaagaggacggggtcgtcgctccgcgggcatcggcgcgccgcgtcggccgcgaaggcggacgagctgggcggcggcgccggtgacctcgtcatcgtgaacaactgcaagggcgtgttcgggctgaccgacctgatgaaggcggcggcggaggtgatcggcagcggcgggcacgggtcggcgtacaaggcggtgatggcgaacggcgtggccgtggtggtgaagcgcgcgcgcgacatgaaccgcgccaccaaggacgcgttcgaggccgagatgaagcggctcggcgccatgagccacgccaacctgctgccgccgctggcctaccattaccggagggacgagaagctgctggtctacgagtacatccccaaggggagcttgctctacgtgctccacggcgaccggggcatggactacgcggggctggactggccgacgcggctcaaggtggccgtcggcgtcgcgcgcggcacggcgttcctccacggcgagctcgccgggcacgaggtgccacacggcaacctcaagtcggcgaacatcctcctcgcgccggacttcgagccgctcctcgtcgacttcggctactccggcctaatcaaccacatgcagtcgccgaactccatgatcgcgcgccgggcgccggagtgcgccgccggacaccccgtcggcgccaaggccgacgtctactgcctcggcatcgtcctcctcgagctcctcaccggcaagttcccgtccctatacctccagaacgccaagggcggcacggacctcgtcatgtgggcgacgtcggcgatcgccgacggctacgagcgggacctgttcgacaaggccatcacgtcggcgtggaagttcgcgctgccggacatggcgcggctcatgcgcgtcgccgtcgactgcgtcgagacggacgccgacaagcggccggacatgaaggtcgccgcggcgagggtggaggaggtggtcgccgcggccatggcgacggtgagggagaggcatcaagcggccggtggcgagagcagcagaagctcgtcgcacgcccagtacgtgcgagacgggtccatgcagcggatcacaagcgtcggcgagcggtcgtcccggcgaggtagcaacgactactcgtcgtgagacggccggcggcgaggtggctggccggagacttttttttttttttggtaagtcggcgaggcaagcgagggtcaaaattttctcttgtttatctatgtcagcaatagctaaagccttcaggaagaaaagaaactgtttctgcgtccagtatcgcacacacaggagcatttcaattttcaaaggcagaaatatc

SEQ ID NO: 21066 - DNA, 1020 bp, Oryza sativa
  ref <308>: DATABASE ACCESSION NUMBER: AK071364
  ref <309>: DATABASE ENTRY DATE: 2001-12-06
ggcactgcacgctcgtcttctccatcggcggcggcggcggcgggcggcggtggcggcgggccttcagtacggctcctcccgtcggtagctccgcccattctcgacgtgcgcctccccggcgacgcggcgaggcctcccgtcacctcgaacccctgtctaagcctagggcggcggcgatcgcggccagtagagggcggcgcggcagcggcgacagcagctgcgatcctccatcagagggagacctgcaggagcgaagctgacaagaggcagaggtcgcctcccatggattctctccatctcgtgcacgtcaagctcctggctgccgatctcctctccctggcctcccgccacacctcgccgccttcgttcgctcgctgcggccgtacggttactcgtgccgagatcgtcggcgtcgtggtttcccgtgatcgcagggagaagttcctccggtttctggtggacgatggcaccggatgcgtgccgtgcgtgctgtggctgaaccaccactacctgaatgctgcgagcagttcatccagggcatcagattctgatccaactgcagagatggcgttgaggatgtcagaggtggtgagcctgggcactctgttgagggttcgaggcaggattgtattgtaccgtggtgcgatccagattgctgttagagatgttgttctggagaaggaccctaatgtggaggtgatgcattggttgcaatgtattcgcatggccaaggaatgttacgatctgcggccgccttctgcttgaggctcatctcggaggaagttcgtgcaatgtaatgttcagaatatgtttgatgtttctttgtggaattgctgaagatttgaactgtgagacaatcctgtaatgcatgtgacaagctctgttgttatttgcagagacttttgggttcattctgttggatttaccccattaagcatcagggttgttcacttgtttgtgtctagtttatttatatctaaatacagaggctcctagtgacaggagattgcattttggacc

SEQ ID NO: 21067 - DNA, 4482 bp, Oryza sativa
  ref <308>: DATABASE ACCESSION NUMBER: AK071365
  ref <309>: DATABASE ENTRY DATE: 2001-12-06
gagagctttcagaccgaccggcgaccgaccccaccttccctccgccttccccgaagccacgcttctcgaagctcgcttctctttctctctctctctctccggctcgacctcctcctcctccgcgtcctccattaccggtagctcggaatccgccgccggcctccgacgatcgccgccccctcgccgggcccggagatccggatccccgccgcgctcggtatttgtttgatttgagattttccactgtgccttggacatttgagttctatggttgcaagatgaggctgttgacatcctctggagacatgttgaacttgttaacggtctaaaagtttgtcaccagcagggtgatggcatctagtacaaaatctgacttgatgtctggtagtcctgatgggcatggatacttcagtgggcaacgtggactgtattcagcagcttcgttggaaaggtcagcaagttttcgtgagagtggcgatagttatgcagcattcccagtatcaggttcatcaaggtcaccagcagttgactctgctactctgcttcaatcacttgccatggacttgcggacaacaactttggagccaaagacatctcggttggatgtaaaaaaatcaataagtttgattcttggaatttcccctgaagagtctacatcaactccatgcacaggacggaactcatctcttccttttgaagagattagacgcatgaagaataatcttagtgacatctcaaacaaagctagggaaagatctagagcttatggtgctgctgtaacaaagattgagagatgttgcccgaatattttgcggaagcgttccagaggagatggttcatcaaatgaacgatctactgcattgttgtctggaggacttatatccaagatgcccccccaaggccatctaaatgcagatgacacagaactggtatctccgagaggagaagagaggataaagaatgcaggacagaataggagattacgcacatccatgtccgagatggatgcaaggaccactgttctgtcaaggggactgggctctactgatagaagtgcagatcctggcaaagtcaccggtggtggtccagcagttccagaagaaaaaattagggggctagcaactggtattgatggttgggaaaagccaaagatgaagaaaaaacgttctgctattaaggcagatgtttcaatgactggtccttcaagaaatgttgatgtagaccgggagcagaaaccagggatgcaacacaaatttaataatgaagctagggcaagaatgacaaactcccctagttttaggtctggaactgtctcatcagtctcgagcattagtaaatcagatttactttctggacaaaatggggttgggcgatccttaagtaggagtgatcaagacagtggattccatcctactaacaaaagggatcgtcaagctgttttagataaggaaatatcagctccaaaatctcataacaagcccagcgaagatgatggtggtgccaatgtcactgcagtaccaaaggcaaatgggtctactaggggaccccgttcgaattctggttcattactgaagtcatcgccaaacattcataggttgcaagctaattctgatgattgggaacatccttctggcatgactaagcttaattctactagtggatctggcaatcccaaacgtacaaagtctacacattcattatcccctcccacccagtggggtgggcagaggcctcagaagatatcacgttcagcaagaaagtcaaatttagtcgctattatcacaaacactgatggtcaatcggtatcaggttcgcttgaaagtccctctatcaatgaagagtctgccggattacctaggcgtgcttctataaattgttcgcaacaaactagacggggagatcatggtctttcaactggatctgagggtgatgaatctggtgttgctgagaaaaagttaagggacaaaagcaaaagggctggggaactagatgacgggcactctggttttcaaaagatcgcaatgcttggccatccttccaaaaggaataagttatctgctgatgatgatgttggagatgctgcacgaagacaaggaaggatcggacgaggttttactccaaccaggcccagcacccctgcatcaattgacaagcttgaaaatgctccaactacaaaacaaagaagtgttaggacagtcactgagagaaatgaaagtaaatctggaagaccactgataaagaagatgtcggagcgcaaaggcaatgcacgtcctagacatataagtagcaatgcgcagttagactctcctgtgcaatcggaagatgatcatgaggagctccttgctgcagcaaattctgctctaagatctgctaattcaagtccattctggcggcaggttgaaccattctttagttatctgacaacagaagatatagcctatttaagtcagcagatccatttatcggatgactccaccgcgagcaggtcaattgaaggtgatgaaagtcggaagtacaagggtagtcttgaatacatctcgcaaccatcaactccggctggtagcaacaaagatgaccatagcgctcttcaaaatgggtataccctgaatgagatagataatgatgtagggattgcatgggagacaagctgcattgaacctatcctggatcaacttgtccaaggaattggggcgcgaggaggtgcatcagttggccaaagacttatgcaagctctgattgatgaagacaaggttgataatattaccaacaacatttacagaagtgaaacatatccatttgatacacatgaaattcatttcgaggaaggaggatggaaatcgcattcacagggttataagttggagtctttaatgaactttgaagctgcagggaaaggttctaatggtttgatgttagattctgattggaaatatcatgatgaactatcacataaaggcaataatgccatggagaaggccaaggtgtggcctgagtttcagtacagtgagatgtgcttcagtgataggatcatcattgagctaagtgaagttggtgtatccattgaacccgtgcctgatcttgcccagagtgaagatgaagatatcaattccgaaatctgcaaattagaaggccaacttcataaagaggttgtagataagaaaaacttgctacggaagctggatggcattcttagaactaaaaaggagtcacagcacagggaattttcacggcgtgccatggaaaggcttttgctgatagcgtatgagaaatacatggccttctgtggttcttcaagtagcaaaaatgtaaatagagctggcaaacatgctgctctaagttttgttaaacgaacaatagcacgttgccagaactatgaggagtcaggagcttgctgctttgatgagacccctttcaaggatatgtttgtatcagcaacttctcacagaagcgacccagattctgcttcacaagacaatattacggtaccaaaatcagtccaaagggctagtacatcagatgcctctcgagcaagcagtcaccttacggatctgtcattttcgaaggaggatccctggacaaataatgtaaaacaacgggaattgttgcttgatgaagttgtaggtagcataacaggaggaaccctgaaaacgtctggccttggtacttcccttgtgagcaacacaaaaggaaagagaagcgagagggaagggaaggggcacaaccgagatggtagcagatctgggcgcccgtcatcatccaatgcaaaaggagaaaggaagaataaaacaaaacccaaacagaagacagccaacatatctgctcctgtcagcagcgctctaactagggatccacagtcgcaggccaaaataacgccttctggcaacggcagggacaatacctctgctgctagtgctaggcatgaggaaccagcaaatgcatcgaatgacgcagaaatgccggacttgtcaaacctggagctcccaggaatggatgttgatttcggcggctggttgaatatagaagacgacgacggactccaggatctagacttgatgggcctggagatccccatggacgacatcaatgagattaatctcatgatataaccgtagcttgtttatctacgggccccccatagaaagcttcctatagtgcacaggtaacaggtgattttctcaagataaccaccaaccccagcaagtttaacacaaggccagataggctccaggtagttttggtaaagtttatagagacctcttcacattccactctcccacttcctctctgtatcagcgtgtacttatgcctccctaccttgtgccgtatgttactctgtggtgtacatatctattttggtacggtacgaggtagagtggcttaattgcttcatttatccagagaaatgtgtactcaaaaggctgtacatatatgatcatcatccctaatgctgaaataaaaccacgccagttatagctttaattt

SEQ ID NO: 21068 - DNA, 795 bp, Oryza sativa
  ref <308>: DATABASE ACCESSION NUMBER: AK071366
  ref <309>: DATABASE ENTRY DATE: 2001-12-06
gatcgatcacaagacacaagatttttcactgatagaatagcaacacttgggtgagagatcagacgcgtgtttgagaagatggagaactaccaggggcagcacggctacggcgccgaccgcgtcgacgtgtacggcaacccggtcgccggccagtacggcggcggcgccaccgctcccggcggaggccatggcgtgatgggaatgggagggcatcacgccggcgccggcgggcagttccagccggtgaaggaggagcacaagaccggcggcatcctccaccgctccggcagctcaagctccagctcgtcgtctgaggacgacgggatgggagggaggaggaagaagggaatcaaggagaagatcaaggagaagctccccggcggcaacaagggcaacaaccagcagcagcagcagatgatggggaacaccggcggcgcgtacgggcagcaggggcacgccgggatgaccggcgccggcaccggcaccggcgtgcacggtgcggagtacggcaacaccggcgagaagaagggcttcatggacaagatcaaggaaaagcttcccggccagcactaaataagctcgaccgggtcgtcaccaaatatgtcgtgatgtacgtgcagttttatatgttgttgaataaactagcgtgaaatgcgagtgatggtgtcttctgccttgggacggatgacacattgtctgttgtgttctcgcgtccgtgtcggttttacccttgaaatgtaatatggtgtgtgtacacactaaggttttattgaagtgtgactttgtgcttgtgtt

SEQ ID NO: 21069 - DNA, 964 bp, Oryza sativa
  ref <308>: DATABASE ACCESSION NUMBER: AK071367
  ref <309>: DATABASE ENTRY DATE: 2001-12-06
ggtcggctccatctgggttggactcgccgtcgtcgtctcgtctcgtctccagcgagttcgaagcttcgagaacgagagaacaacgaatcgggagaagaggagctcgctcgaatcggatcgaaccctacgagcgcgggcggaggcggagctcatcgccggagtagcggcggcgcgcggcgccatggacgagagggagttccggcggatgctcgagctcttccccgtcgtccgatctcgcgactactgcgctgtaatcaggggcatcaagcaaaggcagcacacagcaatcacgggctcaggaggcaacaaggggcaacaaaaatgagtcatctgatcaattcatgaaaatattgatgatggttgctgagaaaaaggttggagcaacattggcagagttgttctgcaagacatttgaagaagcccatatgagacttgtttacaaagagctgaacctagatgctgctcaaagatttctgaatgcctatgagatacgatcatgaattatagccagatattgttcagagatctgcagacgccaaactgagggattttattgaggcgcggcgtgcaggcgctgttgataattctgattactggttcttgtatgattctgctaattgtgatagacgataatatcgatagacgtgagctagtcgcgttgtttcagattattatatctgcctgagcagaggacagtgcgagtctactgatctgttcttttgtgatagcattatgtcaccttcatgagatgctattgcctgacacgttctgcagtatagtttccggtctgctaactgtttctcgctcataacgaggcgtatagagtccacaggtgactatcgaatactccatccgctcatatatagtacttgcaacctcgtacataagtacgactgagcccataggagagcgtctctgatgctactcgtattgacgtctcgtctttttcttccgcattgtgttc

SEQ ID NO: 21070 - DNA, 1374 bp, Oryza sativa
  ref <308>: DATABASE ACCESSION NUMBER: AK071368
  ref <309>: DATABASE ENTRY DATE: 2001-12-06
ggtagacctcaccggacgccgacgcggaggagctcatcactggccagctgccgccgccgccgccaccactgctccgcctccgattgctgccgtctctcctcgcggggtgggtggggggggggtgtatggcgaccggctccgtcgtggcgccgccgccgtcgctggccggcggggggcgagggctccgtcggcggggagtcctccaccggcgtctcgcggcctcgcctatgaaagatgaacctgtggcttcgacgaatggcggcaaagatgaaatggtcaccgacagcctcagtgttgctagaagagcctctcaccctgggctttcatcaagcttatctaatccaatgtcagaagtcaccacacctttccatccagctgcgccatctgatcttcgtttcaatcgtcttcgaccctcagttgaggaaagtgattgcaaatacaaaagattttttggctgctatgttgctcgggaggctataattgatgaggaatactggattgctgcatggttgagagcagagaatcgatatgaagatcagtcaagcgatcgctatgttgaaagcttcaaaaggaagtttgcatcgcaggaatttcatgcattaaagaggcgatgtagcaagctgcaaggagagaagtatatctgttttgttgcggtaaaaaatgatgatctcaagcgaactgttttgaatagcgtcgttggcaccctggatgtttgtataaggcatcctctgcatggggagacatttcctgcggagcctggaaagtcatcatttcattgtagaatataccagccagatcagccaaagtttgggtatctgacaaatgtttgtgttgctaaatatgcacggcgtcaagggatcgccagcaatatgttgttactggccatagatgctgcaagactcaatggtgctgaagaagtttatattcatgtgcataaggataatctaccagctcggaggctctatgatcagataggattcaggatggttgacttcgatggtgctcgtcagtcgtcagatctatgcttactctccttcagttcctaggacttggatttttaatacgatggagttttgatcccatctccctgtgcagatgaaatgccactggtccttgtgatttggaaagcaggacggtgtcacgaatacatttacaatcttgtacatcaggatagtgtgaaatgtttgtaactttggaattgacgatgggttaacctatcttgttctgatgccctggaatgctgtggcatctgaatgcttaccaggtttcttttacagttttattgtacagtttgtgaagactgctaaaagttgttggtccgttctgtcgttctgtaaggagataaccaatgcaaaacaccaaagcttgtgttgc

SEQ ID NO: 21071 - DNA, 1296 bp, Oryza sativa
  ref <308>: DATABASE ACCESSION NUMBER: AK071369
  ref <309>: DATABASE ENTRY DATE: 2001-12-06
gtcacaccaacccgacattccctcgtgctcttcccatccgcgactccaaaattcccgtccgctcctccaggcaagcaagcacggaaacccactcatcactcactcactcccccaaacccaaaccctagctactactagctccccgctccggatcaagcgcatctcgagttcgagcgagcattcccctcttcggttcgagtgggttggctggcggcagatgggctccgactccaaggagttgctcgggatcgagccgctcgagctccggttctccttcgagacgaagaagcagatctcatgctccatgcagctgacgaacagaacagatgactacatcgcctttaaggtcaagacaactagcccaaagaagtactgcgtcaggccgaacagtggcattgtgccgccacggtccaccagcgatgtcatcgtaacaatgcaagcccaacgggaggcaccagcagacatgcagtgcaaagacaagtttctagtgcagagcgttgtggtgactgaaggcacaacaaccaaggatgtcactggagagatgtttaacaaaggatcaggtaatgtggtggatgagaggaagttgaaggttgtctatgtccaaccaccacgaccaccatcccccgtgcgtgagggatctgaagaaggctcgtctcctcgggcttcattatcagaagggggcaacttgaattatcaagatacaactcgggaatctgatgagccaccattgctatctgctacaagagcacacaaggatgcagaagatgtaacatctgattctgagacatctgctttgatttcaagattgacagaagaaagaaactctgctattcagcagaacaataagcttctcgaggagatggaccttgtgaggagggaaattagcaagcagaatggtggtttcccttttgtgttcgtggtggtcgttgctcttctgggaattctactggggtatatcatgaagagatagatgagcttgtctagttctgtttcgttaggccttttcttccttaagaattgatttgttgtctgcattttctgatgcgtttgctcacatgttctacactaccgcagtccgcatagcaaattcatcctaggatctggtatattccgtaattgcgtgcttcagattggctggctaccatacacagtcaataactcatctccttaacactaagttgcaagttagtcgcgagcttggagagcttatgcagttaagaagtttgcgcatcggtatctgttggtacaactgtaaacttgctttcaatttactagtgtcctgattgcctgattctg

SEQ ID NO: 21072 - DNA, 3310 bp, Oryza sativa
  ref <308>: DATABASE ACCESSION NUMBER: AK071370
  ref <309>: DATABASE ENTRY DATE: 2001-12-06
ggtacggtaataaccagcttattctccattcctccgggaagaagaagaagaagccggcgactcgccattgattccggccgccgccgccccgctcccccctcgatcggtcgatccggtgatggggctgctgttcgtggagctgctcccgcggcacggcgacgggggaggccccgcgtcggcggtgctcaagtgccgccggtgccgcgtcgacgccgcctccgccgacgccatcctctcacgggacttccgcggccgattcggccgcgcctacctcttcgaccacgtgtacgcgtcctccctctctctcccgcttccgcattgcgtgtgccttgtgttagctaggcggttcttgggatgatgatgatgatgatctttggcccaagggggtttcgttggtggtgggggtgtgttcgaatcggatcttgcggtggtcgattcggccttcgttttgggatggaaatcgatgtgggattggattgctggaaatgggggagaaaagaagctttggttgtgccacaatgtggatggattctgctggaattagcttgcatcgctgttgtcgtcgtggtcttctcttagattattattattattattgcaatgtcacaactgaagatttgtggtcggatcgatcgattagcatgttcgggtgaatcgatttgcggtatcaaatggatgttgttcaagccttcaatgtatcaagtttattagctttggcccctctggattgcctgcaggaacggacaccgatttgatgaatgatgggctcagccattgccattgcctccttgggggtggttttcttaggaacttggtagtagcattttgtcttgttcggatcattgcccttgatttatcgcctaatatcactgcgatccccatgctgttttctcaacctcctactgtatttctctacaagattgaccaccttaataccagctcaaccatttcttcagtgtattctagagctaattttgtgatactgatgtagttttggcttcaacaactagttttcacttcgaatcatggcaatgtattcagcttatttgtagaatgtttcacttcgaatcatgggaatgtattcagcttatttgtagaacgtttcacttcgaaacatggcaatgtattcagcttatttgtagaatgtattcaatatctttatgcttttgttctattcttttcagggtgaatatatccttagggcctaatgaggatcggtatctgatgaccggactgcatacggtgaaagatatctactgtagctgttgccagcaaattctcggctggagatatgtaagttaacttggaaatttgcttccatgatcatgatagttgcctcttatgcagattagatatgtgcattccgtggagaaacttgtagaatgttgcattctgaaaacaaaaaagttggatacaaacatgagttgaacaaacagtggataggaaaataggagtctctatgcttcttttcaccctcttctacagttctacttgtagtatttcttccttctactccaacttaaagaattctcagatttccataggctcattgtcctatcacataattagttgctaccttagcccagactttgcattagccacatcattttgtctcagtttgttatgtaattttattctcattgcgatcaattgataggatatgcatgtatctcaaattcataatatgcttggttcagtacttcagttggatatgtaaaattttcagattgatgtctatttttcagatgtgaatggcaatgctaccagtcaattatagtcaacaaacttaacatataaatgtgcatcaaattcagctttcaaaaatattatgctttgttttaggctttctattgtaggttaggcctacacttaatccataaccattcaatataataacaaagtcttatgtttaatactcccttcatcccaaaatataagcatttccggctatgaatttggaaaagtatctgtccagagtcatagcgagaagtggacggagggagtagctagttttgcatttggtagatgaggactaacattttaacaaaatacaacttgatgctgaaacatagtatccacaaaacactagtgtaggcctgtggggcctcctatgttaccagcacgataatgtggccttctatggtactaaagatttagttgctgtttgctgtggaactggaatatgttgggttagattctgtataaaccatttgtttgccttcatatctagctcatcattgcaactacatatgaactgtagttttctagtaatcctgtgtaataactgcattatacagctattttctcatctgaagttctgtgttttgtgacttccagtcaattttgtatgctactattctaagccctatgtcccatgaagattcaaggcacagatcctgcaagtcgtttagaaattttgcattgttcttgtacccattggttccatcctggcatttaagggagtacatcaactgtatttttttttattgcagttacagtggcatctttcccttaattaaagttgcttgaaccgacctctactgaaattcactttgtttaataaaccctgaatgtggcttatcttcacctatatgctaagttgcgcatctaaggttctctttcagttgcgtgtgggtaactgctaacttctgtttttttttttcatagcttctctttcaatttttcataactgggagaatttatgtgtttgtgacatgtactcacccattcatcgtacgtattagcaatgcaataactttgttctggcatcaatacagctcatttaccatattatctcgatgtgacagtcttcagctcttaacactgcttcatttgtcacctcattgttttattttctctttttggattgttaatttgcacctataatgctctacaggagaaagcatacgaagagagcgagaagtacaaggaaggcaagttcatcctggagaaggccaggatgtggaaagaagcccggtgaaaaagactggcgccatggaactcatcaacctgtatgtatgtattttgtgtagatccaaaacaattcaaagattgtaacaacaactttggcggcgatcaaagtttgtatgcatgctgtagttgctcatgcagtactagaccccctcaaaagaagagatgaaaacagctgcgtctgatttgggggggacgaagattgacaacagaagtagagcatcactgtctttttgatgcaaattctggcacttcggtggtaacggttttaaccgaaaaatgatgaagtgccagagattaacatttgattagtgcttttggccactcatggcgcagttcg

SEQ ID NO: 21073 - DNA, 1930 bp, Oryza sativa
  ref <308>: DATABASE ACCESSION NUMBER: AK071371
  ref <309>: DATABASE ENTRY DATE: 2001-12-06
gtcgacttgcgtctctctctccccaaagctcggagccccgccgcaatccgccgccgcgtctcgccggcgcaagctccagattagtgggtccacatatgaccttttctggaatggacattgctttaaaagcaagcacacactcttctacatcccagcaacactggttgcattcaaccaggtaccggtgtcaatatggtttgggttccactcacttgaatggaagaaagagaagtcctatggtactgtctgtaagagctgtttctgggaaatcagacttagatttcagtgatccttcttggaaggaaaagtatcaagaagactggaataggcgtttcagttgccgcatattacagatatatatgatttgaagccaaggctaactacattctctctgaagaaaaacaggactgatggtggtagtttatcagcagataagtggaatggctatgtaaataaggatgaccgtgcacttctgaaggtgataaagtatgcctcccctacttctgctggagctgagtgcgtagatcctgactgcagttgggttgaacattggattcatcgtgcagggcctcgtaaggagatatactatgagcctgcagaagtaaaagctgctattgttacctgtggaggcctctgccctggtttaagtgatgtcattagacagatagtatttacattggagatctatggggttaagaacattgttggaattcagtttggttatcgtggattttttgagaaaggcttaaaagaaatgcctctttcacgtaaagtggtggaaaacataaatctttctggtggaagtttcctaggtgtgtctcgtggaggagctaaaactagtgagatcgtcgatagtatacaagccagaagaattgatatgctttttgtaattggtggaaacggtagccatgcaggagctaatgctatccatgaggagtgtcgtaagagaaaactgaaagtgtcagttgtagcagttccaaagacaattgataatgatatactattcatggataagacttttggttttgacacggctgtagaagaagctcagcgtgccatcaattctgcctacatagaggcacgaagtgcatatcatggaattgggttggtcaaattaatgggaagaagtagtgggttcattgccatgcaagcttctctttccagtggacagattgatgtctgcctaatacccgaggtatcttttacactagatggagaacatggtgtcatgcgacaccttgaacatttactggaaaaaaagggattttgcgtggtttgtgttgctgaaggtgcagggcaggatttactgcaaaaatcaaatgcaactgatgcatcaggaaatgtaatacttagtgactttggtgtccacatgcaacagaagattaagagtcatttcaaggacatcggtgttccagctgatgtaaaatacattgatccgacatatatggtccgggcctgtcgtgcgaatgcatctgatgctatcttgtgcactgtacttggacaaaatgctgttcatggagcctttgccgggttcagtggtatcacatctggtatttgcaacacgcactacgctttcctcccgatcacagaagtcatcacaaaaccaaagcgcgtgaaccccaacagcaggatgtggcaccgctgcctcacttccactggccaaccggacttccactgaccttgtactatttggcatttacctcacttcttttattggagttaatttagcattatttttgctaatcatgagactagtaacagctcatgttaccacaaaggtgatcaataaataatgttgtaacgcgatgacaagtaactctggtagtttattttcagcaccaatatttttgtgtatctcaatgctgaaaagattcctttttcttcgagatcggctgcgtgatttcacctatgagacgttttattaattctg

SEQ ID NO: 21074 - DNA, 1842 bp, Oryza sativa
  ref <308>: DATABASE ACCESSION NUMBER: AK071372
  ref <309>: DATABASE ENTRY DATE: 2001-12-06
gttatttctccctctctccctctctttgtaacacaaaccaagatggggaatggagggcgatgcatggtggaggtggtgatacttcttgtgttgatggctatgtcgcaaggatgcgatgcgcagaatactaccggaggactgacgagaaagagcttccctaatggcttcgtctttggaaccgcttcatcggcttatcagtatgaaggtgctgtcaaggaggacggaagggggccaaccatttgggacaaattcgcacatacatttggaaagatcattgacttcagcaatgctgatgttgcagtggatcagtaccaccgtttcgaggaagatattcagcttatggcagacatggggatggatgcatatagattctcaatttcatggtctaggattttcccaaatggcactggtgaggtcaaccaggcaggcattgatcactacaacaagctaatcaacgcattactagctaaaggaattgaaccatatgtaacgctctatcactgggaccttccacaagctttggaggacaagtacactgggtggcttgacaggcagatcatcaatgattatgcggtatatgctgagacgtgcttccaggcatttggggacagggtgaagcactggatcaccttcaacgagccccacaccgtcgcggtgcaggcctatgacagcgggatgcatgcaccgggccgctgctcggtgctcctgcacctctactgcaagaaagggaattcaggcaccgagccctacatagttgctcataacatgatcctctcacatgccacggtttcagacatatacaggaagaaatacaaggcaagtcagaatggggagctggggatatcttttgatgttatatggtacgaaccaatgtcaaattccacagctgacattgaagccgccaagagagcacaggaattccagctaggatggtttgcggatcccttcttcttcggagattatccggcaacgatgagatcgagagtgggaagcaggctaccgaagttcacggagaaagaggctgcacttgtgaacggatcactggacttcatggggatcaatcactataccacattctacacaaaggatgaccaatctactgtaatagaaaaattgctgaacaacaccttggcagatactgcaaccatcagtgtccccttcagaaatggacagccaattggggatagggccaactcgatatggttgtacatcgtgcctcgtagcatgaggatcttgatgaactatgtcaaggacagatacaacaaaccaactgtctacataacagagaatggaatggatgatggcaacagccccttcatctctctgaagaatgccctcaaggacgacaagaggaccaaataccacaatgactatcttacaaacttagcagactccataagggaggatggttgtgatgttcgcgggtattttgcatggtctcttcttgacaactgggagtgggccgctggatacacctcgagattcggattatactacgtagactacaagaaccggaagagatacccaaagaattcagtgcagtggttcaagaatctcttggcatcctcctcttgatcaaattgagtcgcctatatatcaagatgccttgatcattgctaccctactactacctagttgtgatttatacacgcaggattgcataccgagcagtgaccattcatgtattcattgattgtgtaaagagatatcatgcatggacttgttgtacataattcataatattcttgcaccaaaaactgaataaacacagattgtaataataaaatagatacattttgatgctacaagaaaaaggcgcacatttggtctgattttcccccc

SEQ ID NO: 21075 - DNA, 1560 bp, Oryza sativa
  ref <308>: DATABASE ACCESSION NUMBER: AK071373
  ref <309>: DATABASE ENTRY DATE: 2001-12-06
gagaagccaaagcaaaccgaagcccagtttctctctcctcctcctcttcctcctcgcatcagtccgcataaagtctcctccccttccccctcctcctcctcctctccaatcttggcagcagcagcagcaaaggggcggtgggttctttgtctctctctctcgggcggatttcggtttcttcgtgtgtttgttggttgcgttggcgtttggagcggcggcggtggcggtgagtgtgagtggtgaggaggaggaggccgccatgggcgcgggcgggaggtgggtggaggagtacgggcgttcgtcgtcgccgtcgtccaacctgcagtgcttcttggactgcaccacccccgccgtcgacacgcacctcctccccaaggcgaatggccggttttcgagcgattcttggcaccacgccgagatggacagcgtcgagtacttcaacctcgcggacctatgggagcagtactatgagtggagcgcgtacggggctggaactacggtgcagctgtatggaggggaaagagtagtccaatactatgttccctacttgtcagggatacagctatataccaacaaagcccagactgcatccaggagttttggtgaagataatggcatggactattggagcgatgatgaggacaatgagaagatgtcaagatcttggagttcaacatctgaagactcattatttaactgtgatgcaataagtggcaatagaaaacgccacgggcacatgtattttgagttcttcgaggtttgctctccttatggaaggattccactcattgacaaggtgtatgaactatcccagagctatcctgggttgacatccctgagaagtgttgacctttcgcctgctagttggatgtcagttgcctggtatcccatctaccatattccctaccagcgcaatgtgaaggacttatctgcatgcttcctaacttatcataccatttcctcttcatttcaagattacgcgctcgagagcatggccaacgggaagcgaaacgacgagacggagaagaaggtcagcaagactcatcttgctccgttcgggctcgcggcgcacaagctgcagggttctctctggaccaacccgagaacaggggaccgtgacaggatggtctccctcttcggcgccgcggattcctggctcaagcagctcggagtccagcaccatgactacaactacttcatcactcaccccatgtgatctgaacagctgatctgtgtcatctgagaagagtaggttgcaacttgcaaagaaaccccatggctgcagactttggagaggaggcatcagatttttacttaccccagcgacaatggtagcaaacgttttaccgttttgtcaaaatgacactgacatttgccggatagagttttataccgcttgagacttgagacttgagagtttacctgcagctgaatatataccgaatatatcaggacttataggttttgtgtttttcttggctgaagatgtaaaccgaccgtgtacagaaagttttggaactattttgatatccaatatatgtcgtggttggaattggattc

SEQ ID NO: 21076 - DNA, 1957 bp, Oryza sativa
  ref <308>: DATABASE ACCESSION NUMBER: AK071374
  ref <309>: DATABASE ENTRY DATE: 2001-12-06
gattcggcaccccgcgaagcgaccatggccatccctcccctcgccgtcagcggggtcgccgtcgccaccctcgccgtcctcggcctcgccgtcttcgcctgccggcggtggcggcggggcgcgtcccccgcgcccccacctcccgcttcctcccaggatgatgatattaacatgcctctcatatctgacaatttggatgactattcagtctcgagcaatagtagtactgtcgatgaatcaggaattcggattgataggattatcacttcacctaagactcatggcattgttggaaaaggggcaacctatcccactgaatctcatgttattgaaggagaaactcatgtaattgatgttacaaacagtaaaacggaagagctctatttgggaaatacgcttaagcgtccagctgtggcaaatgggccaacacctgatgtgaagcacataagaagggattctggagagagtaatcacaatggcaccattcctgacattatagttggaagcaacctagctttggaggtcatagctggcccatctcatggaataaaccactatatgcagtcaggtaacaagtccatgctacccgtgactcttggaagggttcctccaagtcatttggtgttaaaggactcagaggtgtcaggaaagcatgcacagattgactggaatgcaaataaactcaaatgggaaattgtggatatgggtagtctaaatggaacatttttgaattcccggtcagttaatcatcctgatgttggatctaggcgttggggtgagcctgctgaacttgcagatggtgatattataacacttgggagttcatcaaaagtatctgtccaaattgagctacaaaaccaacaacctgtaggagttggtatagcatctgatccaatgacagcccgtcgaactgggaagaaacttcacatggaggatgtcagctgctgccagtatcctcttatcggtgtggaaaagtttgggctatttggcatattcgatggccatggaggggacggtgctgcaatagctgccagcaggattcttccacagaacattgcaaacattttgtctcaacaggaaacaaaagaaagagttctttcatgccatagtgcttcagatgttcttagacatgcctttgcattgactgaagctgcactccatcatcagtatgagggctgcacagcaactatccttctgatttggttcgaccagaacgaagattgcttcgcccaatgtgctaatcttggtgactcagcttgtattatgagtgtcaacggggaaataattacaatgaccgaggatcatcgagtagtcagtacaacagaacgagcccggatggcaaattcaggacaacccctgaaagacggtgaaagccgtatatgtggactaaatcttggcaggatgcttggggacaagtttttaaaggaacaagattcacggttcagctctgaaccatatgtgagccaggcagttcgcatgacaaaagcatgcttagcctctgcccttattgctagcgacgggctatgggatgttattagcgctaacagggcagcgcagcttgtccttgagggtaagcagaagtacagcgagcagaaaacttcagcagataaagtagcacatcatgtgttaagtgaagctaggaaattgcgaaccaaggacaacacatcagtaatatttgtagacctggacactctgagaagtgatccctgatcctgaatccccaattgcttttgtcaggtccggagatcgtcctacctgctgctcgaacagttgaacaacactatttcttttgtttcactggtagttaatatcctttgtcaaagttgagccaggtgctccggtgttgcagaggatgaatgctacagttctccttgtatgcaaatacccagggagccccttgtgcggttatgcctgtaaattgtgagtgaattggttaaaagaaatgtttatgaacttt

SEQ ID NO: 21077 - DNA, 1391 bp, Oryza sativa
  ref <308>: DATABASE ACCESSION NUMBER: AK071375
  ref <309>: DATABASE ENTRY DATE: 2001-12-06
gagtcctatttatttgtaaatcgtgtgtctcgttctcgtcgatctccatcctagcactgtgatagctcatgcttggattgagggattgattgatttcttctctgaactttttgtgattgagcccactgtaactgtagcgattaccgggggtattatgggccgtgggtacccgcgcggggccggggacgggacgggagacccaatcataaattggaggcgccggccatctctcctctagacctcctgactctaataaatctcctccattcccccaaatccatccatcatggagttccctcatcgccaccaccaccacggccaccgcggcgacgacgacgacgacgatcgccgccgccatcccgctcccgctcccgcctacggccacgactcagcccctccgccgggtccctacggccaagcgcctcctccggctgatccctacgctcgccacccgccttcccacgactacgctcatcctcctccggcgtatgggggagggggctacggcaacgtcgtccacgtttcccacgaggtctccgaccaccagaggcccacgccgcactacggtggatccgagtacatcagccccgtccaagagacccgcccttaccacggtggcggaggagccccaccggtgacccacaggatctactgcaaggccggggaggacaactacagcctcgccgtcagagatggcaaggtctgcctcgtccgctccgatcgcgacgaccacacgcagcactgggtgaaggacatgaagtacagcacgagagtgaaagacgaggaagggtaccctgccatggcgctcgtcaacaaggccaccggcgacgccctcaagcactccatcggccaatcccaccctgtccgtttggtgcgctacaatccagagtacatggacgagtctgtgctgtggacggagagcagggacgttgggagtgggtttcggtgcatcaggatggtgaacaacatctacctcaacttcgacgcgctccatggagacaaggaccacggcggcgtgcgcgacggaaccaccctggtgctctgggagtggtgcgagggtgacaaccagcgctggaagattgttccctggtgatcaaatcaaatctatctgtctatctctacatatgagtgagggaggtttatggaataataagaggcgcctctgatcgatggaggggccggcaggtgtggtcgctcgactggccctagctaagtgttttgttttgtttggtccagctctgtaataatccagccatctcattgtttggaatgtttgttgttgatccataaaatttggtcccggtacgaatatgaacatgtcacgtctgtgtgtgtgtgatactgttacttgtgatgcatctacgtacattgcatacaagctgctgttggtt

SEQ ID NO: 21078 - DNA, 1692 bp, Oryza sativa
  ref <308>: DATABASE ACCESSION NUMBER: AK071376
  ref <309>: DATABASE ENTRY DATE: 2001-12-06
gggcggtgctctcgcctcccctccccgccggcttccgcctccagatccgcgccgcccgccgccgccgcgctcgctcgagcgggagctatagctgccgccttcgattcgacgctgcatgtactggcgagaggcgtagcgcgtggcgtgctctccccgacgcgcgcctcgcctcctccccgttcattacaagatggcgatgatggtggaccctcctaatggcatgggaaaccaagggaagcattactacacaatgtggcaaacgctatttgagattgacaccaagtatgtgccaatcaagcccatcggaagaggggcttatggaatagtttgctcctctataaaccgtgcaaccaacgaaaaagttgcaataaagaagatcaacaatgtctttgacaaccgtgtggatgcactgaggaccctaagggagctgaaactactgcgacacttgcgccatgaaaatgttattgccttgaaagatataatgatgccagtacacagaaggagtttcaaagatgtatacttggtttatgaactcatggacacagatctacaccagataattaaatcatctcaacctctttctaatgaccactgtcaatatttcctttttcagctactccgaggtctgaagtacctccattcagcagggatactccatcgagacctgaaaccagggaacctcctggttaatgcaaactgcgatctgaagatctgcgactttggtttggctcgcacaaacaacactaaaggccagtttatgactgaatatgtcgtgacccggtggtatagggctcctgagctgctgctctgctgcgacaattacggaacctccatagatgtctggtctgttggctgcatctttgctgagcttcttggccgcaagccaatatttccaggaactgagtgcctcaatcagctcaagctcatagtcaacgttctcggcaccatgagtgaagctgacattgagttcattgacaacccaaaggcccgcaagtatatcaagacccttccatacactcctggcatccccctcaccagtatgtacccgcaagcacatcctcttgccattgatctgttgcagaagatgctcgtctttgatccctccaaaaggattagtgtcactgaagctctggagcacccttacatgtctccactgtatgatccaagcgcaaaccctcctgctcaagtgcccatcgatctcgacatcgatgaaaatcttggcgtggatatgatccgggagatgatgtggcaggagatgctccactatcacccagaggttgttgcaggagtgaatatgtgacaggcaagaacgaacatgtgaaggcaacgtgctacactaagatcttcacatgctggttttttgtataaatcttattcgcgattgtcgcgcctatcaagcttaagctatggcgatgtcgcccaggtgacctcttatgtaaatatgtgcgaataagacagcattctggagttgttcttcctgtggacctctacttgtagtatatggactaatgtgttgtatgagtacgtgaagcagaattcggtattatcaaggcttgtaatgttagatgctcttatattacactatgaagtgtcaactttcaagtggccacgtttacacatatatttgctatgctgacttgctgagacatgcttggttttagggcggtttgcagcttaacatgtgttcctttc

SEQ ID NO: 21079 - DNA, 1577 bp, Oryza sativa
  ref <308>: DATABASE ACCESSION NUMBER: AK071377
  ref <309>: DATABASE ENTRY DATE: 2001-12-06
tagttaggcaacaagctgctgatctgatctcgaggatagctattgtgatgaaacagtgtcaggaggagcagcttatgggtcatttgggtgttgtgctgtatgagtatttgggagaagagtaccctgaggtgttgggttcgattcttggagcattgaaagctattgtgaatgtcattggtatgactaagatgacaccgccaatcaaggatcttcttcctcggctgactcctatcttgaagaataggcatgagaaggtccaggagaactgcattgatctagttggtaggattgctgatcgtggagcagaatttgtgcctgctagggagtggatgaggatttgttttgagcttcttgaaatgttgaaggctcacaagaagggtattagaagagccaccgtgaacacatttggttatattgcgaaggctattgggccgcaggatgtgttggctactctgttgaataacttgaaggtgcaggaacggcaaaaccgtgtctgcacaactgtcgcaattgccattgttgctgaaacctgctcaccttttacggttctgcctgccctgatgaatgagtaccgagtcccagaactcaatgttcagaatggtgtcctgaagtctctctctttcctctttgagtatattggtgagatgggcaaggattacatatatgctgttactcccttgcttgaagatgctctaatggacagagatcttgttcaccggcaaactgctgcctctgctgtgaagcacatggctcttggtgttgctggcttgggctgtgaggatgctcttgtccatttgcttaactatgtctggccaaacatatttgagacatctccccatgtcatcaatgctgtcatggaggcgattgaggggatgagagttgctcttggtccagctgtgatcttgaattactgccttcaaggccttttccatccagcaaggaaagtacgtgaagtatattggaaaatctacaactcactatatattggtgcacaagatgcgcttgttgctgcttatcctgcactggatgacgatggggataatatctacagccgtccagagctggcgatgtttgtctgatcaatgcaggatgtacatttccatgtaccgtcatccaatatatgcgtgtgaactgtgaagcttgaactcggtggcttgttgcttctgaagggggtgcaatgtttaggatatatttccccctggtttacttgtgtaatgtaatgataaattgctacctgttctgatgtactgacgtttttgttactggttttgtgttcagggtattttgacccggtttgctgaggagttcccttagattaaagatcccaaggagatgatatctgtcctgaatgtttactttgttgccgttgcatgatcccctccgctctgaagagaaaatgatcaacatagtattactgctgtcccaataactgtattattagcaaaaaaatgttataagctactatcgagattgtgaacttgtcttattattagagtctgtattattaatgttattactatgcctggaacgtcacttatgtatgtctggaacgtggtattagtattactaccctgccc

SEQ ID NO: 21080 - DNA, 1767 bp, Oryza sativa
  ref <308>: DATABASE ACCESSION NUMBER: AK071378
  ref <309>: DATABASE ENTRY DATE: 2001-12-06
gacttgccaggctattgttaagagcactattggcattggtgttgatgaggaagacagaaaacgcacatgggttgccgatgctgaggaatgcaagaagcgtggttcaattgagacagcccgtgccatctatgcgcatgcactcagtgtcttcgtttccaagaagagtatttggctgaaagcggctcagcttgagaagagccatggaaccaaggagtctctttataatctcctcagaaaggctgttacctacaatccacgtgcagaagttttatggcttatgagtgcaaaggagaaatggctggctggagatgtcccggctgcccgagccattcttcaggaagcttatgcttctctccccaattcagaggagatctggctagctgccttcaagcttgagtttgagagcaatgaaccagagagagcaagaattcttttgtcaaaggccagggaaagaggaggcactgagagggtctggatgaaatctgcgattgttgaaagggagttagggaatgtagacgaagaaaggaagctgttggaggaaggtctgaagttattcccctcattcttcaagctgtggttaatgcttggacaaatggaagaccggcttggccatggatccaaggcaaaggaggtttacgagaatgcactgaagcactgcccgagttgcatccctctttggctctctctagctaatctagaggagaagataaatggcttgagcaagtcacgtgctgtcctcaccatggcaagaaagaagaacccagctacacctgaactctggcttgcagcagttagggctgaattgagacatgggaacaagaaggaagctgatgctctactagccaaggcattacaggaatgcccgacaagtggtattttgtgggctgcagctatagagatggtgccacgtccccagcgtaaagcaaagagctcagatgctataaaacgatgtgaccatgatccccatgtcattgcagctgtggccaaacttttctggcatgataggaaggttgataaagctagaagttggttgaatagagctgttactcttgctccagacattggagatttttgggccttgtactacaaatttgaactgcaacatggaaatgctgatacacaaaaggatgtcctacaaagatgtgttgcagcagaaccaaagcatggagagagatggcaagcaataacaaaggctgttgagaactcacatctgtcaattgaggcccttctgaagaaagctgtgttggctcttggccaggaagaaaatccaaatgctgcagatccctagtttgtctcacttttaacttttgataagtctggtcacaggtctaattcttctgcgcatgctggcaatggaatatatagagaaagaaacacagttgggtagtgaactgggatggactcgagctgcgacctcgtgattctgtgtaccaccgaactgattgctgcactcctccaaccatgaagccttacctgaagaagaatcaggcatgcgattactacaatttgtatcggcgatcaccagttaaaacctgtatcgtttgtatgccctaattgccagcaatacttctgtactaccatgagcatgtttattcctccagatgcataccacaaattcttagatgggtgtatttgctagccgcgacttgggatgatgtaatttttcttgggttcggtttattctcagagcactggcgtctgtatctacgactgtaagatctgcctgaatgtcggcttaatatatgagataatgccccatttttcagc

SEQ ID NO: 21081 - DNA, 1509 bp, Oryza sativa
  ref <308>: DATABASE ACCESSION NUMBER: AK071379
  ref <309>: DATABASE ENTRY DATE: 2001-12-06
ggtccccgccgtccccgccgtccacgccggcgccgcgctgagccgccgacgtcggagcgactgcgactcctcctgtcgccgcccgccttctccagttctcccctctgcccgtctccgtttggccgccgcccgccttctcctgctcttggctgctccacgcctccaccgatccggcgctccacccttcagcccagaggattggtaaattgttactgattagtgatattgcgtcgttatttcagaaccatgcggccgcttgtggatgctgactacccaaggaaaaattcctagctacgccactacccaccatcgcggccgctgctttcccctccctgccccaaatgctcccggccacctccaccgtcccacccacctcgccccttccccactcccgcgctgccccgcgccgccacctccgcgcagggcttctccacgggtccgtggcgacggcggcggtggttcgggcgtgcggggtgacgacgggccaccgtcggaggatgggctcggttcgggcgagccccagggcaggcggatgggaggtggcgatggtggataaggagggggtaggggtggagcggctagtggaggtggcgcagagggcggcagacgccgcaggggaggtgctcaggaagtacttccggcaacgcgtcgagatcatcgacaaggaggatcagagtcctgtaactattgcagatagagaagcggaagaagcaatggtgtcagtcattctgaagagcttcccttcccatgccgtttttggtgaggaaaatggttggagatgcgtggaaaagtctgctgattatgtttgggttttggaccccatagatggaacaaaaagcttcataactggcaagcctctgtttggtacgcttatttcactcttgtacaaggggaagccggttattggcatcattgatcagccaatcttgagagaaagatgggttggggttgatgggatgaaaacaaccttaaatggacaagaaatatctgttcgcccttgcaatgtcctggcacaagcttacttatatacaacaagtccacatttgtttgcaggagaagctgaagatgcatttattcgtgtacgggataaggtcaaagtcccactgtatggttgcgattgctatgcctatgctcttcttgcctctggttttgtagatcttgttgttgaatcaggattgaagccatatgattttctctcattggtaccagtcattgaaggagctggaggttcaataacagattggaaaggaaacaagctccattggcctgtctctgcggaatcacggcctgaaagtttcaatgtggtggcatctggagacgcccgtgtccacaagcaggcccttgatgcgttgcaatggcactagtctgcaaaacacatccaagtttggtctctaaacaaacatgaatgtgttattcatgtgtccaataaacagtgtattttgtatgcttgcgccgtgagcgactagttattcaaattgcactgccactaataaaatcaatttgatggtt

SEQ ID NO: 21082 - DNA, 1090 bp, Oryza sativa
  ref <308>: DATABASE ACCESSION NUMBER: AK071380
  ref <309>: DATABASE ENTRY DATE: 2001-12-06
gacgaagcagatcgaagcatcgcgcccgagccaaacctaaatccctcggagagagagagagatagagaggaggaaaaaatcaaatctttttgaggaagaaatcatggcgtggcagcaacccatggacggatcccacgcgagcgggagcaaggcggcggcggcggtggcggatggcccgggaacccagaggacgcagtatccttatgtgactggctcatcaattattgcactgaaatacaaggatggtgtcatcatggcatccgacactggagcctcatatggctcaactttgcgatacaagagcgtggagcgcattaaggctgttggtaagcatagccttattggagcaagtggggagttcagtgatttccaggagattttgcgctatttggatgaattaaccctgtccgatcatatgtgggatgatggaaactccttgggtcccaaggaggtccatagctacctgacgagagtgatgtacaacaggcgcaacaagtttgatcccctctggaactcccttgtaattggtggggtgaaaaagggtccaaagggtgaagagaaatatcttggcatggttaacatgattggtacacactttgaggaaaaccacattgccactgggtttgggaaccatatggcaatcccaatacttcgtactgaatggcgcgaggacatgacatttgaggaagctgtcaagcttgttgagaagtgcttgcttgtcctgctgtaccgtgaccgatcatctattaacaagttccagattgccaagatcacaactgagggagcgaccatctacccgccatactcattgaagacttactggggcttcgctgcctttgaaaatccggcccagggtgctgtaggatcatggtagatttatttatgctgcagaggctgaatgtcaggccatgaaccaggatgaagaaacaggctctgttgctgagaggccttgtgaaatgttttatctgaacatcaatgaaactccagatttgctttgtatgacattctgatcgtgcaacttagatttctaccttctgtggccgttaagcctggaactatattatatatgatgaaagtctgttttgtttcg

SEQ ID NO: 21083 - DNA, 968 bp, Oryza sativa
  ref <308>: DATABASE ACCESSION NUMBER: AK071381
  ref <309>: DATABASE ENTRY DATE: 2001-12-06
ggtgggaagcaggcatcttggctcattcctcgtcgtctcccgccgccttctccatcgacaagcccaggagaagggtttttgtgtttcttgatccactcccgcaaggattcacggcctctcagcttatgctctcatttgcacgcactagctttgggggtcagactgcacatctgcctaagtctaaaagttcaggatataaacattttgtgtccatctccagtggtctcccatgcttcctcgccatcaggcggcaatctcctggctatagttcagttcacacagcttccttcagttcacaacacaatcaattgagcacggataggtcaggtactgttatggcagaaagggagctaatcgacaaggataaacttatacttagaggtttgcagttccatggtttccatggagtgaaacaagaagagaagactctgggccaaaagtttgttgtggatgttgatgcgtggatggatttgagtgctgctggggaaactgacagcatatctgatacagttagctacacagatatttacaggattgccaaggatgttgttgaaggcccatcgcggaaccttttggaggcagtagctcatcgcatcgcgagtgccacattgctgaaattccctcaaatctcagccgtcagagtgaaagttgggaaacctcatgttgcggtacaaggaatcgtcgattatttaggcgttgagatattgaggtacagaaaagacgtaggaggcgatcgtcaggagcttcattgagcctgctttgtgctgaggatggcgttaccttactactcaacaatgcattttttgcagccgtttgtacctcaataatttcaatggaatgttgacctcatgagctgttcccttaaaaaggggtgaagttttatattggggttgaagtaggtaccatgttgtgttgcttgtccaaaactttggcaaactttgcttacagtgacttaaaattgtcaggtg

SEQ ID NO: 21084 - DNA, 4120 bp, Oryza sativa
  ref <308>: DATABASE ACCESSION NUMBER: AK071382
  ref <309>: DATABASE ENTRY DATE: 2001-12-06
gtcaaaaaaattccatcctcgtccttatcctcacctccacctccctccctcctttcttctcctctcacaggcgcgactcggcatcccgcgagcgacggtgggaggagcggggcctcgaccgccctgctgccgtcgccgccgccgacgaggtggccgggatccgatagcgcgacgcctctccgctgttcagatccgacggcagcccccctctgccgccctccgtagcccggatccggcagcgccgcccctcttccgccctcccccacgcgacggcggcggcgacgacgaggaggtggccgggatccggcagcgcggcgtctctcggccgcccgtatccggcggcggcgcggcgcctctccgctgctcggatttttatttttgtgtgtgggcaacataaccaccccggacgctaaaatgtgattttcgtgtgcggggaacgccgagactgagaacgccccctttcctttccccctcctctcgttggaggcggccggggaagctggtgggcatatggagtgcgcggcgaaggggctggtggcggagccgtgtgccggcgaggcccgccggcgctgcggcggttgcggcgccgtcgcctactgctcgcgcgcccaccagactgtgcattggggatttcataaagaagaatgcgcaaggctcgcagagcagatgagccgcatcgatatgctgaaacaatttccattcacgttctctgtggaatctcctgctccgaatcatacattccctagtctaagatgtttccttttggaatcattcaaacttcaccaaaaaggactctggaaatcagaatgcatatgtgatccagaggttacttcagtcaaggacttaagcaaaacaactgactggagtatgggaagcgccctctgcccatgcacagagcctgaacataatgtatccacacccctgacaagctggaaagactactataggtggagatcgcttcctttgcaatcacctgttgctgttttacttcactggccacttactttatatcattgcgttcaactatcgcacctccaaacctcaaaatatgatggccaagacactctatgtattcactatttaggacctgagaaagaactacatcagcttgcggtgtttggggaactacgtgcactatttccaggtgtccatatttacattgaacttgtgggaccagcagttccaaaatctagggatggagagcttgtaactatttcaaactatgcacattgttgtgatgagagctgcttttgtaaatcttccattggctccaaagatttaagttgcagtgcagtgacattcaaactacgaaaagggctgtatcatgagagatatagtgatattgtgaaggattcaaagcctcatctcattgttgccccaaatgctggtatagctgcatatcctagttggattccaactattgaaataattaggaaagttgggattcctgcaattttcacggacttctgtgaagaagctgcacatctagcttcgtcctgcattacctccataactggtcaacccctcagagtcccaattcaggtaaatcctttcaggcaaccggttgcagtggataatagtgcactatgcttaccatgctactccaactgctttgtttttgggatgcagaattgcaagtttgtatcaccatgaaatgttcagagattcaactcttaacaaataatatcactaactttttcaaagaaggcaaggataccatgaaatattttcatggacgaaattgccacctgtttttattatttagtctttcagaatagatgccttggttacttgtaagaatgtaagatgcactcatcagctcatgcttgtaaatacagttgtcgtataattgtagacctgtagtaacttgtaagatactacatatataataccctaaagttgcagaaagacttgctagtaggtagtagcaatcccatgctggacatggtgaaatatggatcagttatcaacagcttttgtgccaaggtactaatgaggtagtgccgaagaagcttgttggagacaaactttctgcaatagtaccattcatatgggtagtctgtgacaagcctggaaacctctgcttcaagcacaacaacaaactcctagccctacttgcaaggatcagattcttgtccccatcagcattcagctcagtaacattttcccattttgacaccacatgggtcatgcttgcttttctccgccatacgtacatcgcagcctcaacacggtctgcaatctcaagtgcctcatgttctgagctcaagttgaggaagttgaggaggtggtctggtgagaactgatcccctgcagacatgtaccggtatatggcatcacccacgccaaccttcccactctgttgagtagcagaaatgcatttatcagggggaaatgataatttcagtaatcaggaccatagaaagacccagatcaagcagtttctctgtacctttggcagtgtttctatgtatgacagtggaacctgcatttcagagaggatgccgctgttgatctccatggccatcttgtggatttggcttgcttggtccctcttttgttgcagctcacggtgcatccgatcagacaggcctgactctgggacacatggttcagggagccaccacttgtcctcgctgcgctgaaacttcatgctgtcactgaaggactgctttctctgatctatgtaccagaaatctgtcttctcaaagctatccaatatttcctgcaaaaatggtgtgcaattattggtcatacattgtactacaaaagttgttcgaaaggagccttccggaattccgcaaatcgggactttaccaggagcatagtttccagtttttcaagtgctggaaggttcattagtatgtctgatcttggtgaggttgccatcacctgtagaaaacagaaatttgtgcctaagtagacatgccatgaagatgaaacttatcagagtgtgagacgtgatattcttgcaatggaattacatcatgagtgcttccatctggcatggcctggacttttggtgagaattcaacaatgtattcgcagatggagaggaggcagtccatctccctgttccacatcgccttcttctcaggaggcagtggctgcaacctgtggcaggttccaaacacagttgctgcagccaagaacaagcacagaggtcaacccactgttgcctgcatcaaagaccaacttaacagaagattcatctgcaattctcagaactaccatatagattggtgatggcattggagatggccacagccgtgcagacacccttcccactcccagacatgtcctctccaagaagcagcttggtgtacttctccttcatcagctccatctctgaacaacacccatcaatcaaccaccagaaacaccagaggacactaccagaaatcaaaacaggttggcatatctataccttcatcctccagggacttctcgttcacaacttgctgcagcttcttcatgctgagcttgctcaccgatggcgagaggcgtggtgccgtggacgtcgtgcggctcatgcttctccctcgtggcggcgatggcgtatagtgctcctgctcctcgccaccgccattgtcggagaacgacgacacacggaacagcggtcgcgcgtagtcgcgatcgtagccgtgtttgtggaagccagggaagcctgaacctccactcatggttgcagctgttcttgctgcctgcttctgaagacctgcaagaaagacgatgaatgggaatggcacaagaatggaggcatgccaagaacagagaggataggtacctggtgttattgacttgctttcccttttttggtgatcatgtcatggctgtcacttacaagtgtatggaacaataataaaggcataggggctatctttccttgacatgggctgttgcaatcaatatggtttgcaattatgcaggcatgtgagcgatttgcccccacagtgtaggacaataaggttggattggttggatgtcttgcaggtttggtgaatgtgttaactgtcaggaaggtacaaaattttggcacttggtgctgtcacattgtacccagattttgactcacattttcggtgaccatctatttcttcaatttaagtaattgcctctc

SEQ ID NO: 21085 - DNA, 1420 bp, Oryza sativa
  ref <308>: DATABASE ACCESSION NUMBER: AK071383
  ref <309>: DATABASE ENTRY DATE: 2001-12-06
gacttgtctcgcttcctcctccgactcgcctcttcccaccaactccttccccgatggagtccctcctcgccgcctcttcctctctccccgcggccgccttctcgccgccgtcgtccctctcttcgacctcctcgtcgccgcacgccctacggtcggccgtcgccggagccgcccgcgcggtgcgctgctccgccgccaaggattcgatcctgtacgcgctggagcacgacgagatgtttaactcggcggaggtgatccagtgggagagcggcaagtccatcaactccatcgccgccgcgcagggcatccgcatccgccgccgctgccgcccacgctacccctccgagggctccggcgccgacaaagccgtcccccgcaacatgctcgagcagatcatctgggacaaagaggtcgaggtgtcccagaggaaggcgaagaagccgctgcagaaggtgatcgagtcgagccagcacgcgccaccggccagggacttcgtcggcgcgctaacggcggcctacagccgcaacgtcgcgccggcgctgatcgccgaggtgaagaaggcgtcgccgagcagaggcgtgctccgggaggacttcaatccggttgagatcgcgcaatcctatgagaagaacggcgcggcttgcctcagtatcctgaccgacgaaaaacactttcagggtagctttgagaatctcgagaccgttcgcaattccggagtaaagtgccctcttctttgcaaggagtttgtgatagatatctggcaaatctattacgctcggtcaaagggtgcggatgcaattctgttgattgctgccgtgttacctgatctcgacatcaagtacatgcttcgcatctgcaagaacctcggaatgacagctctcatagaggttcatgatgagagggagctggatcgtgtgctcaaaatagatggcgttcagcttatcggcatcaataaccgaagtttagagacgtttaaggttgatacttcaaacacaaagaccctgttggagaaacgtggtgacctcataagggataaagggattctggttgttggtgaatctggtcttttcacgcctgatgatgttgcatacgtgcagaatgctggtgtttctgcaattttggtaggagagtccctggtgaaacaggaaaatcccgggcaagccattgctggactatatggaaaggatcttttgcactgaataattgatacgcgcggtagttactgtgtgtaccaatatgggctggagaaaaaaaaaagtaaagcctacaagcctcaaatgtaattatgaataagggccatgctttctacaagtgtaatttcctttgttcacatttgtggatttttttttatttttttatactttttttaaaaaaatgaaaataaaccatctagaataatattatctatattttcagaacg

SEQ ID NO: 21086 - DNA, 1763 bp, Oryza sativa
  ref <308>: DATABASE ACCESSION NUMBER: AK071384
  ref <309>: DATABASE ENTRY DATE: 2001-12-06
gctctgctcccctgcctgcaaagctgcaaccgtccaaagcacgtgccccgcacctgactcccccctccccccacttccgtttcctccgccccacgccaccgccgccgacaagctcgacccacccgcgggcggccgccggagatggcgacggaggggctggtgcccatcacgcgggcatacctcgcgcgctactacgacaagtacccgctgcccccgctccccgacgccgccacggccctcgccgaccgcctccgcgccatctccgcggccctcgccctcgccgccgccgcccccatcacgccagatgaggagctcttggaaaaagaagctaatgggatacctgctcacaaaattgatgaaaacttgtggaaaaatagagaacaaatggaagaaattttgctcttgcttaacaaatctcgtcgtcctgttgcacttcaacagaggtccacggcagaggacactgagacatttattatacttgatgatgttgaaactaaattgaaggacatgctgaagaagttagaacagtttcaaataaaaaatgctgataatgttttcaatacagttatgacctacatgccacaagatttccgtggtacactaatcaggcaacagcgagaacgctctgagagaaataagcaagctgaggtagatgctttagttaatgctggtggaagcattcgtgatcgatatgcattgctgtggaaacagcaaatggacaggcgagtgcaattggcacaacttggttctgcaacaggtgtatataagacgcttgttaggtacttggtcggtgtccctcaggttctgttggacttcattcggcaaattaacgatgataatggacctatggaagagcaaagagaacgttatgggccagcactttacactcttacgaaactggtgcttgcaattcgattgtatctacacgtgtcattagcacgatatgggcagaggaaaatagaaaaggatgacattgctgtgttgcagcaggctgtggctatctacaccgaggaatttgagaagttcactgaattcataggcgaagtttttgtgaatgccccattcttcatatctgctgaggatgcaggtgctgaatcaaggaacagcgacgactacaaagaaaccattattccagcaggaaagacacatgaggttattcttagtgttgaggctgtcaactcatacattgcatgggacttctccttgcaacaaggggccctcaacatggtcttggatattggttttcatgtggagtacataagcccatcaggccagaaaactttaatacttccctaccgacgatatgaagctgaccaaggtaacttctgcactgtctctgccggatcatacaagcttgtttgggacaactcatattcgtcattcttcaaaaagagcctccggtacaaggtggacgccgtgccgccggttgtcgcgccggcagagcccgccgcggaaccctgatggagcctgcttctctacgaagcgacgagggccattccctgcgacggaatagccgcgcagatataccacaggccctcttcacacagatgttgtaacacaattctttttagcaagccgcatgcgacagcggcgctgtaatcctcagggttcagacgatacaacacacacaacagctgctcactggcgtccatgtgagctgtaagatatatatatatatatatatatatatatatgtacctttgtgtgctcgtgtttacggaaactcgctaatgatatgaaactgactgcttccattcaaattg

SEQ ID NO: 21087 - DNA, 1726 bp, Oryza sativa
  ref <308>: DATABASE ACCESSION NUMBER: AK071385
  ref <309>: DATABASE ENTRY DATE: 2001-12-06
ggcgcctcaaactctatgtgagggaagggaaacaatcgacttcccagctgagaaaccaagaagcagcagcagcagccatgcgtccgtccttcctcctcctcctcgtcgtgtttgccggcgtcttggccggcggggcgcgcgcggggccgccgttggcgggcgagaatctgccggggcagctgttgccgggcgagaagccgccggggcagccgttgccggggcagccgttgccggggcaaccgttgccagggcaatcgttgccggggcagccgttgccggggcagccgttgccagggcaatcgttgccggggcagcctttggtgggcgagaagccgccggggcaaccgttgccggggcagccgttgccagggcaatcgttgccggggcagccgttgccggggcagccgttggtgggcgagaagccgccggggcagccgttggtgccggggcagccgttggtgggcgagaagccgccggggcagccgttggggggcgacaagctgtcgccggattactacgcccagacgtgcccgcgcgcggagcggatcgtcgcggaggtggtccagtcgaagcagatggcgaacccgacgacggcggccggggtgctccgcctcttcttccacgactgcttcgtcagcgggtgcgacgcgtcggtgctggtggcggccacggcgttcgagaagtcggagcagagcgcggagatcaaccactcgctgccgggcgacgcgttcgacgccgtggtgcgcgccaagctcgccctggagctcgagtgccccgaggtggtgtcgtgcgccgacatcctggcgctggcggcgcgcgtgctcatcaccatgaccggcggcccacgctacccgatctccttcggccgcaaggactcgctgacgtcgtcgccgacggcgcccgacaaggagatgccgcagtccaacttcaccatggaccaggtgatcaagttgttccaggacaagggtttcacggtgcaggagatggtggcgctgtccggcggccacacgctgggattctcgcactgcaaggagttcgcgcagaggatctacgactaccaggggaagcccgggaacgtggacccgacgatgaacccggtgctgagcaagggcttgcagacggcgtgcaaggagtacctcaaggacccgacgatcgcggcgttcaacgacgtgatgacgcccgggaagttcgacaacatgtacttcgtgaacctggagcgagggctcggcctcctcgccacggacgaggagatgtggtcggacaagcgcacccagccgttcgtgaagctctacgcgtccaaccccaccgccttcttcgacgacttctcccgcgccatcgacaagctcagcctcttcggcgtcaagaccggcgccgccggcgagatcaggcggcgctgcgacacctacaaccacgggcccatgcccaagtgatgatctgatctgatctgatccgatccatcgatcgatcgatcgatcgcccgctcgcgcgcgcccggtttacgaggacgatatgatcgtcatatcataattaagtgattcgctaaatcgattgtttttcgttcgtttttgtatttgtatttttttgttttgcgtgcgtgacttatttttcatcgttggtttgttaacattcgtgaataagctagatttgtgtcgagtactcgagtttcctgttcgattcagtaatttaatttctgctcgtacgagaactggaggtcactctctatgtg

SEQ ID NO: 21088 - DNA, 1482 bp, Oryza sativa
  ref <308>: DATABASE ACCESSION NUMBER: AK071386
  ref <309>: DATABASE ENTRY DATE: 2001-12-06
ggcccagttcaaaaaagaacaaaaatcgccattagctggctgctagtggagtatttctgggcggggcgctctcttcccttccccccgcgcctccacttccgcctccgcctcgcgccaccgaccatgccttcctccgccgcagccgccgccgacggcggcgacatcgaggaggtggaccgcctcaagaagaggatcaggaccctcgagatggaggagacgaagttgaaccagcatatggaacgcgtcatccagggaatcgaagcgaacgaggcgtacctcgtcggcatggtcctcaggattatggaaaagggcccagaggatgagactgctgaggatgattgtgatgttggctttcatttgcagcgaaaaattatattccgtcctattgctggggtagtgtaccctagcaaacttaagcctggagatttaattggtgttgacagtacatcaaatgaacactactgtggcattggtggtctcgaaaaacaaattgaggagcttgtggaagcagttgtgttgccaataatccacaagaactgcttccagaggttgggaattcaccctccaaaaggtgtacttctgtatggaccacctggaactgggaagacactcgttgcccatgcatttgcttcccagacaaatgcaacatttcttaagctaactggtccacaacttgccgtgaagcttattggtgagggagcaagacttgttcgtgatgcctttcagcttgctaaagagaaagccccatgcattattttcattgatgaaattgatgcaattggaagcaagcactttgatagtggtgatagggaagtgcaacaaacaattgtggagcttcttaatcagttggatggcgtcgggagctatgagagtataaaggtaatagctgcaactaatcggccagaagttcttgatcctgcttttctgcgatctggccgtttagatcaaaagattgaattccctcatccatctgaacaggctagagttagaattctggagatccactcccgaaaaatggacaaaaaccctgatgtaaactttgaagagttggcttgctgtacagatgattttaatggtgcacagctaaaggctgtatgctttgaggctagcatgctggcatttcaccgagatgctacagaggttcggcatgaggactttgtcagagcaattgcgcaagtaaaagacgggaattactgaacaacagcttcaactactatgcatagaggacaccatctaacatcttaccttgtgtgcagttggttctgagaccagaccaagaagctactgtcacctaactcaaatttttaccatgtcttagatacgagagatcaagtatagtttgaaaacagtggtctgtatagtactgattagtaagttgagaaatatttgaggctcatagtaggaagctaatcagaaaaggcaacaattgtttttgataaccttgcaagatttgagtttttttgacaacagcatttgctgatc

SEQ ID NO: 21089 - DNA, 906 bp, Oryza sativa
  ref <308>: DATABASE ACCESSION NUMBER: AK071387
  ref <309>: DATABASE ENTRY DATE: 2001-12-06
gaatttgggccttctcctccctcctcctcctcctcctcctcctccaactccctcgagatttctcatggcggcggcggcggcctcctcctcctcctcgtcggcggcggcgacgccgcagggggtgacggagcggcggggcatcccggcggcgtccttcgtcgaggacgtcgagacctacctccgccaggccgggctcgacgtcaactccggcctcgccttcctccaggaaaggctgcagcagtacaaaatagtggagatgaaacttctagcacaacagagagatcttcaggcaaaaattcctgatatagagaagtgcttggatattgttgcaactttacaagctaaaaaagctttgggtgaggcactcacagccgattttgaattatctgagggaatctactcccgtgcgaaaatcgaggacaccgattctgtgtgcctatggttgggtgcaaatgtaatgctggagtactcctgcgacgaggccaacgccctcttgaaaaagaatctggaaaacgccaaggccagtttagaagtccttgttgctgatctccagttcttgcgggaccaacaaacgatcactcaggttacaattgctcgggtgttcaactgggacgtgcaccaacggagaagcaagcaagctatcaaagaaacctgatcatcatacccgcagattctaccagccaaaatgagatcgcgacatttttgtacttcttgccacctctggcagtctaggccatcgtagcatgtgccctctgttggcgccttgccgtgtaacagtgtatcaggttttatggtgttggattgttggaactctgtttgccttgcaagtagaaattggtgtttgttttcacttcggttcgcgtgatggaacatattttgaggagtaaaaatcttagcggttttcag

SEQ ID NO: 21090 - DNA, 1326 bp, Oryza sativa
  ref <308>: DATABASE ACCESSION NUMBER: AK071388
  ref <309>: DATABASE ENTRY DATE: 2001-12-06
ggccacctcccgcacacctcgtcgccctcctcctccgccggcgccgccgccggcgacaaggctgcagttactcgaagggctggcaatggagggtgcggcggtggaggactcggcggcggcggcgcccgttgtggcgccggagtccgctgccgagggagaccagcgtgtcgagggcgcggctggggaggattcggtggggcccgctgtggcgcccgaagcatccgtcgattcggatcagcatatcgaggatgcagccacggaggacgggaagcatggatctacagaggaaaatttcgatgtctctcctgaggaaatgagatcagtcatagaaattatagctgacacgggaaagttctggcatgattggagctttctcaagagattgctgtctctccaattgaagcaggtcttggctgaatattctgagggtcaagtggtgagccaagaggatgggcagctacagaattctttctctggggagacatactccgagcttgtcatctggctcaatgatgctctcttgaggttcgaagaaggtcctccatttacactgcaaaggctatgtgagattttgttggatccaaaaggaacatatactaaactgccaaagcttgctttggccttggaaaagaacctcctggtcacatctacaatgaccaagtgcactgatccatacccagctgctcatgtgtcaaatttagaagctacagtaatgacagagaacaccagcgctgttgaagtagaacctgaaaggctgccggaacatcctgcagcagtaccgaatggaaatgtagggggtgatgctgatgcagaaatggctgatgcggaggttgaggagccatcgaatagccacgatgtcgagatgcaggaggacaagcctgaccagatttcaaatgttaaccctggtgctacctcagatgctgcagttactgcagaaacagttgatgctagtgaaaaatcatcagatccgcagacatgagcttacaacagagaccagaagccctagtgcatgtctcattagtaatcattgccacccttgattcagcaacttagctcgatgcagatggcagattgtgctatgtgacgttaaagtttttgtgggccatgataaacatggggtaggtgagtataacgaccattttaaatcctaaaaaaaaagaaatgtattttgagtagaaatggatgtgaaaaattttcactgattgtcgttccggttgtcaaaatatgttgtaccccaatgttagtcaaaggagttgtcggctgccgttttgcccttgcactggtgaaattatgcatcacaagaatgtgagcttactatttttcgtc

SEQ ID NO: 21091 - DNA, 895 bp, Oryza sativa
  ref <308>: DATABASE ACCESSION NUMBER: AK071389
  ref <309>: DATABASE ENTRY DATE: 2001-12-06
ggtgggtgaccctgaatttgccattgtggatgaagcatacccatatattgcgcagagactactaacagatgagtcacctcgtctaaggagcgccttgcgatacacaatatatggcaaaacaggtgtattcgacgcagaaagattcattgatgtcatgcaagctttcgagaattttattcgtgcagcaaagagtggtggtggggagaacttgaaaggcagcatggctgagctggctgagataggaactctaccaagcacaagtttagttcctgcatttccaatggccatatcacagcctgagcaaccagtcaaagctcgggctgctctttcttttctactctctgagaggggcaacttttttagggagttcattcttgatgagattgtcaaagccatagatgcagtttcaagggagcaactgatacaaattgctgcatcttttgggctaggaaatgctaccccagttttcagcatggttcctgtcagagctagagcactgcttcctacaatcacagaggaagacagggtcatcttgaacaatgttgagaaggttgtgaagtttttgacagctgggaacaatccaacaacaattgatggggatgtaaatgttgtgtatcttgtacaagagcttctacctgtgttgccgagcatttcgtcgaagatcctaccagaggtcatgagccggttgtcatcgcgagtatttgcacggttggtccgggaggcatttttgtgaagtgatttttcttacttccgacgggagattgcaaacagttatttctcccttttttgcaaacaatacatcacaaatgatgatagaactcatagaagattgtacagctaaacgttgtatagaaattatacacatatacgcagatttgaccaatttttaactagc

SEQ ID NO: 21092 - DNA, 2304 bp, Oryza sativa
  ref <308>: DATABASE ACCESSION NUMBER: AK071390
  ref <309>: DATABASE ENTRY DATE: 2001-12-06
gatcgaagtagtagcatactactctctactcctctcctctcctctcctccgctttggtttgctccgatctgcagcgagagcgggaggtcgtcgccggcgaggaggcgcggcggaggaatcctctccttcccgatcccgtccggtgcttcctcttcttggtctgcgagtaaagctcggccgccgccggcgacgaactggtttggggagagccacgtacggcgccacctcgaatcgaatcgaattggaggttgatttgactcgttggttggagcgctccatcgattaagcagacggagtcatgcttcttctttgggtataaaagtttggatctcggaggctcgattcaatctctggagtgggaacaatcgtttgctcgtggtcgtgggatagctcctctgcgagatgcagagtgggagcgagatgagacccgtgcacaacagtgtcgacacggtgaacgcggctgctgttgccattgttacagccgagagccgcacgcaacctcaggcagagccgcgaagaaaatgggctgattggttgagtgtgtacttctgctttggatcacagaaaaatggccgacgcatcagccatgctgttcttgtcccagaacctttacctccgaggacagatgcacctatgccagaaattccaatccatccgccacccccggtattcccctttgtcgcacctccatcctctcctgcttcttttctccaatcaggaggtgcatctattgtacaatcacctgttggtgctccatctttttcgcctctctcgccaaattctccatcccccactgggccaccgtccatctttgctatcggaccatatgcacatgagacacagctagtctctcctcctgtcttctcagccttcacaactgaaccttcaacagctcctttcactcccccaccagagtctgtgcatctgacaaccccttcctcaccagaggtgccatatgcaaagctacttacctcaatcaacaacagcaaaaatgctgaaacaggtgagcttcagtcataccagatttaccctgagagcccaataggacgtctgatatctccaagctcagcttgttcagggacttgctctccatttcctgaccctgaggtgcagacttcctcacgttccacattcccctcattcccagttcgtgagcctccaaagatactggatggcgagggaattgcaacacagaagttgatacctcgccatatgcgcaatggcggttctctcttggatggacatatttctgctgctgtaccagtcgtagacttctctgcccgacttcaaaataatgatcatgctatggatcatcgggtttcatttgagttaacagtagaagatgtagctcgctgtcttgagaagaaaaccaacattaatggggagtctgctgcagcttcttttcgccttgtgcccaccggtaacggagatcacattcatcccagagaatcgaatgatacaagagcagggctatgtgttgatgaaacataccatgatctgcctgagaaagcacggcgctccttgtcccttcgtaaggctaaagaattcaagttcaacaatgttgatgctcctagtgtggagccgagcgttggatcagactggtgggcaaacgagaaagttgctgggatcacatcagagccaaggaaaagctggtccttcttcccagtggcacagccaggggtcagctaacagctgcactgaccataatcttacaagatgaagaaataagcttctgtcatttttgctcctgctgtttctcagttccccagataccatcatcataactgcaggagatgcaaacttatgcaaaatattccagttttagcggtaagttggagttagttagtaactcagtgtccagctaatatcatcataagatactaaaggtgatgcagattctggaacctgttgttataaaaccataatacttccatggtgtagcgtctgttgtatcctccttaactgactggctgttctgatactgatgctgtttatgtacataataaactagcgaaaagagtagaactcttcctagcagcagtgtattgtcagagtggagcaagcaaatgactctgatcccctcttcaattagttgtgctttggctttggcagaagaaacttgaaaatattgttctgtcgtgcttaccagttcggcaagaatttcaattctgtcttggcatatgtgatgtcacatctcttatcacaaattctgtaagcaacactattttgttgtgctctgtatattaaattgggccaagtgctgactgtttatatttgaatgtttgattacccatggtcattctg

SEQ ID NO: 21093 - DNA, 1967 bp, Oryza sativa
  ref <308>: DATABASE ACCESSION NUMBER: AK071391
  ref <309>: DATABASE ENTRY DATE: 2001-12-06
gttggaggcgccacgtttaaagggcggagtcgctgtaattagagaagaggatttaaagagagagaaggccattctctcttgattgcttggagaggaagaagaacaagagccgccaccgccgccgttaggtttttatttattttttttctcgatctgatccgaggaggagcgaagcgaagaagggcaagatgcattcgacgaatctgctgctggaggagcccatcaggatggcatccatcctggagccatccaagcccagcttcttcccggcgatgaccaagatcgtggggacgctggggccaaagtcgcgctccgtcgacaccatctcctcctgcctcaaggccggcatgtcggtggcccgatttgatttctcgtggggagacgccgagtaccaccaggaaacccttgagaacctcaaggtcgccatcaagtccaccaagaagctctgcgcggtcatgcttgacacggtcggcccagagttgcaggtggtgaacaagagcgaagcctccatctccctcgaggagaacggcactgttattctcacccctgaccaggggcaggaggcctcctcacaagtgctgccaattaacttcgctgggcttgctaaggctgtgaagccaggtgacacaatatttgttgggcaatacttgttcacaggcagtgagactacttcagtttggttagaggtttctcaaattaaaggagatgatgtggtctgtgtgataaaaaacacagcaactctggctgggtcgctcttcacattgcattgctcgcagattcacatcgacttacctaccctatctgatgaggacaaggaggttatcagaaaatggggtgccccaaacaagattgacttcctctctctttcttatacaagacatgtagaagatgtgcgacaggcacgtgaattcctctcaaagttaggtgaccttagccagacccagatttttgcaaaaatcgagaatgtggaggggttgaataattttgatgaaatcctccaagaagctgatggtatcatcctgtcaagaggaaaccttggaattgatcttccacctgaaaaggtgtttttatttcaaaagtctgctctgcacaagtgcaacatggctggaaagcctgctgttgttactcgtgttgtagacagtatgactgacaacctcaggcctactcgtgcagaggctacggatgtggcaaatgcagtgcttgacgggagtgatgccattctccttggtgctgagactctgcgtggtttatacccagttgagactatttcaatagtgggtaaaatttgtgctgaggctgagaaggtcttcaaccaagatttatacttcaagagaactgtgaaacatgtgggggagcccatgacccacttggagtctattgcttcctctgcggtgcgagctgctattaaagtgaaggcgtctgtcataatttgcttcacatcatctggacgtgctgcaaggctaattgccaagtataggccaaccatgcctgttctatctgttgtcattcctcgtctaaaaacaaatcaactgaggtggagtttcactggcgcatttgaagcaagacaatcgctcatagttagaggcctctttccgatgcttgctgatccgaggcatccagctgaatcaaccaacgctacaaatgaatccgttttgaaggttgctcttgaccacggtaaagtttctggtgtgataaagtcgcatgatcgcgttgttgtctgccagaaggtgggagattcctcggttgtgaagatcattgagctggacgattagacaagcagcttgtgctcgtcgtcgatgatactatggcatgttttgccagattttgactaggccaaaaacgttgcttcttggctatgtataatcctatagcttcaaatgagcagtttttcctatggtgtattcataggatttgccttacagcttgaaacgattatgatttagttaaggaaattaaatttgcgcagc

SEQ ID NO: 21094 - DNA, 1213 bp, Oryza sativa
  ref <308>: DATABASE ACCESSION NUMBER: AK071392
  ref <309>: DATABASE ENTRY DATE: 2001-12-06
gttcccatttggccactagcttaatccctcctcccccattggaaggaaggacaagctcgaggagctcctcctccatggagcgacgtggtagcctgtacggcgtcgcggcggcggcggcggtggtggtggtggtggcaatggcggcggcggccggcggcgaggcggcgaggctgtcgccggagcactaccggtcgacgtgccccggcgtggagtccgtcgtgcggtcggtggtggcgaggaaggtgaaggagaccttcgtcaccgtcccggccacgctccgcctcttcttccacgactgcttcgtcgaggggtgtgacgcgtcggtcatgatcgcgtcgcggggcaacgacgccgagaaggactcgccggacaacctgtcgctcgccggcgacggcttcgacacggtggtgcgcgccaaggcggcggtcgagaagaagtgccccggcgtggtctcctgcgccgacatcctcgccatcgccgccagggacgtcgtcgccatgtcgtccggcccacgctggaccgtcgagcttggccggctagacggcctcgtctccaagtccggcggcgtcgccggcaagctgccaggcccggacatgcgcgtcaaggacctcgccgccatattcgccaagaacaacctcaccgtgctcgacatggtggcgctctccggcgcgcacaccgtcggcttcgcgcactgcacgcgcttcgccggccggctgtacggccgcgtcggcggcggcgtggacccgtcctacgacccggcgtacgcgcggcagctgatggcggcgtgcccgcgcgacgtcgcgccgaccatcgccgtcaacatggaccccatcaccccggccgccttcgacaacgcctactacgccaacctcgccggcggcctcggcctgttcacctccgaccaggagctctacaccgacgccgcgtcgcggccggcggtgaccggcttcgccaagaaccagacgctcttcttcgaggcgttcaaggaggccatggtcaagcttggcagggtcggagtcaagtccgggaagcatggagagatcagaagagactgcacagctttcaactgaacatagttgcatagctgcactgcgacatttgtaagttgtagcaattggggatttgatcgtatattaaaaatgaaatcatttcaaggtaagaatttcatactttctgttttcggtccagaagtcatggctgagtgatgaaagcg

SEQ ID NO: 21095 - DNA, 1612 bp, Oryza sativa
  ref <308>: DATABASE ACCESSION NUMBER: AK071393
  ref <309>: DATABASE ENTRY DATE: 2001-12-06
tggcgctgggaaactatcttctccacaaataactatctcctcctcctcctcctctccccatcagctccgccgctcgccgccggccaccctccccccttccatggtacaccatgcttctggcggcggcaactgccacagcagcgccggtgtcgtctagctctagcttcttcgccgcgacgacaagagccaccaccaccacccgcttcactgcccagctccagctctcgctgccacgccggtgccgatcctggtggggcaatgggaaagcgcgccggagcagccgccgccgcagccaccattgctgggccggtggcggcgccgcgacgccggaggaccacatggacgagctgccgccggggagaggccgctaccacccgttcgaggagatcgccgagaagctccaggtcgacgacggcgagcccgcccacctcaccgacgccgagtccgcacgagccatcgtcgagtggaacaaaatgcaggtgaacagcaaggcgacggtgatgatctcgacgctgatcgacgagggcgtgcacgagaggatcatcctgccggagttcccctacctcaccgatgagaacggagatatttacttcgaggtcgacaacgacgacgccctcctggagagcatcatgggagacgacaagactgcgcatgttatcatagggcttgacaacactcaggtctttgctgacttggatctggcagcggcatctgcgactgagtttgctcaagaagacgatgacgacgacgatgatgatgacgactcggatgatgaggagagtgactttgacgatgactttgatggggagggtgtgtttgcagtcgatgacgacgatggcgatgaggatggagaagacgaagatctgcctagatggacagatctagaaaccatgaattcctgccatccattgtactttgcaaggatgattgcagagacctcaaccaagtctagtatagactggttggacagaccacctgcaagccttgttgttgagggtcaactgagaccagcctttgctgaagagagcaccatggtttcaaggcatttatcaaatgatgaaccacggaaagataacaaggggagtggtgctacgtttttcaaggttgaggttctgagcattgagctgatcactgcatatggaactgagccaaaggtaaagataggggaataccggaaagctaggccagatatcattgcgcattctgcaccgaacataatatcgcgcttgagagctggtggagacaagataagccaggctctgaaatcactctgctggaggtgcaaggccatccaaatagaggaggcagctgtcattggagtggactgccttgggtttgacttgagagtgtgctcaggaacacaagtgcaggcactgagatttgcgttccctgcaaaggccacttcagagtttggtgcagagaagcaaatacacgaacttctgtttcctaggatacagcaagagggacagtcaccacaaactagacagaaagagtcttgatgtaattcggaggagataatttattcatttggtaggaattactagctaaaataaaatatatgccacatgtcctttttcttccatttatccatggggtagaatttttagattcc

SEQ ID NO: 21096 - DNA, 1196 bp, Oryza sativa
  ref <308>: DATABASE ACCESSION NUMBER: AK071394
  ref <309>: DATABASE ENTRY DATE: 2001-12-06
ctctctctcttctcctctctgtcgtcgctgcatgccgccggcgccggcgccggcgcctcctccctctccgttcggcgctacgacgccatcttcagcttcggcgactccttcgccgacacgggcaacaaccccgtcgtcttcggctggtactccgtcttcgaccccgtcacccgccctccgtacggctccaccttcttcggccaccccaccggccgcaactgcgacggccgcctcgtcgtcgacttcgtcgccgaacgcctgggggtgccgctcttgccgccattcttggcttacaacgggagcttccgccgcggcgcaaacttcgccgttggcgccgccaccgccctcgactccagcatcttccacgccggcgatcctcctccgggcgccagcccgttcccggtcaacaccagcctcggcgttcagctgggctggttcgagtcgctcaagccttcgctctgcagcacaacacaagaatgcaaggatttcttcgggagatccctcttcttcgtcggcgaattcggattcaacgattacgagttcttcttcaggaagaagagcatggaagagatcagatcgttcgtcccatatatcatcgaaaccatctccatagccatcgagaggctgatcaagcacggggcgaagagtttggtcgttccaggcatgacaccgtcaggttgcacgccgctaattctcgccatgtttgctgatcaagctggcccagatgactacgacccggtcaccggctgcctgaaggtgcagaacgagctagctattcttcacaactcgctgctgcaacaatcccttcggaatctccaggccaggcacccggatgccagcatcatctacgccgatttcttcagccccatcatggagatggtgcagtcacctggcaagtttgggtttgaagatgatgttcttaccatttgttgtggagggcctgggactgctctctgtggcaatcagggcgcgatcacttgcgaggatccttctgctcgtctcttctgggacatggttcacatgacggaggtggcttaccgctacatcgcggaggattggctgcgcatcagagtcacctgggaacaaaataatttgagtgttttcagagtccataagaagatatatacagagagcaccaaattttcagtgttaatttgaggtacctctcagtacttcataataatcttgatgtctcc

SEQ ID NO: 21097 - DNA, 1102 bp, Oryza sativa
  ref <308>: DATABASE ACCESSION NUMBER: AK071395
  ref <309>: DATABASE ENTRY DATE: 2001-12-06
ggtctccacgcgacgcctccatcgtctccatcgtctcgccgcggagaagaagaagaagagctcgcacgcgcgcgcgcatccatctctctcctagggttcgtgcgttgattcggcggcggtggaggtggaggaggagggggttggattcgggaggtttgtgtgggggtgtggggggggggggtgagagatggcgggggggaagaagcggaaggcggaggcggcgcggctggaggagacggacagggcgctgtacggggcgttccggggcgcggccaactcgctgtcccagctctacacgctcgccatgggcggccagaagctctccttccaggccggcgagcgccacgccatggaaaagctctatgaatggatcttgaggcagcatgaaaatggcttgaggctgacagttgctgatatagcctcgcacatccagcacgagatccagtatggaggtgacaatgcatcagcctctccaagatcacagcatgcaagccaaagcactcaagctacagtgcctattcccaacacaatgagccagcagccatcaccaaacttatttgcgctaggaaatacaggattggtgcagtccaagaactcagcggtcttttcaaatgcactatctagccccgttcgccggagcctgcaaccattccacctggagcagggtggcgatgcggggtacttcgcaaacggcgttaaccgcgatcaaaactcgacggcttcgaacgattcatccatggacatgcattcagacagcccagctcatgactcttactgagttgtttgccccctctgtggagctggaagagcaacacttccagtggaacagaatgtgtgcctttgctaccacagctcatgtaggactattcaatttaacccccctcccctagcctccaatgatgctaagcttgtattctgttgctgccaatcaccagttactagtaccgattacattgctaagatattgtaacttgcatgtatttatgtccagagtaaaactgtactcggtttacctgtgcatactactacagttggtatgtggtgaaaatgtaggtggcaaagcaaaattgagaagaataaacagtattgtactgttgttccc

SEQ ID NO: 21098 - DNA, 2776 bp, Oryza sativa
  ref <308>: DATABASE ACCESSION NUMBER: AK071396
  ref <309>: DATABASE ENTRY DATE: 2001-12-06
ggcatggagaagaggccgcgagatcgctaaaattttccccatttcccgtcgccgccgccgccgccgccgccgctcgccggagctgcgccgcctcccgatcttcccggtccctctcctcccttccagaagcggccaagaccaacggcctcgcccccgctacgtgagatcgctggtgccctcgtagctccgatccagcctcgcccccaagccaaggagcgaattcaggtattgcttcttcttttttctccccagattgctgtgcacggatttgccgtaagatgggggaagtaatttttttggagcttccagtaaagggtctgattgcctgacccttcccttgccatatcaagaacgcggcatcagcatgttctagtattcgtacagattctagcctgaagctgacttttgatgatggatgattcctgcaaagttgcttgatgtttttagtgactgagttcacactatcatattgggtaattaacttgggtaaacttcatcgtcggtcataatgtatcatcctctgtttagttacatcactgatggtcttgatttcgcagtgtgttagttgttagttttgagttcaagtatgaagacgtgttgttagtgctttatactagtagtatttggtaagctcatgctcacctaacaacattttgtttcttcagattttctatggagatttagctttcatcaaaacaaaaacaacaatatgcattatgcacgaattaaaatggcgtgtactatagtaatttgtctcagacaattggtaaagattgtggtttttacctatactgtctattgttttctatgtctctccctggatcgccagtggtagctgaaattggggcattcagcatgaggtacaaaaattataatacattgtgatgtaatagtagagggcaatatgtaaggcagtcagagtcacaagcacaattaaaatgtaaaacctgttatttctgatatatggaaatggggaagctctgctttcctagttaaaaaaaaagaacacaattaaaatataccttttttttttgtaaaagtgaaattgtaaattcatttgaggtaaatgtccatgcacattccttttcttgtttattgtgtttgcatatctggacaagtcgagtatgaaccatttcagatttgttgaagataacgcataggtcactgcttgaacatgcatcagactaatgtgtaactgcaaggctgtttgccacaaatgtgtaacaacattcgatatcaaaattgtttggtctttaatagagctatcatggccacttgtaagaaaagaggaaccatcagccttaggataatcacaatggttgggagctgcctgaactgtcaaatttccttaaaacatcataggatgtttgattatgttgcatctgcccaaagtacgatagaatgccatttagagttctctctactttcttttgaccaccttatcaacttatccccatgggtgctaccttatgaattttgtaaaataataagtataacacatattagtataaagatcaagtgttaattggtcatcttagttggaatgcgtcggaatcataaagaaagtaatctgatgttatttacttatgttaagttctttcatactagtaatatctgcccatgtgcattgctaacaaaatgttaacccaaacatcacccacactaaataaatcatttaccactgtactgacccagttttccatgtcccaaaactttgcacatatgcaaagcagacagatggggatttagtctagtggtaagatattcgcttagggagcgaaaggtcccgagttcatttctcggaatccccagtctgaaattttttttgggaagtttgatgtgaagaaccaaatattgtagaatgatattcagaaataagatgataaggtctggagtctggacaatggaatctggaccacacacaggttctgacgataaggtgtaggactgtatgccagaacttcacaagttgttggattatatgcctacaactacaattgcaaggtaaatggcatagcagcaattttatttgccaacctgttagttgggccaggaacaacatttgatatcacactttgacagattctgttcttttaatcaaacttcatatcaataacgtatcgcaaattgtagagcagaaggccatcccttccaaacagctcagcaccacctgcatttgtatgtgataaaacattgattttgtttatgctgcaatgaatcttgaactagaaagctgcacagtagcattcacccttttttactgtaactgatcaatgatcacttagcaattcctacatcttcatttatgtttctgtgaacttactgaatttgattgcagcgaggcagacagaagtcaattacttctgatctcaatataaagatctgggtggttggacttgtcagttttattttaggagccttgtatggaagtagattgatccgatgcaattatgtttacttcacttcttccacagaacatctccttgcttattcaggcctctgtcgttactccaattcatcgagctgctacctcaaacaggctagagaatttgaacattattcatatgtatattcatgtatgaaaatttgcagatttccatatagcacagctggggatttagtctagtggtaagatattcgcttagggagcgaaaggtcccgagttcaattctcggaatccccaatctgaaatcccttttgcaatgcatgtcaaagttttttcttttccagagagagaaatgcatgtgaaggctatctatatgtttgtatgattttc

SEQ ID NO: 21099 - DNA, 1001 bp, Oryza sativa
  ref <308>: DATABASE ACCESSION NUMBER: AK071397
  ref <309>: DATABASE ENTRY DATE: 2001-12-06
gatccgaacgttcgagcggtgaggcacagtcttgtgacaggagagagaagagaggagttggttagtgctacgctgcgacggatggaccgcgcgacggaggaggagacggcggcgacggggcggcggatactggtggccgtggacgagggcgacgagagcgtccacgcgctcaagtggtgcctcgccagcttcgccaagcgcggcggcggcgggggcgcggcgccgccggacaccatcatcctgctctacgtccggccgccgccgcccacctactccgtgctcgacgcctccggctacgtgttctccgacgaggtggccgccgccattgacgggtacagcaaggaggtggcggaggcggtggtggagaaggcgcagaagctctgcacgctctacggcaaggaggtcggtggcgacggtgaggctggccatgagatgaaggtggaggtgaaggtggcggtcggcgacgccaggaacgtcatctgccagatggcggacaagctcggcgccgacgtgctggtgatggagagccatggctatggcctgttcaagagggctctgcttggaagtgtcagtgattactgcgtcaggaacgccaactgtccagttctcatcgtcaagtcgtagctgccactcactccagtgcttgtaactgtgcagcaacatgtgtgctctgtccggcttttttttttgtttttgccttgtgttctgctttgtatgtctactttagttcgcttcgcatgtaatctgccggaagaggacgtgctgagtgattactcagaactctgaagttatccagcaacctgtatatagaagaactactttctgtggagatggcaaatttagtttttctgtcatcggcttccacttttagcactgatttctgaatttggctgtataattagcaaatacccagggtttgctttgatctattcgcgctaaccattgcgcagaaattcagaactcctttataaacaaatctctaagagagagaattactagcg

SEQ ID NO: 21100 - DNA, 1470 bp, Oryza sativa
  ref <308>: DATABASE ACCESSION NUMBER: AK071398
  ref <309>: DATABASE ENTRY DATE: 2001-12-06
gactcttccttcctttccgagttccgacgcttttccccacccgacaaagccgccaactcccccctccgctctcctccggctcgccggcctcgccagtcggcagccgccgcctcttcccgcccctctaatctccggcgctcgatgccgggggacgcggaggacctgccgccggcgataacgaagctggggcggcacttcaggctcacggaagcgcacatctgggatggctggtacgccgctggcgccgacgtgagccacaggagctggcactccgatgatatcgattccggcggctgttgtcaaacagataaagtccaaaacaagccaaccaaacagacagatgaaggcgatttgtttgttgaagatttagaattgtccaacctgatgggttctttggggcttcctgtttcattcagcacaagtaaagagaaaaagaatgcacccaataaggtaaagaagaatggaaggagagtctcctacgaagcagcaaatactctaatcgacgatgattcaaggacatgcacgggtactaaagaaactgaaagtattgttcagttgatggcttgtgtggagcaaactaacccatgcagttcatctaggatcactgtgggttacagtgaagtctgccaaggtgatatcgagaagatggacaaagacattgtttatgctaatgaacaggaagagtctggtgatctctgctcttctaaagtattatcaagtagcaaagctgaagataactatgaacatgagacttgtcagtttcatgctaacatgaacaacccagtaaaagcagattctcctgttcgagaaaatgaaactgcagaagttgtcttgaaattgaacaaggagatgctggggcaaaactctgttgataatgaatctagattctcctctgctgagatttgtatggaaggaggattatcaacaataaaagatcaactatctggggaaactccttcaacatcccatgataataaggatgttgatcatgaaacttgtctaagttcagcagagccatctcctgtggataataatcctgcccaaaagtctgacagcagcttttacttcgaatatggtgattggagagtcctgtgggatccattctacagtcggtattacttctataacatcttgacacaggagtctacatggtatcctcctcacggattggaggattttgcatcacattctaacacatgtatacctgaagacctggacgaatttggctcacaaaataaaagcacaccggcacaagaacatgatcaggctggtggtgacaagcatttggatgagcaggggcaagcttgttacagtgaattgagcaatttatcagatattcctgatggagagagaataaatcaatgtatggtaactttcaccgatgaagcacgccacactgataatattcatcatcagaatgatagttcaatgagtgaaatttcagagatgaatcaggagattggtcgtacc

SEQ ID NO: 21101 - DNA, 1349 bp, Oryza sativa
  ref <308>: DATABASE ACCESSION NUMBER: AK071399
  ref <309>: DATABASE ENTRY DATE: 2001-12-06
gttaccccgaagccccgaactggcagtcgaagccaacccggcgattccgcaaaaatccatgggcggcggcggcgatctcagcccctccagcgccccctcctccccgtcgtcgtcatcggagccccttccccatgagtttgccgaatacgcggccgtatccccggcaatcgatggcgagtccgacgggtgctgcgtctgcgatgaccccgaggtggaggccttcctccatggcggccgactccaggatcggtctctgcgggaggcgaaagaactcatcaggaggtataaacctggggacttggttgaaggagtgtgtggcacaaaatctggagactatgtgttgcctgatataacaacgtttctattggtgggccctagagattctggcaagagcgcacttgtgaaccgaattacacgggtcttcgacaaggatgatgatcctgatgcaccagatcgagcacaggtctcctgtaattccaaatcaaccggtacaagcttccttcgggagtacagagttcctaggaattcaaattctatatgtatttatgatacaaggagcctctccaacaaccatgaaaacaattttaagatgttgcaaagatggatgacaaagggacttagccatggagatatcatcacgtgggataatgataattactctaagattcagaacatcaagtcaatgggaagacaatacagttttctgcgttgcaagaccaggaaggtcaactttgtgatatttgttgttaatggtgcttctgtcctcgaatcaattgagaacaacaacaaaaactacattgatatgctccacaaaacatttatgtatccattcttgtcatttggagatgataagcctgctgttgtggtcactcatggagatagactaacagcacaacagcgcatgcatgttcgaaatgagttagtagagttgcttggcattcctctgcagcaaatttttgatatatcaggatgtgatgactacgaaactgacttgtctgtattggatatgttgcgttactgtatccaacatgctgagcaaaacttccctattaaaaagaattatcttttagagatgcatggacgtgaaactcttaagcagatagcagtggggttgatgggcttcgatgcagtcattgaaacggccattattttcctatgcatcgttatccttctgcttcgtgtatcagataaattggtgcaatggtaatcaacttctgcatatggtctgtatatatatatgtataaaggggagaagagttatcaccttctcaggagtagcaaaaacaccatggattattatgtaaagcatgtttacattgtgaatactaatattgtctgggtatgcttgt

SEQ ID NO: 21102 - DNA, 3091 bp, Oryza sativa
  ref <308>: DATABASE ACCESSION NUMBER: AK071400
  ref <309>: DATABASE ENTRY DATE: 2001-12-06
gaagcacacaagaaaggatcccaacgggccgcgccgcgctcctctcgctccctcgcctccgcggagctcgattcctaaaccctacctcgccgcgccccgccgccgccgcgggccggggagatcgccctcgccatgccgccgcgcaaggaccccaacgggggcgccttcccctcggagcccgccccgccgcagccggccaaggccaaggggaagaagaaggatgagaacaaggacgacgacctgtcggaggaggaccaggcgctcaaggagcagctcgagctctacgtggtgcgggcgcaggaccccgatcccggcgtccagaagctcgccctcgagagcatgaggcaggagatccgttctgcgacaagttcaatgacctctgtcccaaagcctctcaaattccttcgcccgcactatggaattctcaaggcttactttgagacaatgccagaatctgagctgaagaagtatatggctgatatcttgtcagtattggccctgacaatgtccgctgaaggagaaagagagagcctcaagtaccgaatgataggctctgaaggtgacattggttcatggggtcatgaatatgtgagaaacttggctggtgaaattgcacaggaattccagaagcgccaggatgatggcatgacaactgattccctgaaggaactggtggagcaaattgtttcattccacatgaagcataatgctgaacctgaagctgtggatctcctaatggaggtcgaaaagcttgatttgctagttaagcacgttgactccacaaactacaaaaggacctgcttgtacctcactagttcttctaaatatcttcctgctcctgatgacatgtcggcacttaaaatagcttttgagatttacatgaaatttggagattttgcaaatgctttgcgtattgcacttctgcttgatgacaagtctctggagttgaagcagatttttacagcaactgatgattttcacctgaagaagcaattcgcgtttatcatagcacgccatggtttaagcaccgacattgatgatgacatagctgcagatgaaaatgagaaggaggctttgcaggacataatttctaatattaaattgagtgaggggtaccttacacttgcacgagatattgaggtcatggagccaaaatctccagaagacatatataaggttcatttgattgatggccgaggggctacaagctccagtcttgattctgcaagacagaatctggcggcaacatttgtcaatgcattcgtgaatgctggatttggccaggataaactcatgaccgcaccatcagattcttcgggcagtggttcttctggaaactggttattcaagaacaaggaacatgggaaagctagtgcagccgctagtctgggaatgattcttctgtgggattctgattcaggacttgcccaacttgataagtacctgcacagtaatgatattcatgttgttgctggggctttgctaggtattggaattgtttcttgtggtgtgaagagtgactgcgatccggcatttgctcttatttctgagtatttcagcagggatgagtcaattatacgaattggagcaatccttggtcttggtattgcttatgctggctcccagaaagaggaggttagagagaatcttacagcttttctgagtgactcccaagtacctctggaggtcttagtcttcgctgccatctccttaggtttggtgttcgttggttcttgtaatgaagagattgcacagacaatcatatgtgtcttaatggagcatagtgagccagagcttgcagagccaattatacgcttgcttcctgttgcccttggccttctatatcttggaaagcaggaaagtgtggaggcgaccgctgaggtttctaaaacctttgatgagaagataaggaattattgtgacgtgacactgatgtcgctggcatatgctgggacagggaacgtgcttaaggttcaaaaactccttggaatctgttccgagcatcttgagaaaggtgaaacccaccaaggaccagcagttcttggaatctccctaatttccatggctgaagaattaggggcggaaatggctgtacgttcccttgaacgtcttttacagtatggcgagcagaatattagaagggcggttcctctagctctgggcttgctttgcatatccaatccaaaggtaaatgttatggacacaatgagcagactgagccatgatgcagatgcggaagtttctatggctgcaataatctccctgggcttgataggggctggtacaaacaatgcccgaatagctgggatgcttcggaacctctcaagttattattacaaagaagcaggacatctgttttgtgtgaggattgctcaaggtcttgttcaccttgggaagggtttgctgaccctttcgccatatcactctgaccggttccttctgtcccccatagcacttgctggtcttgtgacggttctgcatgcctgccttgacatgaaatccatcattctggggaagtaccattacatgctttatatccttgccctagctatgcagcctcggatgctattgactgtggatgaggatctcaagcccctctctgttccggtttgtgttggtcaagcagttgacgtcgtcggtcaggcgggtcgacccaagacaattactggattccagacgcattcaacgcctgtattacttgccgcaggggaacgagcagagctggcaactgaaaaatatcttccactgacaccagttcttgagggttttgtgatcctaagaaataacccagagtatcatgaagattaagggatagatatggcacacgcaaaatgcaggaagggcctggagtattaggaagaggcttggatcaatatctaattgtcacacaaagcaatgaacaaatagcacgatgaagacaatgcatacttgatacggtgaggactgagttgtaacaaagagttcaggtataatggggccaatatgacaggagaactttgtaagaattaggaatagaatctgtgggtgtaatggcatggccgaaaatgtttttgactataccagaatgaaaatgacccaagagtttgttgcc

SEQ ID NO: 21103 - DNA, 1263 bp, Oryza sativa
  ref <308>: DATABASE ACCESSION NUMBER: AK071401
  ref <309>: DATABASE ENTRY DATE: 2001-12-06
ggtggactgtggtctgtacctccacggctccacctcactcgtcgcagctcgagagttcgcccaagtctccccccgatccgtgcagagatcctcgtgcgtccgaggtgagcatggaggtgatgcatgataccactgggaagaaggaagtggttgtctgttatatgaacgcccctctaccgtacatgattgaagagaattacgggggatgcttctttgaagacgacgttgatcttgcacaggttctccaggaccaggaaatagtctatcaattaatacaaggaaattatggtactggttcatccaaaactcattcaaatcctagttctagttatagccatggatgtgaattgggtgaacggaaaccatcaggagttgcaagttatgaagcgcaactagttgttgatgaagctttagctcgagagctgcaacagatggaggaccaactagcaagtgcatcaattgatgaccataacataatagaacatggaagaaagccaatagcttcttcaacatctagcggtggtaatgcttctgcaagcagacctcctcaggtagtgatggaggatggcattgatccagataacatgacttacgaggaactgcaacaattaggggaagctataggtactgaaagcaaagggttgccggaagatgtgatagcgctcttgcctacttcaacatacaaaattaggatattctcaagaaaggaaaagcatgacgaatgtgtgatatgctgtatgacttacaagaaccgagataggctgactaaattgccctgtgagcatcagtaccatcaaacttgtgtcaccaaatggttgaagatcaacaaggtatgccctgtttgcaacaaggaggtttatgggtcgggcaagtgaaacattacggattcatctttcatgaaaaaggaggcaaacatgacggattcatctcacgccagttcaacaggcttaagaagtatcattgttcactggctgtgcactcattagcatgcatcatggtggcaggaaaggcaatgcattgtattgctaatgatcggaagattgtcagcgagttaccgaggaatgtctcagcaagataaataagatagatgcttctgttctgtttttaagctttatggagtcttcgagtaactgagactcttatttcagctttcaggcctggtgctttacacacactgtattgtaacatatcataggatgtatatcagtatgtgtatactgaagattagttgcatgctagcatctctgtattgcttgtactctt

SEQ ID NO: 21104 - DNA, 1022 bp, Oryza sativa
  ref <308>: DATABASE ACCESSION NUMBER: AK071402
  ref <309>: DATABASE ENTRY DATE: 2001-12-06
gcagagagctcgcaaccacaggctaatttaattagcaccagaaatatggcttcttccaagatgacgctgctccccgtcctcctcctcctcgccgcggcctcgccggcggcgctgggcgccttcgacgtgaaccagatgctcgccgacaagtcccagtacgggtcgttcctgaagttgctgacgcagacgaaggtcgcggaggagacgaaccggctcaagtcggcgtcgctgctggtcctccaagacaaggccatgaagccgatcacgtcgctccccgccgacaagcagcggatggccatggccaaccacgtcctcctcaagtacttcgaccccatccagctgggcgagatgaaggaccgcaccgccatgctccccacgctgctgtccaacaccgacaagaagctcggcgtcgtcaactacaccaaggccagcgacgggcagatgtacctgggcgcccccggcgcggcctgcgtcgccaagctcgtcaaggtcgtcgccgcgcgcccctacgccatctccatcatggaggtcagcgaggccatcctgccgcccgcgctcggtggcagcggcggccccggccggcgcgccaagggcggcaagggaaaggtcaagccgaagtccagcgacgccgacgaagccgcggccaagcccgccacggagccaaaggcaaccgatgtccctaagtaagccggtggcaaggtcgacgccgatcgacgcgctcgtccgtccacgtacaagtttggaattggatagcgcaataaccacgcacggctaggcgtaatgtgtgacgacacgtacggcgcattaccagtctagtataccatcacctttgacctgtactgctaattttcagtttaatttgtattcgatcaagtacgtgaaattgggtcgagttcgatcgatcggttgtttcatacgaaccgagttttgtactgctactaattaatgtaatggcttatggctaatgcaaatatttgcatgtatacggctgatcgatgtgcatatactgcacattatgttcc

SEQ ID NO: 21105 - DNA, 907 bp, Oryza sativa
  ref <308>: DATABASE ACCESSION NUMBER: AK071403
  ref <309>: DATABASE ENTRY DATE: 2001-12-06
ggccgccgccgccgccgtcggagaggcgctccgccgcggcgcttcgacggcgccgtggaggcgggcggcctcggcgtcgtaccaccacacgatccaggcgttgccgcgggagacggccggcccgcgcgcggcggcgcgggagcgccgcagcggccgcgtcccggccgtgctactcgccctcgccggcgccggccccggggagggggtggcccaccggaagctcctcaccgccgacaggaagcagctcggggagattctgaagcagtccccctacttcctctccacccccgtccgcctccaggtccgcgccggcgagcgatccaccgccgtcgtgcactccggcactgtcctccctatcaaggtgcatagagacgaaacaacaggaaatatattgaacttggtgctggtggaggcagatgaaggaacaatgctgaaggtgaacttgcctgtagagttcaagggggaggacgtctgccctgggttgaagaaagaaaataaggaccagcttggtgtatctctgccctgctgagcacatccctccaaaaattgaggtggacctggcaaatcttggcattggagatagggtatcaatgaatgacatccccgtccatccgtcgttgaggttactgagtaaaaacgagaccatgcctgtctgcaagatcttggcctcgaaaccagttgagtagaggaatccatgcaaatttttggagcttggtgacaatgtacccgagttggtacagcagcccagtaacttcatctccctatgtgcttgcatttggtagctgtttgccaagtcccaatgtggtaataggttcaaacaagttatcatgttcaggaccaatcttggctgtaatgtcacaaaataacaccagctttctcagtttaacatacacaagacattttgtcg

SEQ ID NO: 21106 - DNA, 1439 bp, Oryza sativa
  ref <308>: DATABASE ACCESSION NUMBER: AK071404
  ref <309>: DATABASE ENTRY DATE: 2001-12-06
gataatcaagtgcacaagtctcacacacacacactacgatcgagcaaggtggaaagaaaaaatggcgccttcacgacgtcgccgccgctgcaccgccgctcctccgaccaccgccaagctcgtgttgctcctcgtcgtgctcctgctgcaactctccgagggggcaagctccgacggcggcagcgacgcgccatgcgatttcccggcgatcttcaacttcggcgactccaactcggacaccggcgggctctcggccctcatcgccgtggtgccgccgccgttcggccggacctacttcggcatgcccgccggccggttcagcgacggccgcctcaccatcgacttcatggctcagagcctggggattcgttacctcagtgcatacctcgattcagttgggagtaacttcagtcaaggtgccaatttcgcgacggccgctgcgtcgatcagaccagcgaatggcagcatcttcgtctccggcatcagcccgatctccctggacgtgcagaccagccaattcgaacagttcatcaacagaagccagttcgtttatagcaacataggtggaatttacagggagattcttccgaaagctgagtacttctccagggcgctctacacgttcgacattggccagaacgacctgacaatgggctacttcgacaacatgagcactgagcaggtcgaggcctacgtccctgatctcatggagaggttcagtgcagccatccagaaagtgtacagcctcggagggaggtacttctgggtgcacaacacggcgccgctcggctgcctgacgtacgcggtggtgctcctgccgaagctcgccgcgccgagggacgacgccggctgctccgtcgcctacaacgcggccgcccggttcttcaacgcgaggctgcgcgagaccgtggaccggctaagggcggcgctcccggacgccgcgctcacctacgtcgacgtctactccgccaagtacaggctcatcagccaggccaagcagctcggattcggggacccgctgctggtgtgctgcgggtacggcggcggcgagtacaacttcgacagggacatccggtgcggcgggaaggtggaggtgaacggcacgtcggtgctggcggggaagtcgtgcgacgacccgtcgaggagcgtgagctgggacggggtgcacttcacggaggcggcgaacaggttcgtcttcgagctgatcgtcggcggcaagctctccgacccgccggtgccgctcaggcaggcgtgccgccggggcggcggagggcgatgagctctactgttttcccggtgcaatgcaaggctgttgcatagcacttcacgtgcagattggtaataaagcaaacgggattgctatatgtcactcgaatgaaatttggggataaaatatggtacaatagttctaagttaaagtgatatcactgagcgttttg

SEQ ID NO: 21107 - DNA, 3375 bp, Oryza sativa
  ref <308>: DATABASE ACCESSION NUMBER: AK071405
  ref <309>: DATABASE ENTRY DATE: 2001-12-06
ggatagttgattcatgacgataatgataaataagaatccaaatcgcatctccgaccctaatcctaatcgctgcccgccgccgccgctgattctcgcccgcccacgtcgccagcgacgtctgcctcgccggtctcagtgccaccgccggaacacccacgcccgcgcctcgaatccccgcctggtcgtctctcccctctccctcgcgtcccccgcctcccctcgccgcactaccctatcccctctccctcgcgtcccccgcctcccctcaccgctgcctccgtcagatctgccccgcacgagccgccagcgacgcccgcctccttcgcgccctgggagcagtaccaacggcgggttcgggggtcagcgccggcttgatcgaggcgtggcccgtgctgaccaacggcgtcgccgccgccgccgctatcatcaccggcaccgacctcaccgagagccgtcacgtcgtcagatcctcctccaccgctgtccatctgccaacccctacgcacccaccgccgccatctccgaaagtcccggcgctgatcttcggtcaacgtcgtgactttcaaccccgcagccgatcgcaggaagaggcctcaccacttggcagtgccccgatctgttctgcgtccgctgacggcgtgaacgcgggcgagtttggtctacggctaggctgcagaattaaggctacagccatcctgggtttttttaagtgctgcacttctatatatatatctaggttcaatatatcaagagggtggaacctaattgataagtgtgcaccagatcgtggtcagactaattcacgagtctacctaccccacccctcttgttgccgccgcctctccatcctctcacgggccatgggttctgttgccggcgacgccgcccgcctttcttatccacccactcgccgtgacaattccgtcgtcgacatgtaccatggcgtccctgtcgccgacccttaccgttggctggaggacccagagtcggaagataccaaagaatttgtggcaagtcaggtggagctagcagagtctgtgcttgcgggctgcttcgacagggagaaccttcgccgtgaggtcactcgcctcttcgaccacccgcgccacggggcgccgttccgtcgcggcaacaagtacttctactttcacaactccggactccaagcccagagcgtgctctacgtgcaggatagtttggatggagaggcggaggttcttctggatccaaatgcactaagcaaggatgggacagttgctctttcgacgtattctgttagcaaggatggcaaatacatagcttatggcctaagtgaaagtggcagtgattgggtcactattcgtgtgatgaacattgctgataagcagactttgtctgacaaattgtcttgggtgaaattctcatctatcagttggacccatgatggaaaaggttttttctatggtcggtaccctgcaccccgagaagtggaattggatgctggaactgaaacaaacattaatcttaatcatgagatatattaccatgtcgtgggatctgatcagtccgaagatatattatgctggaaagatcctgaacaccctaagtattcctttggtgcatcggtcacagaggatggaaagtacatcatactaggtacttatgaaggttgcgatcctgtcaataagctatactactgtgaaatttgtactcttcctcaagggatagaggggttcaaagagacaaaggggatgcttccatttgtcaagcttatagataactttgatgcccaatatcatgttgtggcaaatgatggtgatgaatttacatttttgaccaatagaaatgctcctaagaacaagcttgtaagagtagatatcaagaagccagaattgtggactgatattcttcctgaacatgaaagagatgtgctcgaatcagctgacgcggttaatggtaaccagttattggtatgttatatgtcagatgttaagcatattctgcagataagagaccttgtaactgggaacttgcttcataagttgcctctagaaattggttctgtttcagagatctcctgtagacgggaagacatggacgtctttattggcttcacaagctttctttcccctggtattatttacaggtgtaacctcacatctgcgatcccagaaatgaagatatttcgtgaaatttcagttcctggatttgatcgaacaaattttgaggttaagcagattttcgtcaatagtaaggatggaaccaaaattcctatgttcataatgtcaaagagagatattgaacttgatggatcacatccaactttgctatatggttatggtggattcaacataagtcttactccttctttcagtgttagtcgtgttgttttatgcaagaacatgggttttgttgtctgtgttgcaaatattcggggtggtggggaatatggggaagagtggcacaaagctggagcacgtgcaatgaaacaaaattgttttgacgacttcattgcttgtgctgaactcctcatttctgctggttatacgagttacaggcagttatgtattgaaggtggaagcaatggtggtcttctgattgctgcttgcgttaatcagcggcctgatctctttgggtgtgctcttgctcatgttggtgttatggacatgctccgttttcacaagttcaccattggtcatgcctggactaccgactatggttgttcagacaatgaagaggaattccactggcttatcaaatattccccccttcataatgtgaggagaccttgggagcaaagttttgttaactgttgtcagtacccagcaatcatgctgttgactgctgatcatgatgatcgtgttgtgccattgcactcattgaagttgttagcaacactgcagtatgtcttgtgcactagcattgaggatacaccacaggtcaatccaataattggtcgcattgacgtcaagtcagggcatggagctggcagaccaactaaaaaaatgattgatgaggttgctgatcggtatagcttcatggcgaacatgttagatgcgtcatggacggagtgattcattttgtcctgcataagttggagatggtgagcgttgggcacgtgcaacggtgcaagacaggccctttcaaacaaatgacctgtgcaagaactttgtaggatttttgtttgaccatttggaacgaaggactggagcactaaaaatcttttgggatttctttggaatggcccaatgtatgaagatttgagatgaaagttagcatgaggtgtaacctgttagaaaatttctctcttgaatttctaagttttttctgtggtctgttttacaatcctccaatttacacttccattttatatcaaaatcatacgtttacgtttcc

SEQ ID NO: 21108 - DNA, 3895 bp, Oryza sativa
  ref <308>: DATABASE ACCESSION NUMBER: AK071406
  ref <309>: DATABASE ENTRY DATE: 2001-12-06
gagccggatggataggtagcctcttctccctcctcacgccggagttttccccgcacgcacccacaccaaaccaaactctactcgatctccacggccgtacacgatttcccctccctggagccagcgcgatgggggcggaggcggaggaatcgctagatcatcctggatctctgtcggggatgtcgccggcgacccccgacgttgcctggaagccggcggagcggcggcggcggcggtcggaggccgacgcggaggggtcttcttgctgctccctttccgctgctacggcggcgtgggttggcgccggtaatgtggagagtgacgacccgtctgttcgttcggtcgccgccggggagcaatcccgctccgtgtctcggccggaggaggaggaggaggaatgcgcgtcatgtacccaggattccaccgtctctccgccggtgagcgaatgcggcgacaggactgcgcagcaggaacccagcacccaggagtacaccgtctcgccaccgccggtgagtgagtgtggcgacaaagttgtgcagcaggaatccagcaatcaggagtccaccgtctcgccaccaccggtgagcgaatgcggtgataagattgcgcagcagggatccagcactcgggagtccaccgtcttgctgccggtgagtgagtgctgcaacaaggttgcccagcaggaatccagcacccaggagtccaccgtctcgctgccggtgatcgaatgcggcgacaaggtcgcgcagcaggaatccagcacccaggagtcgaccgtgtcactgccgtcgagcgagtgtggagacaaggttgcgcagcaggaatccagcacccaggagtccaccgtgtcgctgccgttgagcgagtgcggagacaaggttgcgcagcaggaatccagcacccaggagtccactgtctcgccgccggtcagtgaatgtggcgacaagattgcacggcaggaaggtgctgccagtgcgatccctacgccggagaaagtggaggctacccctaggagacccaggaagaggtcaacgaaggggttgactcgattcaagattatgaaagatcacaaggcggcccagagaacggcaacacccgttgaagttaagatcaagaggaaagctaaggataatggtaggcggccacttggtgataaatcagtgaggaggaagttgaattttgaaggcgatgcggtggactttgaaggcaatagggagttcagcagagccaagctgatggaggatttgaggtgccttgccaaggttcatggtctgcgcgatgatctgggtgcaggcaagcgaagcaagaaagggaagaaaagaaaaaagatgactggagaacatcaggacaatggcgaatcggcccttgtgccttaccagaaggccccagctgccacatcatcatctgcgctggttccaattcagaattctacgcaacttgctattgtacaccacagaaatcacttgaagaacttgcggacaaaggttttaggccttgatgagaagacattacaagtataatgttctgaggaagtgggatgagactgatagtgagagtttcgaaggtgtagacattggcagcgggcctgaatggaatgaaactcggcgtcacttcgaacattacgtggatgtgtttattgctactgtgcatggtttattgggtcccagaagattttctgaatggggaggatcagtaactgattctgttgtgggtactttccttacgcaaaatgtcgctgacaatttatcaagcaatgcttttttgaacctggtggcaaaatttcctccaactaagagacatattaatgctgaagcatgttcaaatttgtctctgttgatagatgacatgagacggaaattgaatttgaatgaacaatctaatggtactgattctggtagttcagattttacaaaacctgtcgattttgagaaagagaatggttacaatgaggaggtaaaaggtaattatggccgagactacagtacaattatagagaattttatatctattattgagaaacatcataaagacatgtctacgtgggacaatgcacgccttgagaacatggtgaaggataagtctggaactccagtatgttcccatagaaccttgagaaagtttatggacacatttgaggagaaagacacttctcattgggataagttacgggaggaagcatatagtaagggatacaaaataaagggaaccggaataagtgattctgctgattgggaagctgtgctacatgcaccagcagttgagattgcaaattccattgcagtcaggggacaacattatgttatagcattgcggatacaggcttttctcaagcgtgtaaagaaagatcatggaaattttgacctggattggcttagatatgtaccacgtgaaagtgcaaaaaattacctcatcagtattctggggcttggagataaaagtgttgactgcatccgtcttttgtcattaaagcataaaggtttcccggttgatgtcaatgtagctcgcatagtcacaaggctaggatgggtcaaacttcaacccttacccttttctgcagagttccatttagttggcttgtatccaatcatgcgtgatgtgcagaaatatttatggcctcggttgtgtaccatttctaaggaaaaattgtatgaactacactgcctcatgataacttttggaaaggcaatctgcacaaaagtaagtccaaattgcagggcttgccctttcagtgcgaaatgcaaatactacaacagttcacttgccagattatcactccctcctgcagaggggcatgggcatgaatatggtgaagagcaagcaagcactgctactcctggaagactcttgttgtcaaatgatagccacatagcaggttttcaacaagtatgtcaaccgcaaatcaaaataaacatgcctgctggaagagaatccatctataagtgtgagcccattattgagatacctccaagtccagaacatgaatatgaagaatcaccttatgagcaagaattatatgaagatgatctttgtgatattgaagataccataccagaattacagtatgattttgaaatagatctgtgttcactaaagcacacggtgaataatggctcttggacaccaaactctggaaaagacttggccttgattaattcacagcatgcctctgttcaaaacaaaaggttgaaaaacatagggcgtcttagaacagaacacaacgcgtacgtcctcccagatgatcatgcaatcttggaagagtttgaagatagagttccagaagatccatgtccttatcttctagttgttatttcttgttctgatgaacacacagtgaaaggcacaattctgataccctgtcggacagcaaccagaggaaactttccattgaatggtacctactttcaggatcatgaggtttttgcagatcattcatctagccgttccccgattaccatccctagagaatgcatctggaacctagatagatgcattgtatattttggctcgtcgatacaatcgatcatgaaaggtcaaacaaggcaagacattgaggactgctacaagaaaggatatatttgtgttagaggatttgatcggaatacaagatacccaaagccaatatgtgcaaaattacacgccaccaatgaaaggaacggaacaggtgaaaatagccggaagaagaaaaagacatcacaagaggggaagaagattgatgacaaatcttcctttggcaaattagaaattaactgatatatatatatcaccattaacaaagttgtgtacaaattgtagttggaaggatgctgatagcctctgctagctctagtgtatcatgtagatcagtagatttgcttagggcggctgcatgagtaaatatttggttgagatctcttcc

SEQ ID NO: 21109 - DNA, 1464 bp, Oryza sativa
  ref <308>: DATABASE ACCESSION NUMBER: AK071407
  ref <309>: DATABASE ENTRY DATE: 2001-12-06
gatttcctccccccatcttcgcaacatacagtactcaccatcttttggtggctctctcactctcctctctctctccctagaacagaaacccaaacaaaacggggcgaggtagtagctagggggaaaaagggagaagttttcggtttaaaaggagagaacggcccggccggaagtggtggaaggcgaggaggaggagaacacggtgagatcaggagagaggagataccggccggcggaggcggcggcgcggcggcgcagggatagcgggaaaaaagatcgcgcctaaaaagggcgaggaggatggcgtcatcgtcagcgtcgtccgtgccggcgccgtcggggtcggtgatcaccatagcgtcggcgtcggcgtcggcggcggcgaacacggcggcgtgcggcacggggtcgccgtgcgcggcgtgcaagttcctccgccgcaagtgccagcccgactgcgtgttcgcgccctacttcccgccggacaacccgcagaagttcgtccacgtgcaccgcgtcttcggcgcgagcaacgtgaccaagctgctgaacgagctgcacccctaccagcgcgaggacgccgtgaactcgctcgcctacgaggccgacatgcgcctccgcgaccccgtctacggctgcgtcgccatcatctccatcctccagcgcaacctccgccagctccagcaggacctcgcccgcgccaagttcgagctctccaagtaccagcaggcggcggctgcggcggcggcggcttccgcgtcgacggggacgaataacgggccgcactcgatggcggagttcatcggcaacgcggtgccgaacggcgcgcagagcttcatcaacgtcgggcactcggcggcgctcgcctccgtcggtggcgcggcggcgtgcttcgggcaagagcagcagttctcggccgtccacatgctgtcgaggagctacgaaggggagcccatcgcgaggctcggcggcaacggcggctacgagttcgggtactcgacgtcgatggccggcggcgggcatatgtccgggctcggcgcgctcggcggcgcgccgttcttgaagtccggcatcgccggcagcgacgagaggcaaggcgccggccagtagttgggagcgcttgattcggcggttgttgtgttcgtctctgcatgtcaggttactgactaggaaattaaaattccctaagttctggaaattgaagcggtgaaaaggatcgtaaattaaggctcatgcttaggaggattgctcggtctattttacatgaagatcatgcgtgttcactctgttattttgccttgtcaatgcttatctttttctttcaatcgatcatccgcaatgtcgaacattttatttgtgccttgatctgttgctgggattgttgctgtactgtgtgcatgcttgtccctgattttagcacttggacggctaccttaattaatactactatattgatactgctcc

SEQ ID NO: 21110 - DNA, 1262 bp, Oryza sativa
  ref <308>: DATABASE ACCESSION NUMBER: AK071408
  ref <309>: DATABASE ENTRY DATE: 2001-12-06
gacttcgttcttagcccaaaaacacacaacactctcagtggccactgcccctcgtccactagttcgatcgatcgccgccgccatgtcgtcgtcatcaacatcctctgccagcaacaacggcatcccttcgcgctcgtcgtcgtcggcgatcgtggtgagcgggtgccatgtcctcaagatcgacggctactcgcacaccaaggagatgctctcccaaggcgactgctccagatcgtgcacctttcgcgtcggaacgcattcttggtacctcgagtactaccccaacggcagatccttgcacaacgccagcgaccacatagccatctgcctcgtccgcgacgacgacgacggcggcgaccttggatacggcggcgccgcgcgcgagcagatgacggctcggttccacctgctcgaccaccacgccgggaagccggtgcccgggcacacccgcggcgtcacgtcgccgctgctgagcggcaaggtgtgggcgtgctccaacttggtcacgaggaaggagctggaggagcacgtcctcgacggcgactgctttgcggtcaggtgcgacatcaccatcgtcaaggttccccgtcgtgctgcaccggcaccggcggtcgtcgtcgacgtgccgccggctgctgcagcagctgctccggatctgccaagccagatgggcgccctcctcctgagcatggagggcgcggatgtgacgctccaggtgggcggcggcgaggtcgagacgacgacgttcgcggcgcaccggtgcgtgctcgccgcccggtcgtcggtgttcaggtcggagctcttcggcgccaccgccacctccaaagccggcagcggcgggctcgtgcacgtcgtcgacgacggcatcggcgcgcgggccttcgaggctctgctccgcttcatatacacggacgcgccgccggagctcgacgaagaagacgacgacgcctcctccatggctcggctcctcctcggcgcggcggatcggtacaacgtggagcggctgaagatgatctgcgagaacgagctgtgcaagcggatcgacgtgaacaccgtcgcgaccacgctggctttggctgagcagcatcactgctctagcctgaagaaagcgtgcatggacctcgtcgacgccaacccgagagcggtcgaggcggccggtggcttcgagtatctgtccaacaagtgcccgtctatcttgagggagctaatcgcgaggcttgctgactttgatttgaagaacgatgggtaaatttcgcaaaatt

SEQ ID NO: 21111 - DNA, 1912 bp, Oryza sativa
  ref <308>: DATABASE ACCESSION NUMBER: AK071409
  ref <309>: DATABASE ENTRY DATE: 2001-12-06
gactaataatctccccaagattggatcatactctcatctcatcatagtctccgcccatccgccatcgctcgcagatctctctcgctctcgctctagctctcgctcgaggaggagatggcggagatcgtggtggcgccgcgggcgccggcgccggcggggaggtggggcgccgcgccgccgcaggagctggtcgagaggctcaaggactacggccaggagggcgccttcgcgctctgggacgagctcgcccccgaggagcgcgacttcctcgtccgggacatcgagagcctagatcttgctaggattgaccggatcgtccgatgctcgctcagatcacaaggtgttcctttgccagccgtcgagcctgtgccggagtcgagtgtctcgaccgtcgaagatagaactcctgaggacaagcagaggtggtggaagaggggcttgaaagccatttcagaggggaaattggctgttgtccttttggctggtggtcagggaacaaggcttggcagttctgatcctaagggatgcttcagcatcgggcttccatctggaaagtcacttttccaacttcaagctgaacgaattttgtgcatacagaagctggctgctcagtccactgatggtactccacaaatacactggtatataatgactagcccctttactgatgaagcgactcgaaaattttttgaaagccacagatattttggcttagagcctgaccaagtaacatttttccagcaaggtactatcccatgtgtctcagctgatggaaggtttattatggaaacaccatacaaggtagcaagggctcctgatggcaatggtggagtgtatgctgctctaaaatctcaaaggttgctggacgatatggctggaagaggtgtgaaatatgtagattgctatggagttgacaatgtattggtccgtgttgctgatccaacattcctaggatatttcattgacaagggcgtgtctgctgctgcaaaggtcgtaaggaaggcatatccacaggagaaagttggagtgtttgttcagcgtggcaggggtgggcctctttctgtagttgagtacagtgaaatggatgcagctatgactactgaaataaatcaaggcacagggcgccttcgttattgttggagcaatgtatgcctgcatatgtttactttggattttcttaatcaagtaacaaatagtcttgaaaaggacagcatttaccatttagcagagaagaagattccttcaatccatgggtacacggcaggcttaaagcttgaacagtttatatttgacgtgttcacctattctccatcaacagctctttttgagattttgagggaggaggaatttgcaccagtaaagaatgctaatggtgcaacttatgatactcctgatagtgccagattaatgctgctccgccttcacagccgatgggtggtagctgcaggtggctttttgactcattccgtgcccttgtatatgacaggtgttgaagtttctccacttagctcttatgcgggagagaacctggaagccatatgccgtggacggacattccatgcaccgagtgagatttcattttaggaatagtgtctgtcgaaagcaacagtctcagacccagctaaaaagcatctgtctcaagaagagaatggcaggatccctcaattttcattgggacatgagatgagatagttggacttgagctcttgcagttagaatgttgatattagtcagcttgttgtaatgccagtaattgtaattcaacaattggagttggctccctttccatgtaccatttttgtgctgctcaaatgtagatgatcaaacaatggctaaatcttctgtaaaaaataatacatctctgtaagactggtctatgcacaattgttaattcaacgtgctctaaagtgag

SEQ ID NO: 21112 - DNA, 1259 bp, Oryza sativa
  ref <308>: DATABASE ACCESSION NUMBER: AK071410
  ref <309>: DATABASE ENTRY DATE: 2001-12-06
gatcccatctccaagtccaacgcagcagctcgccccgcacagcgcagagcgcactcgcacagatcggatccgttgctttgagcctctgacccctccctcccctgcggtggccatggccgatcgcctcgagctccagggcaggcacggcaagtcccgcgtccgcgtctcccgcgtctggcgccgccccgcggccgcgggaggccacgtcatcgtcgagtggaacgtggccgtcagcgtcgtctccgactgcctcccctcctacacctccgacgacaactccgccatcgtcgccaccgattccatcaagaacaccgtgtatgtgaaggccaaggaatgcacggagattgtctccatggaggaattcgcggtgattcttggaaggcatttcacctcgctgtacccgcaggtctcagaggcaacggtgaccatcgccgagcgtccatgggagcgtgtggttgtcgatgggaagcctcattcccacgggttcaaacttggtgttgagaagcacgtcacagaggtcattgtgaagaagtctggaaacttgctcataaattctggaatccaaggatactccctgctaaagacaactcagtccgggttcgaaaaatttgtgagggatcgctacacacttcttcctgatacaagagaaaggattgtagcaacagaagtaactgcctggtggaggtatccttttgagcatgtttcccagattccatcaaagtcattctgcttcacacaaaggtatcaggacgtaaagaaagttcttgcagatacgttctttggtcctcctgatgttggagtgtatagtccatcagtgcaggatacactatacctgatggctaaggaagttctcaacaggttcccggatatagcatctgttcagctaaggatgccgaacctccactttatccctgttaacttagggaacaaagaaaatccaggattagtgaagtttgctgatgatgtgtacctgccgaccgatgaaccacacgggaccattgaagcaacagtgagccgccccaagtcaaagttgtaaaagcaatcaatggtactggggaagctctcggtctggtttctgaggaaaaaagaaggaactgtgtaacaatcacatgggaaggggaaataaataaataatgttcagaaatgaattgtacatggccagctatagttacgccattgtaaatcttgtactgccttattgtatggaacctcaaatgtacaacctccgttttttaatagatgacgcttgactttttccc

SEQ ID NO: 21113 - DNA, 2663 bp, Oryza sativa
  ref <308>: DATABASE ACCESSION NUMBER: AK071411
  ref <309>: DATABASE ENTRY DATE: 2001-12-06
gttattatcaatctatttgctggagtatcacactaccaggcttcttcttgtctttttctttttacaaatttactctgtgtctttgttcaacctgaagaaaaataagtaattcctgtcacttttgtaggtgggccgtttgctctttattcactgctttgcaggcatgcgaaacttagttttcttccaaatcaacaatcagcagatgaagagctatcgacatactacagaaatggttttacttcacgtcatggatctttaccttggctaagaaggttcatggagaagcacaagaatgccagaaccgtgcttctcctcatagttctgtgcggtgctagcatgatgattggtgatggtatccttactccagcaatctcagttctgtcatctatgtctggattgaaagttcgagctactggtttacatgatcgttctgttgtactcctttcatgcattgtgttggttggtctatttgcattgcaacaccgaggtactcagaaggtagcgttcatgtttgcaccaattgtcgtcatctggctcttttgcattggtggaattggtttatacaacataatacattggaacccaaggatataccaagctctctctccatattatattgttaagttctttaggacgacaggtaaagatggttggattgctctaggaggcatacttctttctatgacaggctgtgaagctatgtttgccgaccttggtcacttcacgagtgcatctgtcaggctagcttttatcaccatcatatacccatgtcttatattacaatatatgggtcaggcggcatttctgtcaaaaaatatccttgacatgcccacaggtttttatgattctatcccaggacctatattttggcctgtgtttgtggtggccactctcgctgctgttgttggtagccaagctgtcatttcagcaacattctctattgtgaagcagtgccattcgttgggatgtttccctcgagtgaaggttgtccacacatcaaggtggatctatggacagatatacattcctgaaataaattggatccttatggtgctctgtgtagctgtcacagttgcattccgtgatattacacttattggtaatgcctatggtgttgcgtgcatgactgttatgtttgtcactacattcttgatggcattgatcatgatcttcgtttggcaaaagaacataatatttgctctatctttctttttattattcggatccgttgaagttgtttatctctcctcatccctcatgaaggttactcagggaggatgggtgccgcttgtgcttgctttaatattcatgtctgtcatgtatatttggcactatgggacaaggaagaagtaccagtatgatcttcagaataaggtatcaatgagatatatcctgtccctgggtccaagccttgacgtagttcgtgtcccaggaattggtctgatttacacagaactggtgactggtgtacccaacatcttcacacatttcactactaatctccctgcctttcatgaagtcctagtctttctttgtgtcaagtcagtaccagtaccatatgtgtcgccagatgaacgataccttgtgggcaggattggacctagagcatatcggatgtaccgctgcattgttaggtatggttacaaagatgttcagagagatgatgacaattttgagaacatgttagttatgaacattgggaagttcattatgatggaagctgaggatgcatcttcttcagcaagttatgatactgctaatgaaggacgaatggccgtcataacaacatctgatgactatgactctccactagctgtgagagattccaatgacctagctgactccatgacgatgaggagcactaaatcagagagtcttcgaagcttgcaatcctcttatgagcaggaatcacctaatgtgagccggaggcgacgtgttcgctttgagctgccagaggaggatgacatggatcaacaggttaaagatgagctgttagcacttgtggaggcaaaacatacaggggtaacctacgtcatggggcatgtctatatcaaagctaggaagaactctagtttttttaagagatttgcaattgatgttggctactctttcctccggaagaactgcagaggtccatcggtcacactgcacattccacatattagtctgatagaagttggaatggcgtaccaagtgtagcgcgatgctcatcgcaggtcacgacgtcacgtggatacccggtagcaacaaatcatgtgctacctgtggccgcctttttggagtcgaggctttgattcctatgctttatccatgcgttttcagtttcagttggtacagatgaagaggctctctatgttaatatgatcatttagctcaaataaagcatcagatctaatgatcgtagtttgctcttcccttttggtatatttacatgcatgctctgtaatttttatgggagctatgtaatggaaatatgcgtccccgtttttattgcagctatgtaatggaaatatgcgttctcgtagctgatatatcccaatttttgttaggaagcgattaccacatatattctttcatgtatgaatttcttatggaacagaacatctgtagatatacagtgcctcgtggaatttctctgcaaataaaccagatactagataact

SEQ ID NO: 21114 - DNA, 642 bp, Oryza sativa
  ref <308>: DATABASE ACCESSION NUMBER: AK071412
  ref <309>: DATABASE ENTRY DATE: 2001-12-06
gggcgaacagcggtggaggagaggcagcaccgatgaagatggatgtagggagccatccccctagcatcggcggccctgcaaaaggccagcggagaagcgatgaagaggaggttcatcccctagtcgatgactgagtttatggccatgcagaggggatggggccgacaggggtcggtggtggccggtgggggtggggggagggggcgtccttcctgtgtagctcctaacaagatattgtgaacatcgacacgggtggaagttgcagaaaggcaatggcccctacgtggatctggaagtggcgttactcctgttcatcagtgactatgggtgatgaaggcttgggcagcagcagttacccgccttggtggagtagaaaggaattgcaccatcccggcgtggatttggaacagtcgacgaccaccggagaggaggaataaactagatctggattgatacattttcgcaatttttttatgttccagccaatatatttggatttttcttcgtgttgaatcgaagtattgcaatggatactttgatggtgtttcatatttcttgcatatttgggatgtttcaacgggttgaagtttgatgtttcatccatgaaaatgaaatgtttcaatggtatttcaactatgtttc

SEQ ID NO: 21115 - DNA, 1568 bp, Oryza sativa
  ref <308>: DATABASE ACCESSION NUMBER: AK071413
  ref <309>: DATABASE ENTRY DATE: 2001-12-06
gaattccccgagcttttcctcccatcttccccgcagatcaaacgccccccaaaaccctaggccccccttctcctccgacgccggctacagtctccgacccctccggcgcaatcgcggaatcggaggcggcgggcggcgccatggacaacgccctcgcgagcgccgcggcgatcgccgaccagcgccagaagatcgagcagtaccgccacatcctctcctccgtcctctcgttttccccgccggacatctcgcaggcgaagcgcttcctcgaccacatggtttccgacgaggtgccgctcgtggtgtcgcggcagctgctgcagacgttcgcccaggagcttgggaggttggagccagaggctcagaaggaggtcgcgcactacgcgctcacgcagatccagcctcgtgtggtctccttcgaggagcaggtggtagtgattagagagaagcttgcagaactgtatgagtctgaacaacaatggtcaaaagctgcacagatgcttagtgggattgacttggactcagggatcaggatgctggatgacacaaacaaattatccaaatgtgtccagattgcacgactttatttagaggatgatgattctgttaatgctgaagcttttattaacaaagcttcatttttggtaacaaacagtcaccaagaacttctgaacttacagtacaaggtatgctacgctagaattttggatctgaagagaagattcttggaagctgcacttcgatactatgacatctctcagattgaacaacgccaaattggtgacgaagagatcgatgaaaatgctttggagcaagctcttagtgctgctgtgacatgcacaatattggctggtgctggtccgcaacgatctcgtgttcttgctacattgtacaaggatgagagatgctcaaagttgaagatatacccaatactgcagaaggtctttcttgaaaggattttgaggaaaccagaaattgaagcatttgcagaggagctgagaccgcatcaaaaagctctgttaccagataagtctactgtgcttgaccgggcaatgattgagcataacctccttagtgccagtaaactttacactaatatcagctttgatgagcttggagcattattgggcattgaccctaggaaggctgagaagatagcatcgcgaatgatttatgaagataggatgcgaggttcaattgatcaggttgaagctgtgatacattttgaggatgacactgaagagctgcagcagtgggaccaacagattgcgggactgtgccaagcgctgaacgacattctggacagcatgtcaagcaagggaatggctattcctgtgtgagctcttcaagttgcttcgatggtactcgtgagaactgtggtcacggcgtcaggcctcacggacattttgtacagatgttcgcagctgcgagtaccagtcatgtttcggaacgaattttggccacaattagtcggtgatcggtacatgtgaagttgtgaactgctggatagattaaggcagtggcgccgtaatggcattatatcacaaaccaaaattgatcgtgatagc

SEQ ID NO: 21116 - DNA, 1688 bp, Oryza sativa
  ref <308>: DATABASE ACCESSION NUMBER: AK071414
  ref <309>: DATABASE ENTRY DATE: 2001-12-06
ggcctccccccgcgtcgggcaaggccaccgggggcggcaagatcaccgatgagttcacgggcgctggcgccgtcgggcaggtgtgccaggtgattggcgccgtcgtggacgtgcggttcgacgagggcctgcccccgatcctgaccgcgctggaggtgctcgaccacaacatccgcctcgtgctcggggtggcgcagcatctcggggagaacatggtgcgcaccatcgccatggacgggaccgaggggctcgttcgcggccagcgcgtgctcaacaccggctctcccatcactgttcctgttggtagggccacacttgggcgtattatgaatgtcatcggtgagcctattgatgagaagggagatatcacaacaaaccacttcctccctatccatcgtgaagcccctgcttttgttgagcaagctacagagcaacagattcttgttactggaattaaggtcgtggatctccttgcaccctatcaaagaggtggtaaaattggtctcttcggtggtgctggggtgggcaaaactgtacttattatggagttgatcaacaatgttgcgaaggctcatggtggtttctctgtctttgctggtgttggagaacgtactcgtgagggtaatgacttgtacagggaaatgattgagagtggtgtgattaagcttggtgacaagcagagtgagagcaagtgtgctcttgtctacgggcaaatgaatgagcccccgggtgctcgtgctcgtgttggactgactggtttgactgttgccgagcatttccgtgatgctgaagggcaggatgtgcttctcttcattgataacattttccgtttcactcaggcaaactccgaggtgtctgccctgcttggacgtatcccatctgctgtgggataccagccaacccttgctactgatcttggaggactgcaggagcggattaccaccacaaagaagggttctatcacatctgttcaagctatttatgtgcctgctgatgacttgacagatcctgcccctgctactacatttgcccatcttgatgctactactgtgttgtcacgacagatttctgagcttggtatttatcctgctgtcgatcctttggattccacatccagaatgttgtctccccatgtactgggtgaggaccactacaacacagctcgtggtgttcagaaggttcttcagaattacaagaatcttcaagatattattgccattctgggaatggacgagctcagtgaggatgataagttgacagtcgctcgtgctaggaagattcagcggttccttagccagcccttccacgttgccgaagttttcacgggtgcacctggaaagtatgttgagctgaaggagagcgttcaaagtttccagggtgtattggacgggaagtatgatgaccttcctgagcagtcattctacatggttggaggaatcgatgaggtcattgccaaggcagagaagattgccaaggagtccgcttcataagcgatgcaatttttaacatttggaggtcaacatgttgtgccttttatgtttgttagccaggacatgtacttacatgcaggaggcccggccctgctgatcgatgtttttcccctccacttttttccaaataaggatttgcagtgacctatttgtttggcttactgcccttcaaggaagaattgagttctctttttgtgt

SEQ ID NO: 21117 - DNA, 2629 bp, Oryza sativa
  ref <308>: DATABASE ACCESSION NUMBER: AK071415
  ref <309>: DATABASE ENTRY DATE: 2001-12-06
gcatgactacttgggagcttcctcatgggtatggccgtgttaaacctgatgttgttgcgtatagtcgtgatataatgggttcaaagatcagcacaggttgtaaaaccctttcaggcaccagtgttgcaagcccggtggttgctggtgtagtatgcttgcttgttagtgttataccagaggagcatcggaaatccatccttaaccctgcaacaatgaaacaagcccttgtagagggtgcttctaggctttcaggaccaaacatgtatgagcagggcgctggcaagattgacctctggcaatcatacgaaatcttgaaaagttaccaaccgcgtgcaagcatctttcctaatacccttgacttcactgattgtccctatttctggcctttttgccgccaacctctgtatgctggagctatgccagtggtcttcaatgctacaattctgaacgggatgggggtgattggttatgttaaggatcctcctgtatggcagccctctgaggatgtcggcaatattcttagtgttcacttcacctactcagatgtcatatggccttggacaggttatcttgccctgcacttacaagttaaagatgaaggatctcagttttcaggcataatcagtggcaaggtcacattgtcaatttacagcccagcagcccatggggaaagcagtccacgaagtagttcatgtgttctttacctgaaggtcaaggtggtgccaacacctgttaggtccagaagaatattgtgggaccaatttcataatatcaaatacccatctggttttgttccaagagattcacttaatgtgcataatgatatccttgactggcatggcgatcacttgcacacgaattttcatatactgttcaacatgctgagagatgcaggatactacattgagacccttggatctccacttacctgctttgatgctagcaattatgggacactgcttatggttgaccttgaggatgagtacttcagtgaggagattcagaaacttaaggatgatgttgtacacaaagggcttggcgttgttgtttttgcagagtggtatcatgtcgacacaatggttaagatgacattctttgatgaaaatacacgcagttggtggactccaattactgggggtgcaaatgttcctgcacttaatgaacttttggcaccatttggcattgcttttggggacaaagtactaagtggtgacttctcaatcaatggtgagcagacccactatgcttctgggactgatatagtgcaattcccagcaggaggttttttgcatagcttccaactccaggacaactctaaaatttctcaggataactcaagaagcgcagatacacaaaataccccagataaaagcaagctctcttctattcttggaatgatggaagcaggcaaaggtcgggttgcagtctatggagattcaaattgccttgacagtagtcacatggtaacaaactgctattggcttttgagaaaacttgtggagttcactggcaatagaatcaaagatcctgttcttttctcagaatctgctcagttaaaatttccagtttttgagagcatccatcaactgtcacgtagaccagatgtgaacttctcaacatattcaactgtcgttggcaatgaattgatctgtcaccaggattcccgatttgaggtttggggaacgaaaggttatggtacccaacaaacaggcacaacaagaaagttgccagagtaccagaaaagtgaagcttacaacatttcaacaccaatagcttctgacagcacaccagatgaagctggcctgcaaagaaatatttcaacaccaatagcttctaagtttgataaaagaatggactattttggttttctcgggcacgaagagattgacataggaatgctagtggcaagccaatggatggtaccttgctttgctgctactgcctgccttatgttgtacctaagttgcagagtgcaacaaaagcgccgacgacgaaagaaggggtcaacagctgctagattgtcaagtatggaccgtatggtctaacatgacatacacacactgttgggggccaggatgaatatatgaatttcggcactcgcattgcaaaccttcatgggaatatacagttcgctccatatacaacagagtggacaggacgtggtgagcttgagttataccggaatttccagatcctgttttcagctcgcaacgggaggcctcttgtcttgaggcacaatttttgcaccgtgactggaggcacatggctcattttttttctgagcaaggagctgattcagctgttcggcagcagcatggagaggtatttccacttcaatttcagatggtgcgtattgacatgatgttgtttgtagttcgtcaattttgccaatgtaataatacgttaattttgacgcacgatcactgagctaattcctttaggaagggactagagctaactatttcattctttgttacctttttactccggatgtctgaaagtgaagggtttcgatcgtctctgtagatcggttagcttgagctgcttgtaagtatagaagaggaaaaggctgtttctttgttacctttttactccggatgccagcaagtcattttcaagttatttctcc

SEQ ID NO: 21118 - DNA, 875 bp, Oryza sativa
  ref <308>: DATABASE ACCESSION NUMBER: AK071416
  ref <309>: DATABASE ENTRY DATE: 2001-12-06
ttggtgccaagttgtgtgtgtgtaccgcggcatggcggaccagctcatctccacggcagaccacgacacgctgccgggcaactacgtgcgccccgaggcgcagcgcccgcgcctcgccgacgtgctctccgacgcctccatccccgtcgtcgacctcgccaaccccgaccgcgccaagctcgtctcccaggtcggcgccgcctgccgctcccacggcttcttccaggtgctcaaccatggggtgccagtggagctgacactgtcggtgctggcggtggcgcacgacttcttccggctgccggcggaggagaaggccaagctctactccgacgacccggccaagaagatccgcctctccaccagcttcaacgtccgcaaggagaccgtgcacaactggcgcgactacctccgcctccactgctacccgcttcaccgctacctccctgattggccatccaaccccccttccttcagtcccaggaaacagtgctggtatcacaggaagacagaatatcacagcaacaaaggtctctttattatagagtagaggtacagtcatgttgggctgcggacagatcccaagctcacaactgcattgcaaaaagggaaacggaagccaagacttggaccaaacaacacaggcgcgacttgggaattaggccgaaaccctaaaactcatcgtagccggtttgctcctggaagaactcctcgtcagcgggatccgcttcatcttcttcagcaactgggggggattatttatatagagcaagggtgagtacgggagtactcagcaagccatgggaaataagtgtttaatgcaggcttcaaggaaaggctgttgtttttgcaattgattttatttgaactcttttctg

SEQ ID NO: 21119 - DNA, 937 bp, Oryza sativa
  ref <308>: DATABASE ACCESSION NUMBER: AK071417
  ref <309>: DATABASE ENTRY DATE: 2001-12-06
gacagcttgatgccaccgaagcggaagagggctgcagccatggagacggcgggaggggacgccgcgccgccgccgcagcagcagcgtcggaacaaatcctcggcggccaacaaggggaagaagggcggcgcttccggcggcggaggcggcgggaggtggccaccggtcaagccgaagaaggatctccaggtcaatcgcctcaagggcacccacctcctcaccgtgccaaacttcttcacttccgctgaggcgaaggcctttgtcgacattgctgagaatattggcttcacgcaccagggcagcctcggacccctgaagggtgaagcttatagagataatgaccggatatctgtgacagatcctttgcttgctcagaccatttgggaatctgggataaacaaaatatttgaggacatcagcatctctggcaaagtagcaaccagcttgaatccaaatatcaggttctacaggtacactgaaggtcagcgattcggtaggcatattgatgagagtgtcgaccttggagatggttcaagaacattgtatactttgctaatatacctctctggcaaaggaagtgcaaaggaatcatcagggcaagctcttgttggaggggagactgttttttatgatcatcgtggaggagttgtcgctgaggttgctccagtgcaaggactggctctactccatcttcatggtgccaaatgcatgctgcatgaagcacgggttgtgaaaaagaatatcaagtatgtgcttcgttctgatgttgtatttgcttagctggagaattctccatgcttgtgttgaagtactatagacctgagcatgctatagacgaacggctaacttttccattttacaaacctttgtactaaagcatgtaactgatccaacatgaacttggaaggtgatgacatcaaatttgtgttttatcttc

SEQ ID NO: 21120 - DNA, 1278 bp, Oryza sativa
  ref <308>: DATABASE ACCESSION NUMBER: AK071418
  ref <309>: DATABASE ENTRY DATE: 2001-12-06
ggaggccgacgcaaggaggagaggctgccccggggggagagagagatcacccgcctcgccgcccgcccgcgccgcggcggatcgatggagctgttcgagcgcgcgaggacggtgcggctgcgcggccaccatgacaagtacctgtacgcggaggaggacgagtcgcgcgtctcccaggaccggagcgcctcgtccccgaacgcgcggtggtccgtcgagccggtcccccacgcccccggcgtcctccgcctccgcagccactacggccgctacctctccgcctccaacgagcccttcctcctcggcgtcaccggccgcaaggtcctccaggccctcccccaccgcctcgactcctccgtcgagtgggtccccgtccgcgacggcgcccacgcccgcctccgcacccgctacggcaactacctccgcgccaacggcggcctcccgccgtggcgcaactccgtcacccacgacgtcccccaccgccacgccgggtggatcctctggaccgtcgaggtcgtcgaggtcctcccggaatccctcgtccccgcccccatcgcctccgacgacgaccccgccgcgccgcattacaagacaccttctcgcgggccctctcccgtgccgacgccggcgctggcgcctgcttcgccgccgcggcaccgtccggcgagcccaccttcgtacttagcgcggccaccgccgccgccaccgggctacatcgagccaccacagggatacatcgagccacctccaccggagcccaccctggcgagaattgagtccacagaatccttctcgctgccgctgcacaaggtggatgggcgggcgatccactaccacattggggatgacaacggcgacatcggcgatgatcaggaaggacactcattcacgttcaacgggactagcctggaggagcttttggagaggttgcaggaggagacggggctcaacgacgtgattatctgctctcgtagcccgatcaatgggaagctcatgcccctccgcttgcagctgccgcccaacaacgccgccatgcatatcgtgctcgtgcgtgagtcatcaaaagtggcaaaatcatttccatgaccatgtggtaaaatttgaagagggtggtgtcagcgactcaaatcaagcaagaactgtgcatctgttgtatatattgtaatccctgtttattatcagttccactggctaccataatcaagtattattcttccatcttcaggagatctcattcttgtaagtatctgcttctgtcaacttttttatcatttattc

SEQ ID NO: 21121 - DNA, 2025 bp, Oryza sativa
  ref <308>: DATABASE ACCESSION NUMBER: AK071419
  ref <309>: DATABASE ENTRY DATE: 2001-12-06
gaccctccccgaagccgcagtccaccgcaagtcgcctgcctcctccgccccgcgccccctccccccgtgcgccggcgatcgccggtgcccgccaggttatttcttgtggcatggcaaggatacatattggtcttggcttgttctttcatgaatgatgtccttccgttcgaaggacagaaatgtgcaaccacgatttaattggccatggagaagcgaatcaccattatcagcacaactgctcattgatattccacctgaaatagagttatcggactacagaaggttgccaggttcaggaagcgagagcccatctggacttctccatggtgaaggcttcaaggacgaaccaattgctgacttggatattttctttgaaaggctttatgaatatttctgtgcaaaagggctacgatgcattgttaccaaatggataattgagatgcttaacgtactttttatggtatgctgtattgggttctttttcttaattgttgattggaatgccctcggccatttgaaatgtggtgtagaggcactcgaatccggggaaaaaccatgtgatctaatgcaagtcgttaagcataatccattagttccattcacatttcctaaaatgatcactattggatcaatggttatattgacaacttacggtcttatcaacttcctcaagtttttcgtgcaactcagaagtacattgaatattcgtgacttctactgtaacagtctgaaaattacagatcttgagatccaaaccatctcatggcccaaaataattgagaaggttgtcctgctacagaaatctcagaaactttgtgttgtaagggacctctcggagcatgatattatcatgagaataatgaggaaagaaaattacttgattgggatggtcaataaaggcattatctcatttccaattcgtccttgggtacctggagctggaccaactgtcaaatcccatttgcaaaacaggagaaaccatctgatactcccgaaagccctagaatggacattaaattggtgcatcttccaaagtatgtttgatagtaaattctgtgttcggaaagattttctaacaagcccagctgtgttaaagaagcgacttgtatttgtgggcatttcaatgcttatcctttcacactgccttgtaatattcccattagtgtacctcattctgagacatgctgaagaaatttataatcaccccagtacagcttcatctagaagatggtcaaacttatcaaggtggatttttagagagtataatgaggtagatcatttcttcagacataggatgaacaacagcgctgtgcactctttaaattacctgaagcaatttccaactccacagatttctataatggcaaaattcatatcttttgtttctggtggtttggctggtgctcttataatcattggatttctgggtgaatctgttcttgagggccatatctttggaagaaatctattctggtatactattgtttttggaacaatagctgccataagtcgaaaagtagtggctgatgaacttcaagtaattgacccagaaggcgctatgtgcaatgttgtccaacaaacgcattatatgcctaagaggtggcgtggtaaagaggacagtgaagtggtgcgaagagaattcgaaacactatttcagtttaccatagtaatgctgcttgaagagatggcctccattttcatctctccttacttgctcatctttgaggtaccaaagcgtgttgatgatattctgcgattcatctcagacttcacgatttatgtagatggggtgggagatgtgtgcagcctaagcttgtttgacttcagaagacatggaaatagaaactatgcttcaccatttgatgcacttaaaacgcttaggagctcccaagggaaaatggagaaatcatttttaaggtacatttaatttcaagtttgaattacttcatgtgtttcttactagctattatattgtactcatattgttattaaaaagatatcttaagggccatcatttgtttattg

SEQ ID NO: 21122 - DNA, 1724 bp, Oryza sativa
  ref <308>: DATABASE ACCESSION NUMBER: AK071420
  ref <309>: DATABASE ENTRY DATE: 2001-12-06
gagaagagttgtcgagagagagaagagaagccgcggaagggggaaaaaagggaggcggcggaaggggatcggagatgccgctgggcaagtactactgcgactactgcgagaagcagttccaggacacccccgccgcccgcaagcgccacctcgacggcgcccagcaccaccgcgcccgcgccctctggtacgacgccgtccgccgccaagagcttcacggcggcggcggcggcgctcctcccctcctccaccagcccggcgccgccgccatcggcgtctgccaacacttcgtccgtacggggacgtgcaagtttggggattcatgtagatacttccacccgaagccacctcctgctaatccaggaccagctccttctggccctgtctctggaccaatggcgcagcagtctaatattcaaggaagtcaacccaattttgttggatatcaggcagcagatggaagttctttctcagggaacattctagggggtcacacctcatggggcaacttgcctccatcactgcggccacctcctgaaggcggctatcctccatttccttttgtagactggggttgaattgcttgttaatctgaaggtgccatatgttgaaacttcatgccggctatgcaatagttcaaacacacaatgaattttactattgctctctacaaatgggtttatattagctgtgagaatgctctcatatgcagtggaacctgtacctctagtgaactgggagcctggttttcacttaaaatgctcctattaggaagtgatccctctttgtagttaaaattgtgttgtccgaagggagaagactaaaggatgtagctcccctgatctacgtggcctccaagaaaaagaacagcacgctacaacagacctcagccacagaccagtggctgctcgatctagaccttcctccagcctcaagctggacaacggagctggtcagccagctaatcaatgtctggagtgcagtgcacaacgtgcatttcacagagaatgaggaggacaagatagtgtggaagctcactagccacggtgaatataaggcgacgtcggcctacaaagcgcagctcctaggtactactgccaccaactttaacatcctaatatggaagccgtgggcaccgcgcaagtgcaagacctttgcctggttgatcatccaaaatagagtttggacctccgacagactggcaaccaggggttggcagaacaactctttctgccccttatgcagacacacccaagaaactgctctccacctcctcgcagaatgcagatacaccaggaaaatttgggcggcgttatctgattggactaggtgtggtcaactgaaccctggacaatggcaaccagctcaatcggtgttagagtggtgggaggccaccgccaacttgaaggaagtcccaaagaaagcactccgcacgttaacacttctggtcaactgggaaatctggaacgagagaaatcgtagaattttccagcacaaagagttatctacaggaagtctgttggccaaaattaaagaggaggccaaaacatggtctcgggcgggggcgaggcatcttggtagctggcttgctttttatttttagctcagtaggaccgaaggtcctgggcctggtttttcttactcgtaaagtttactccttctctattcaatgaaattggcagcttgccgattcgttcaaaaaaaaaattgtgttgtccagcctc

SEQ ID NO: 21123 - DNA, 1157 bp, Oryza sativa
  ref <308>: DATABASE ACCESSION NUMBER: AK071421
  ref <309>: DATABASE ENTRY DATE: 2001-12-06
gtgagcagcaagtggtgggagggagaatccggaatcccaaagcaacagcagctagggtgaagggagggagggagggggagagggagaaccgcggcgatgtcgtcgtggaactcggtggggatggaggtgctgtaccaggtgctcgggtgggtcgccttcttcgcttggtccttcagcttctacccgcaggtcttcctcaacttcaagcgcaagagtgtggtgggtctgaactttgattttctggtgttgaacttgacaaagcactcatccaacctcatatacaatgctgctctattcttcagccccttcatccagagacagtatcatgagacatatggtgataaagagatgattcctgtcgcggcaaatgatgttgccttttctgtacacgcggttgccttgacagcttttaccctttttcaagtattcatctacgagcgaggaaaccagaaaatctccaaagtctgcatatcaatcactgctattgtgtggacagctgctattgtttgccttattgtagcttggccaaaaagtaactggctctggcttatagatgtgttcaattcaatacaggttgggatgacagcaatcaaatacattcctcaggccatcatgaacttcaggaggaagagtacaattggttggagtattggcaatattttacttgatcttacaggaggggtgctaaactttggccagatgggtgtgcaatcaatagatcaacacacgctagtgaacttctatggaaatattgggaaaacccttctttcattggaagtcgttttcttcgacatcttattcataatccaacactatgtgctgtaccctgtcaaacgagatgagaatgcagccaatggctatccaattctccccatcgaagcaaaacacgtggcggcagcataaaactttaagctggagaagatgggccctgttgccattaggtgggccgagaaaagggcccagactatttagaaatgctccaagcccatccaaagaagcgtaaaatctctttggcaagaatttggctttgtacatcatccaagatggataacgaagatcagatgtatcgagatggaattgtcctagtttattttcatcaatgtaagcaaaaatgtatcatggaatattttttagtcaatttaagtattcttctagtc

SEQ ID NO: 21124 - DNA, 829 bp, Oryza sativa
  ref <308>: DATABASE ACCESSION NUMBER: AK071422
  ref <309>: DATABASE ENTRY DATE: 2001-12-06
gggggcgactccttccatccatcctcctccgtcgcctccccctcctcctccgtcccccgccgcgcgccaccgttcttccccttcccttcccggccgaggcgatcgatcgatccacgcgcccgcgcgccaccgccgctgatcataacaagcaccagcagcctcccttctccgcgcgcgcggttagctcgcggctcgccatggcgcccaagacgacgacggacccttccacgtccaccccgccgccgccgggcgcgttcaggcgctgcagcgggcgcgtgcgcggcgccggcatctcgtgcgcgggctgcttcggcgacgcggagtccaagcggcggcggcgggtggcggtctacaaggcgtacgccgtggagggcaaggtgaaggcctcgctccgccgcggcatccgctggttcaagcgcaagtgctccgccatcttccgcgcctagcgctgatccctccaagaacaacgccgccaatgccaacgcatacgcgcctcgcctcccctctcctcctcgtcgaaggtaatttttgaaagaaaaaaaaagagaaggaaaaagaaaaacacagggccttatttaatcatgcagattcgtggttgcgggttcctattttgtgattattgatcaaacaccagatgctgcaaagtgcatcacctctcatcgatccatgcatgcatgacgccagaatgaatttcttcctcgcaaaaacaaaagaccgaatacttccgacgaattgtcaagatactcattgggatcttcaatgtcttgtttgggcgtaattgtttggaccaaatatggaatggaattgcttgatgatctgaatatttgcc

SEQ ID NO: 21125 - DNA, 887 bp, Oryza sativa
  ref <308>: DATABASE ACCESSION NUMBER: AK071423
  ref <309>: DATABASE ENTRY DATE: 2001-12-06
gctttttcctcctcctaaccaccgctccggcctctccatctcccgccgctcgccgtcgccgccgccgcccgccatgtggaagcgcgcgacctccgtcctcctccaccaccgctccgccctcacccgccgctccccggcgatcggcggcggcgtccttccccgtgctctcttcttctccacgctcgatgcggcgcaggcgaggacgagggtggaggacgtgatgccgatcgccaccgggctcgagcgcgaggagatcgccgccgagctccaggggaagaagaggtttgatatggacgcgcccgtcgggccctttggtaccaaggaagctccagctgttattcagtcatactacaacaaaaggattgttggttgtcccggtggtgaaggagaggacgagcatgatgtcgtgtggttttggttggagaaaggcaagccacatgaatgccctgtctgcactcagtatttctcgcttgaggtgataggagaaggaggagatcctgatgggcatgacgatgacgacgatcaccaccatcattaaggttgcagaagtcacctctagcaataaaaacactggatatggccatatccatgtcaactctcgattcagatgacttggagcagcagtggattttggaaaaacaaagtttgtctttttagagatttgttcatgcaaataacaggattcagtaaacaatgatatgcaattctctttttcagcacaccttagtcgaattcaaaataggtatgtttgtttgtttgtcttgatggatgattccatgttcaatggccacctggaccatttattttggtgtatgatctgttatctgaacatttcacaaaccttggtcctgttcaattcagtttaaacaaatgaagtcagcattctg

SEQ ID NO: 21126 - DNA, 1527 bp, Oryza sativa
  ref <308>: DATABASE ACCESSION NUMBER: AK071424
  ref <309>: DATABASE ENTRY DATE: 2001-12-06
gatccaaccccttatccccgaaatttttggatcatccactcagccggcgaacgcctcaccctgccgtcaagatggccagaccagctgggatgcggtgaagaaggagcggctagtgcagtcagcacagctaggggtcgccaaactccacatcggagtggcgttagaggacctgccgttgagggggagccgccgtcatccgatcagatctggagccaccgtcgccatggctctccaccgcggaggcctaggcagccaaggacacgaggtgactgccaagctcctccaacgcctgccgcagcgccgtccacccctcccgccatcggcgatgttcatgaaggaaacgggatgtaacccgatccgctgggaccagcgccggtggcaccaggagagccgcgacaggtccggggcatcaggcatggcttcctcctccttgctcatcacggaccagcgctgtatcggtgagacctggcggctggaggctggccgtccctgtgctatgcgtggattccaggcagatttggcgctgatggctgacattgcctgcgcagggccacacctgctgctcgtcaatttcttccctatctacaagctgggtcctcaccaacacctgcgacacttctcatgttggtccctagctctgctctcctttatctcctctctttcaattgaaggggtgggtaccagcaaccttcttcttgccagtaaaacaaatagatttttcctcttcgattgtgcggtcttaatttgcaacagtatttttttattttatttttttttgcatttgctcattgattttgttgtagattgccggcacccaaagacagccgaggacttcctgaagctgagccccggccgcaaggttaatttttctctagacgcatcttgattggtatatgtattcgtgttaatcctgagtaacatgaccacagaagaaataatctgcagctgtggttggtattcacactccactatgattgatggaactgatggtttgggtgttgctgatttgggagttggtgacattgaaacaaccactgattgcacaaacacatcaaatatatgtataagttttatgagtctattagtatatgttctttaggttattttttttttgtactagtcttgtatctgacattctgaattgctgacaaatacatgtatgaaattttaggttttttgctgtgccaaaggaataagatgaagtttctgaaatttgatatccactgacaccctgctgaaatcaaacatggcactattattatagcagcaaccgctgactgctcactcaaacacatcaaatcctcaaacctcagctgcgatgctagctcatggagcttgagaccgtgtgttctgcatgcagagtactcgagcatattgtaattttggtgcagtactacagtggcatggaaacaatgtgccggcgtcccttagtcatggctctgcccagccaacccgacgaagtggtcatatgcttagtgtgtaaaaattttattgttcgcagtgtttgtgtagtttagcttgtaatcc

SEQ ID NO: 21127 - DNA, 1605 bp, Oryza sativa
  ref <308>: DATABASE ACCESSION NUMBER: AK071425
  ref <309>: DATABASE ENTRY DATE: 2001-12-06
cagtctccttcctcccaccatcccgatctccggcgatgtcgctccaccagcggccgcaccagaagccgccggcgaccgactccctccccgcctccgccgccgccgccgccgccgcgccttctcgcccgctcccactcctcaccctcccttacctcttctccctcctcgcgctcctcctcctcctcgccctcctcttcccctggggccctcccagccactcctctgcccccgcctcgccgtggcgggggtacacgctccaggaggccgccgccttcgccgctcgcgcgggaaacggcaccatcgtcctcgccgccgtctccgggccctacctccccttcctctccaactggctcatcaccgtccgccgcgccggccgcgccgaccaggtgctcgtcgtcgccgaggactatgacacgctcgagcggatcaatgcggcgtggccgggacacgccgtcctcgtgccccccgcgcccgacgcccaggtcgcccacaagttcggatcccaggggttctttaacttcacctcgcggcggccgcggcacttgctgcagattcttgagctagggtacagtgtcatgtacaacgatgtcgacatggtgtggctcgccgacccattcccgtatatcgtcggggatcatgacgtgtacttcatggatgatatgactcctgtgaagccattggatcattcacatgagctgccaccacctggtaagaaggggcggacttacatctgcagctgcatgatattcctgcggccaacggaaggggctaagctgctattgaggaagtggattgaggagctcaaggagcagccctggtcaaagaagcagaaagcaaatgatcagccagcattcaactgggctttgaacaagactgcaggacaggtagatgtgtatctgctgcctcagtctgcatttccaactggaggtttatattttaagaataaaacatgggtaaaggaaacaaagggcaagcatgtcatcatacacaataactatatcacaggatttgagaagaagataaaacggtttcgtgatcatgggctatggcttgtcgatgaacatagtgatgagtcaccacttggtagaatatgagcaagctggcaaagctacaccacatctgtccttgcaacagcatcaaacttttgcagctggtgtttaactggttgggattgcggaaccgtgggattgatttgccatccgccacacaaaaatacagcaactggatatgtgcagtagtttttaattgtacatcaagcccctttcagagcgacctgttgtcatgatgattatttttatttcattatcttttacgaatacggcagcagtaagatcttagggtgagaatgtagctatttaagggaatgtggccacaaatattagcgagtcaagtagtaactcattggtctatatgtatagcatggtaattttgttaacctgtaggcattttttttgacactggattgtgtttaatattattctttttacctcctttcataaagaactctaactgtcatgtgtgatggcctgctgggtgtccacaaaactgtgctaatgatgacttgtaagttgtaattccgtatataattatttaacatgctcaggt

SEQ ID NO: 21128 - DNA, 2996 bp, Oryza sativa
  ref <308>: DATABASE ACCESSION NUMBER: AK071426
  ref <309>: DATABASE ENTRY DATE: 2001-12-06
gtttccccattctctccaccgcgtcgtcgcctccgacggcgccgccgttcccctttcatctcgacctcgggcaagtagctggcatcgctcgccgtcgtcgcttccaggcgaggccatcggcggccgccgtcgcttcttcctagagaccgccgccgtctccccacacccgcgcggcaccccgtcttgccctctccctctagggttttcttgggcgtcgaatcgctaaaagcttcaattaaagatggcttatatgtaacaacatgagcagtttgccagcatcagatcggctttgcatcctttcttcttgagttccggcgtcacatcgtatcgggcctcttttcactaaattggggaaaaatcaacagagtgttgttcttggcttcttgaaaatgctatcggctccacctagagtgcacacccgcttcttgaaaaatcaacagagtgttgcttacttactccatatatatagaccattgcgcatatttgcctttcctggcaatcttttcctgctctttctctctctctctactttggtcacggcaagctattgttaagaatgccttcagatactattaggttcaaccaggggagatactattgtctaatttatatataggccagtcatggtctataatttttatgtcaacctcctgtgttgttttgtatcaaatttgcttatcgatgatttatcgttaccatatatcattgcctattgttgcgttgattaatatgtacctcttgatggtagatcgtgcttgctcctattattaccatgggtgattcttttctcagcttatatgtatatgtttttgtattctcgtgtaatattctagctcttaaagtagctttgtatagagggttacatatgttgagttatcttctcattatttatatttccttttatcagttcgttggttctcattactacccagtttgttaccttacacagtgttataccccatgccaacatgcaatagattctttgttagttcccacttaatttcagctctaaaactttcagattatgtctatgcctgatggaaaatctctggtttgtgcacgccttaagcgtaagcgaccaatattagagattaatgatggtgagctacatgaatcgctatcaaacgatgccgatgacttccccacagccttcaatttcagatctaaccggcctgttcgacgccgtttgtgtactcaacttgctgagactaatgatggtgagttacatggatcaccatcaagctacgcgaatgacttccccacagccttcaatttcagatctaaccggcctgttcgacgccgttcgtatactcaacttacagattttcctcgcccagattccgccatggctgctcaatcacgtaaaaaacgtaaagcatatatgtcagagcgttctagggtattgcgacaacggttggcacattcatcatcttccatatatgataaagatgcatcgtcttctcataccactatccctacaaatggtcattcccacgattcgtatgtgatgctcaatcatgatgttatctcgactgttcgatcatgactgctcatcaaactgctcgattgtaaatgttcaatctcgatgctggtctcgatgctctgttttctcaccattaaaccttggtccaccaagtcacacatgttgttattgtggcgcattattttggtatgaggagcgcatcgaccgacggcgtcacacaacaagaccgttatacaacaagtgctgcaaaggaggaagtgttatcttgccttcctacaagccacctccagagcctttgcatagtctgctaactgcggtggatagagctaaatcagctcatttctgtgagaatataaggtactacaactctatgtttgcttttacatcaatgggggtgaatgtgattgattctatcaatgatggtcgtggtccatatacattcaagagaagtggccagctctgccatcgtattgggtcgctcctaccaaaaagggataaacgaccagaatatgctcagctgtacatatttgacactcaaaatgagcttatgaatagattgcgtgttggcacctataaaaatagagccttccaacctaacgaagaaattgtagctgctctcatgcaaatgtttgatgcccataacccaattgtcaagttatttagggttgcccgtgataggctttctagggcaggtgcacccgatgaccactattttataagattgtttggatctcctgacaagcatggcgatatatttaatgctccagtagcatcagaggttgttggattagttgttggtgacttaggtacaagtgatattggacgtgacctgatggtagaagacaaggctggcaatctaaggaaagttaaagaagatcactgtaaatttatggcgatgcagtacccaattttatttccttatggagaagatgggtatcatcaaaacattgcatatagacagtgtcgaagatcagcagggattaaacggaagcgtgtcacagaggtagaatattatgcctataggcttcatgatagaggtgatgatttcaacaccctaacgcgttgcaaaagaggtacacaagcctatgttattgacgcatattgttgcatggaagaatctcagttgagtcactttaggactaaatcatttcaacagaaatatagaactgctcctctcaaagaaattcatgatacaatacatagaggcattatagaagggtctgaagcaggccaaagaattataaaaccttcttcctatgttggagggccacgctatctataccaaaactaccttgattgtgttgctctttgtcgaaagtatggttgtcctgatttatttatcactttcacatcgaaccctttatagacaaaaattacttaggctttggctctaattcctgggcaacattcatcgaacagcctgatattgttgatcgtgtgtttcatatgaagctgcatctcttcatcgatgatatcacaaagaatgaattttttggtccaattactgcagttg

SEQ ID NO: 21129 - DNA, 1556 bp, Oryza sativa
  ref <308>: DATABASE ACCESSION NUMBER: AK071427
  ref <309>: DATABASE ENTRY DATE: 2001-12-06
gctccgactccgccggcccactcgctcactgcgccgccgctcatcggcgcgacgctccggcggccggcgctcgcgggctccgagccggtcgccgcctccctctgctctcctctccgtcgccctctcctccaggccgccccctccggtgctccaccgtcgccctccctcgctccggcagctcacgctcgggggctggccgccgtcgccctctccggcagggttcagaattgcatttggtacgatggaagagggcagcaactattatcttgtcaggaagggggagatggtagctgtttacaaatctttaaatgattgccaggctcaaatttgctcatcggtatctggtcctgctgcaagtgcctacaagggtaactcttggagcagagaaaaggaggaatacctctcttcgcgtgggttaagtaatgctacatatgtaatcaatgcagctgaacttagggaagatctatttggtacccttatcccctgtacttttcaggagataactgtttctagttcaaatcaatcagctctaaatcatacaggtgtccttaacaatacaagatatcagcctggggcacaatccgtggatctgaactacgatgccgtgggatctggtcaagcctcagctgagcactatagccagcgtattaaccaaggctactctgttcggggacaagcatttaacaggctggaatcaagacctagttcttccagccatttctcaccgaataatcttgatcagagtggaactgttgatgcacaacctctctcgaaacaatatatggtatgcttacttcacttcgatggtgcatcgaaaggaaatccaggaaaagcgggtgctggggctgtgcttatgactgaagatgggagtgatatctcgacttcgcgagggtcttggtattgttaccaataatgttgctgaataccggggcctgatcttaggattgagatatgctattaggcatggtttcaagaaaatcatagtatatggcgactctcaactagtctgttatcaggtgaaaggtacatggcaaacgaagaaccagaacatgatggaactgtgcaaggaagtgagaaagctcaaagaaaacttcgtctcatttgagatcaaccacattcgacgggaatggaatgccgaggcagatcgccaagcaaacatagctattactctttccagtggtgtggtctctgaggagcgtggcgatggctagccttctccggctataacccttctagataatgggagtaactagtatatgtagttaactaattagcaggtggagacctatatgatgggagtaactaatatatgtagctaactaattagcaaccagagacctgtgttttgcatcttgctgctctggcctctgggagtccagcttgcagtaacctgttgaagatgatccgtgtgaagggtacacctcgatgatgaacacttgagttaccaggcctcattttggagcactatgtgagctccagctagttattcttggtgtaagcttcactacttgggccttcacataggcgttgcccaagttagtagactggcagcgatg

SEQ ID NO: 21130 - DNA, 3767 bp, Oryza sativa
  ref <308>: DATABASE ACCESSION NUMBER: AK099173
  ref <309>: DATABASE ENTRY DATE: 2002-08-28
gacgacctcacctctcgcacaggtcgcagcagagcagccgctggctcgctggccgtcgcatcggaggaagaagaagaagagggggagcgggaggcgtcctctctctctctctctcgatccaccaccacccatggcgggggaagaaggggaggacgaggcggcgtcgatcgagctgcagctggagcaccacctacaggagcagcgggcctccctcaccgccgtcgacgaggccctcgccgccgacccctccaacgccgacctcctcgaggtacgcatccgcgtcacctcgcctcgccttaactagctctcaatctcaaatcgtcccgcgcgggcgctggctgttgaaggtttggctagccctaggctcctaatttgactcccaagttgtggggatgcgacgggcagtcctctcggaatgttagaatttgcaggactggttgtgtgactgggtcgtgctcggattattgttcttatctctctcgtgtagatgctgggttcaggcagtatgtctcctgttattactagtagtgagctctacaatgtaataaggattacctaataaaactaacaagagtgcttggagggattgtgattgatatgtctgattcggtcactgtaagaaaatcaagcgcattttgtcgagatgacgtttttattatgtgatttgtccatggatatttttgacagggttagatttagttgactcatgtatcatgtcattggcaaaatcagccgaagatggatggtaacttttgtacattagtatttagtatgtttagattggatatcgactcaacatgtttaagtttggtatgacaagagttgagtgatattcacatcatagctcactgatgtaacctgtaggtgagatgattagcttatgcattttggattcctgagatgtgaatatccaaatagtaggtttccttgtccaaaatatctccagagaaaaatatcgaacaaatattcagagaaagcagtcagcttctttttggggaatctcaacccttataccattgtcttcaatagttctgtacttatgtatttcatgcttctattgtgcaaatgctaacttacaatatgtactgttttgaaggtccatgaagaacttcttgctgcaattaaggatgcagaggagggacttctccatttgaaacgctctagactagtaaagcaaattgatgagatatttcctaaccaagagccaacatctgaagcacctgaagtagctgttgatccacccgatgatgttgagccagaaccattggagccacaggaattttcagttggatctaagtgtagattcaggcataaggatgggcgctggtataatggatgtgttataggacttgaaggctcaagtgatgcaaggatctcatttctgactcctacgtctgaaaacatgtcggtgagtcacgccacttgatctatcgtttttccattattttttcctttgaatagtagctccatgtttcctggtaaaccctaaacataaccctctacgtgctggtatgtttgtaacttgctatgttaccgccggtaggaaatgggtgtttatttgccagtatttactgtttttccaacttctctccttcatgagatattataactccgcacataggagatatgacctgtgcaattattttgttgaatgtccttggaatgacggaataactttaggaaacaaattcctacttttgcaatacaagtccttgctgggctgcagagctatacagcattctagcggttgtataatcaagttatttctgtattgattctaggctattctgtgtgagcagttgctgaacttctctccaaagtaatgtgacagtacatgatttgcttttcattaaaaccatgtgtgcattgtgcatataccagtcctttattttgcaatgaagccatacgtccatctgctcccaaataaaccttgtagcaaagcctgagtgtgtccctctatcctcttgcatcgcaccaccacagtaaattcatgaataaatgggacggggaaaatgttaacaggtcacaggtgggtacccttcaccatcaaccatattttctgttggttaatggaatgtaatgtccagaacataaggttcattgttaccaacaaattaactaatcaatctgcccatagtgcagatgtgcaagttttttctccagcaacgatgtcggtttggtagtaactgccgcttgtcccatggtatgtaaatgcttattttgcacccttctaaggattaaaccccttcaaaccattgatctcttgttccgttgcctttcacctgaagcaatgatgacaccacaaaatggtgtgaacttcatatgatggattgctccttcagatgttgcattttttgtgaatattgtattgattttcatggatttatatctttgtgttttcctacacatataagatgtcccagttggttctgccccttgcacataaagtatcatgtgtgactaatccaaaaattatcctcaggtattgtaattcctattctgtccctgaagcaattcactccgactagatggcagcagtccttggtaggatccagcatactggctgcttctgggcatcattctggcctttggagacgagctgaacttgagtcatgggatgacgatctgaaagttggccaggttgtttttcaagatgacgggagctctgcaaggcttcccagtgattctctttcaatctcagaatatgctgatgagagcgatgaagatggtgaaggaagctcaagtgatgaaggatctgattttagtgaggatggagatcaagaggatgaatctgttcatcagggtctaggccttttggaatccaaaaatttaagtggtgttcagacagagactgcgatctttgcaaagtgggagcaccataccaggggcgttgcctccaaaatgatggcaaaaatggggtaccgagagggaatgggtctaggtgtttctggacaaggcatgcttgatccaatcccagttaaggtactacccccaaagcaatctcttgatcgcgctgtggctgcaagtgaggttaatgatagtgtaggccctggaaaaaaacgcagtcggggtgggaaaagaaagcgtgagaagaagtttgctgaacaggcaagggctgctaaagctgaagaagaagagaggtctgtcttcagctttatcaatagccaactagtgggtcaagatgttgcagaaggctcagccgtgaaatctaaaaaggattcatccggtgaggcaaatggacatgccaagaaggaagacagaagatccttgcttgcatacgatgacgaagtgaaagaactgaggagccgtgttgagaagctggaggaaatgatgaagcgaaaccgcaaggacaatgcattctacgaagcagcttcaaagaaattgaaacaaacccgaaaagctctagctgatgctgaagcaacgcatgcttcggcaaccaacgcggttgctagaaaggagaaagagaagaaatggttaaaattctaatgtcaattttcgatgcagtatcaattagcatctgccagtcaatcaatatccattttgatacctgaaggttgtcgtggcatgcgacttcagattgcttgttctttcatgccttatacagtgtgatctgtggctgtaatgttttaggagctctgttgtagggaaaatataggatgtgatatctagtttgtccgccagaagttcaggaccatattgtttcgagttctgaactcacaaacttatgctccctattgtcattttggtacctattctgccagaagcgg

SEQ ID NO: 21131 - DNA, 2766 bp, Oryza sativa
  ref <308>: DATABASE ACCESSION NUMBER: AK071428
  ref <309>: DATABASE ENTRY DATE: 2001-12-06
gacccacgcccactcctcctcctcccacgccgcgtccttcgccctcctccctgggcgacgctcgccccgccgccgcatcgcctcctcaccagccacgcccgccggcctcctccgcgatcgccgccgccctctccaacgcgcctccacctcgcatcggatcgatcatccaccttcgccctcctccctgcgtcgcctcctcgcctcctcaccttcacacctcgccaccgcatcgcctcctcagcagccccgtgccccgcgccccgcgtcccgcgccgccctcgaccgccgacgctgcgacccgcgccgtctcctcgctgccgtcgccgcgccccgagtcccgcgtcccgcgctgccctctaccgccgatgcgggagcaggaggtcacgccgcgtcaacaccgccgaggagccgcttcctcgccgccgtcgcgacgacccgcgccgccctcgactgccgccacctccgcagatcgccatcgcacgcctccgcctctcaaggtcacacgctcatcgccgcccgacaccccgccgattggggaccgaacgctgaccctgcatcgacgccacaacagtcgacagaggggagatgttgaagacctcactccaacgacggctgcgcgcggcgacactaccaggcactgagggagagaatgcggtgcgaggtgcggcggggttgttcgtccttgcccagatcaatgccgccgccgatccctcactcgcccctcgcccaagtcggcgccaagggcggggttcgccaatctgcttcccagccgcctcgcccgctccatgggagaggtgacacctgtgcccgcctccagcgctccatgcccccggataccatccgagcacgatccctccttagcttctgccggagaagggacgcatgcgccgaccttcagcactctacgcgccctgtggataattggttcgttctctttacgttgcaatccattcatttgtcaagaatcatcattgtgagtgccgagggttattacagattgcaggatcactaatgctcttttttgcccataaggtgttcaacgaaatgctgcttagccaatgtattaccagaaattgatttctctgtaagtgagaatgtcatattgtcatgtcccctatgttgttatttatactaatgattgcaggattctctctgttgttatttatgctatgaagtgctgggaagttgagagtgttgctaccaagcaaaaagattcaattgatctgttggagcaaactaatttggatctcgcagtctcaaaactaatctggttcttgattgtttcagagtggatgaaaataaaaaatggaatgatgcagtgaagattatgtaagcaatgttcgtgatatatcgatcctgaaattctcatagatggccattgcacaaatacaaaaatttgcagctcaagatgaacaaccacaccaaccccaagatcaccaactaagcctatcctgcttcatgattgttgctgcaaactccaacatgcttgctgctggtgcaatctgagccggctggtggcagatgggagcctgccctatgttgttagcagctttcttcactccaagtcatgcttgctgcctgtggtcttggtagtttcttttttgtgttgtcaatttaattattatgatttcccatgtgctcggctattggtgttcttgtttttatctgttttgtttcagggtgtcattactatggagtagatcatttttttcttattttttttaatgccttgtaaaataaccaactagcagggatgttcataaatttctcccttttgtttggtttttttcagacatatatatataatgaaggcatatatacacaaaaggaggagctgtttgagggtctaaaggacaatagctcaattgactgggaagctgttgtcatatgctgagagcaatctgctaaatgttaaagaggtgcatctaacttttgtacccagtgaactgcaaatctgcaccttcatttttgattaatagtttctttggattcagatcaaaatagctcaacatgggaatttttctagcagaggatgggcaattcttggaaaatactatatatttcttgtcgttgaatatgatcatgtcccattattttggcacttgctgccttgattctgttgcctgtcccagcccttcagctagctctctatcacacatgaatgcgtgacccttgatggttgtatgcagttgggatattttggtgagttcatcccccttccccaccccacctctctctctctctcaaaaccatcatttatcttcactattgacttacaatttcacttctagctgatgatgatcaatcaaagctagctcatatgtattagtgagtttatgaaaaaaaggatcagatattcaataacagagtcagctccttccgaacgatggcaaaatggtacctttataattttacttctcaacacgcacacatttttttatgacgagtttgaacttttgttctccttgtcagattttatctgaagcaagtatcatatacttctgtattagaatatggacgcaatcatatatctcctaaggtttagtgcatactctcatatttggaagtgaataccaaacgtgtatgaaatagtgcattcgatttaatctattctctcttgggcatttattcgcaaatgcaaagatttttgtaatttgatcgtagcatagattatggcaaccttggctttgtggtttgccatgtcatgtactgatatatgaatgtgatgctttaattaacgttgaaaagccataaattatgtattcg

SEQ ID NO: 21132 - DNA, 2010 bp, Oryza sativa
  ref <308>: DATABASE ACCESSION NUMBER: AK071429
  ref <309>: DATABASE ENTRY DATE: 2001-12-06
gtggtgatgacaaatctgccagcaagggaattagtgatgctcaaagcaagggaaaatctgttatgacctctgctacaccacctacccctcctgctgctcctgctttccgtccagctcctccaattccatctctgaatgattggtctcagccaccagcacgtggatcgacattttacccatctatttggcagtctgaagctgatccaaaagccaatagtgattccagatggcgtgttccattgtgcagagctggccatccattccaaccccatgctcccctgagccgtccacccccaccaatgcctgcaccaatgagctatggaccttctccacattttccttaccctggccgcctcttgtcctctggccatctgcatggagaccttggtaataacattgagaactcaccagcacgcacattccatagatggattcagtgtgatggttgtggagtgcaaccaattgttgggcctcgatacaagtctaaaacaaaagaagattatgatttgtgtgatgcctgctttcatcgcatgggcaatgaggtcgagtacaccaggattgacaagccactcttaccccagagattactgagagaccctacattgtgtcgcaagatccattcacgggctgcgatgaagtcaaagcgggagaaacttgaaagtcgcttcattttggatgtaactgtcctggatggaacattgatggcaccttcaactccgtttactaagatttggcgtatgcataacaatgggtctatcatgtggcccttgggcacacagcttatatgggttggtggcgaccagtttgcactgcagacctatgttccattagagattccagtggacgggtttcctgttgatcaggagattgatgttgctgttgattttgtggcacctgcaaggcctgggaggtatatatcttactggaggttagcatcaccttctggccagaaatttggtcagcgtgtttgggttcacatccaggtggaggatccttcttttgtcagtaacaaaaggactgccgctataaacttgaatttgcccccagaaagcaatatcacaaacacaagtaatttgattgatgtcaatattgagcctgtggatcaagtcttcaaccaacatgtcaatagcacaaacaaggagttacttgaacatttgatacaccaccagattgacgagcccaagaatcctgagcctgctccattacctgtgcccattgtttcttccacaacatctcttcaccccatcattgatgttgatgttccctccagttcaactgctgctgcttttgtgcctgtctttgatgagcctgcgcctgaacctgctgtgactcctgtgcctccaactgttaatgtgcctgctggtaatgcacctgcgtctgttggtgcatcatcatctgatcatcatggcattgacaatctcacagaagagaaactgctgaaggaacttgaggaaatgggttttaggcaggtcgatctgaacaaggagatactcaggcagaacaagtacaacctggagcagtctgtcgatgatctctgtggcgtcagcgaatgggaccctctcctggaggagttgcagggaatgggctttgaggacactgagataaacaaggagatgctcgagaagaacggaggaagcatcaagcgggctgtgatggacctcatcgctagggagaagaaagaccagtgaagatcgtgtgctcttgagccatccctatctataacctaactatgtgtgtatatgcgtaaataatgtgacgaggtgtaaggctagcgccggccgccggggctgctgctacagtctcagggcctgcttgcttatgaactgtgtgtggtgttgtgcgactggtatatttgtcgcggagatatgtgttaagtgcgcgtgcgcgcctcttaaaaagcggttaccttgccaggtaaactgcgtgtaattactatgggcttagctgctctatgcctcttatctactgctgtgactggaacttgatggattaataagatctatgttgcgt

SEQ ID NO: 21133 - DNA, 1879 bp, Oryza sativa
  ref <308>: DATABASE ACCESSION NUMBER: AK071430
  ref <309>: DATABASE ENTRY DATE: 2001-12-06
gcccttcccggctgtggctgtaagtcgagttgagatcgaacctttcccctcgtccgactggtctacccagagaaaccctaatactcgcagatccccttcgccttcatacacctccatccacagctgatggctaccatggggtctgcaccttcctatgtcgtgctggaccgcgtggttcatctggacaaggaagccgtcaaggaagaatcggagtgggcgatcatggagtgtagagatcggaagacctacctgcgcaacgaccacgtcggcgacgaggtggtgtatggcttgtcactcctagtgcagatcgccgagccgccggatctctccaagctgtccatccgcctcagcgaaccccccgtgcaagtcgccgcccgaccagaggagatcctcgacgatggctcctccgtcttgcagctcttggacttgcctaaacgggccctcaacctgcacacctccgtccagtccgtcgccgacgacctcatcgtcttcacctcctgcctccgcaatcgcacccaccgctacctagtctacgacgccatcggcaagtcactctccatgatcccttgcctgcccaaccgctgcgatccctctgccacgttccagcctctccctcttcgtgccggcgccggcggcgactacaccattgccctcctgggaagggacatgcggtccgaccgggaaaccaccaggcgcttcttccaggatgtcctctgcctgtgtccgccgccgccatcctcgagacctccaccgccatcctccttctccgctgtcaccacgccgtggcaattcaagaacccgctcttccctccagagacgccgaatcgcttcaaggcccatatggtgttctcgtccggaggtcaggctttctgggccaacctcgcgcaaggtgtcctctactgcagctgccacgacgtgctcaccggtggctacgatgtgccgttccgctacatcccgctgccgcctgagtgccatcttgaccccatgaagaatcagctgcggttatgccggacaatgaactgcgttaaggactccatcaagttcgcttctattgacatggtgccccctgatgaagctatgatgacgacttggactctgaccctggccaccacgcagtggcacaaggatggggaactccgtgtggcaagcctgtgggagctggagggcttcaagaaggccgggttgcctaaggtcaagccgactagccccgtcctgagcatggaggaaaacggtgtcatctgtttcatgctcaatgctgctgaagaaggggtgtacatggtcagcctcaacatgcacaccaagaacatcatgtcctccaccaggctctcctcctgcccaacacagcctttgggtgtagaatttcccaaacacattcagaatccagttccacccaagagggatcgtgatgatttggaggagtgctcgactgcaatcaagaggaggttgtcaagaacctgacatcttcgtcagcactggaatggaaggattggaggcagacgtcttgtggtgctggagcagacctcatctagtcatgctgcttatacttacagtatcagggatcgaaatctgcatcgtcgtgctttgttttgcgagctgcttctacgttttctatggctgctgctgctatatatggttgtctgtagatctggatgtgcttcagaaataggaatttaatctggctgcttattttgttcctagcttatgtattgcagcagtaacttcagaaacaggaatttaatcttactatgacttaggagtacatgtgatctcccatgcatatctttctcatctatgctggcttgcttgctattagtgttgatgcgttgtaccatgtttttttgcttggaatcggctgtagctttatggtcctctttcgttc

SEQ ID NO: 21134 - DNA, 1169 bp, Oryza sativa
  ref <308>: DATABASE ACCESSION NUMBER: AK071431
  ref <309>: DATABASE ENTRY DATE: 2001-12-06
tgacggccgaaagcttttctcagcccgagagatccgctgcgagggcgcccccaacccgacggtcgccggagaagcagcagccgccgcccacccacccatccagtcgatggcgccgccggataccagccgcgcgccggcgcaaggcgaggaagccgcctccacatccccgtggcctctccggaagctccagagttttacaccagggttgtgttcgcagtacaaagcttatgagaatgcatttgtggatatggctaaaggaactatttcggatgcaatggttcttgtgaacgagcaccagacagaggcaattggatgtgccactgtggcaggattcatcttattgagaggtcctcggagatttttataccgcaatactctggggcgtttcaagactgagaaggatttactgaatgatgctgagcaaagtatgatggagtacaaaacatctatcgaacagttgaaaaaagattcaaaatacaccctagacaaaatagctgttggtgaaagtgatttgcagcgtggacaaactgatttgaggtctactggtaagcagattcgatctcttattggttccatttacaaggctgaatccacagctacaggtttgatggatcgactccggacaattccaaccagacaatctcttgaactgcgagcagaggtggcttccatggcctctgatttgaaaaaccagagatgtgttctacaagaaaggatcaacaaaatatctgaatatggtgtccgcgtctgaacttcagtaatcatatttcccatgataccacacttgcccttccaaggtggcaataaactgaatcactgcaggagatgctgtttatcgtttgatcaggccagtaccatctccggactcttaaccttttctgtaagcattttaaataggagagcaaacaaaatcactcgccataaccatggatttcatggcatattcactgtatttctgtgctgcgcttgcgcattgttccttcagcttatgtgatgtgtttcctgtaagcaatctttttggcattctggttcagaagaaccctccggctgctttttcccacatgggccccctcatcgtactaccaagttatgtgatattctgatgtaagacatctctgctccaagcctccaggaaggccataggacaatgaaattatgtttcattctcc

SEQ ID NO: 21135 - DNA, 2488 bp, Oryza sativa
  ref <308>: DATABASE ACCESSION NUMBER: AK071432
  ref <309>: DATABASE ENTRY DATE: 2001-12-06
ggctcgcttcactccccagcaagttgcggcggcggcgcgcggctagccggacacaccgatcacgctgactagctagtactagtagctattgaatggccggcgcgtggaggaaggcgtggctgtcgatgctggaccgaggcggcggatcaggcgcgggcggcggaggcggcgggagcagcgggtcgctgcacgtgcacctccacggcctcctctccccgtcctcgtcgtcgtcgtcgctcaacggttacaagcgcggcggcggaaagcacggcggcggtggtggttgcggcggcggccatgtgatgacgagtagcaaggccgtgctggcatgcttctccgtcgcgctcgtggtggccttcttctacgtctccgtcgccagcggccccaccgcggacgccgcctcgttcccttccccgacgcgggcgtcgtcgtcgtcactcctgtcgtggctgtcgtcgaactcgacgtcggcggcggcgctgccgaggaggtctctcccgcctcacccgcccattcctcctgccggcggcggcgctgatctgcgtaacaccgcgcgtagaacgcagagcggcgccgagggctcggggttgccggcgccggcggcggagcaaacggccaaaccgcgggtttctgatctccggtcgggcgccgggaacgccaccgtcggtgacgtcgacggggatcaacgcgtcgggaatggcacgcgatcacgacagcagcgagaggaaaccgcaacaccaatgccgcgatggcagagaagggacgaggagaagaactccacccaccacgccatcgtcgccgctcccggcaactccaccgacgccccggccccaccactgaactcgacggcgacgccgcgagccgcagcagcagccgcagccacgccatcgacgccgccggagaggaaggctgacacccaccacagccatcggagaggcatcaggcacaagcagcagcagcatcaccagcacccgaggcggcgaaaggacaccgtcctcctcgcggcggcggcggcgcgccaagaagctcccgatcgccgcgacgacggcgccgccatgccattgcccgccgcgacgatcatcaacaccagcaccgtcggcgacaaccgcgtcgtctggacgtccggcgtgcagagtggcctggtctccttcgccaagtgcgacgtgttcagtggccgctgggtgcgcgatgacgacgagggcggcggcgcctacccgttctacccgccgggctcgtgcccccacatcgacgacgacttcaactgccacaagaacggccgcgccgacaccggcttcctcaggtggaggtggcagccgcacggctgcgacatccccaggctgaacccgattgattttctggagaggctgagagggcagaggatcatattcgtcggcgactcactgaaccgcaacatgtgggagtctctggtgtgcattctgcggcatggtgtcagggacaagaggaggatgtatgaagcgtcagggaggaaccagttcaagaccaggggatactactccttcagattcagggattacaattgctccgtggatttcataagatcaatatttctagtcaaggagatgatcaacgagaccaaaggcggcgccgtggtggacgctaagttgagattggatgaactcgatgaaacgactccggcgtaccggactgccgacatcgtcgtcttcaacaccggccactggtggacgcactggaaaacatcaagagggctgaattactaccaagaaggtaactacgtgcaccccagcctcgaggtgatggacgcatacaagagagctctgaccacctgggctagatgggtcgacaagaacatcgactccacaagaactcaggtggtgttcagaggatactccctcacacatttcaggggagggcagtggaactcaggagggagatgccacagggagacggagccgatcttcaaccggacgcacctcgccgagtacccggagaagatgaggatcctggagcaggtgctggggcggatgaggacgccggtgatctacctcaacatcagcgccatgacggactaccgcaaggacgcccacccgtcggtgtaccgggtgcggtacgagacggaggaggagcggatggcggcggtggcgaagcaggactgcagccactggtgcctgcccggcgtgccggattcctggaacgagctgctgtacgcctcgctgctccaggcagggagaggatcgtggagactatgagaagttgatttctcaaaatctcttgacagttgacacacaaggcacaggcgaaaaaaaaaagatgagtggtaacatggttcatgttagaggtgcacataaacacaggaaaatcctgcagtgagtagatcaggtagaagcagattaatcgttaataagatgatgaggttttaattctttcctcccggtagttcatgtacatatgagagcttaataactgatgtaccatctgaagaatatcatcacatattcatatcgaaacc

SEQ ID NO: 21136 - DNA, 1494 bp, Oryza sativa
  ref <308>: DATABASE ACCESSION NUMBER: AK099174
  ref <309>: DATABASE ENTRY DATE: 2002-08-28
gtcttctcaaaaaaaaaaaaaaaatccagcggcggcggcggcgcacatggatcagatggcggagcggcagcacaagaagcggaagccggagaagatggccggcgcgcgcaccagcggccatgataaggaggaggagaagaaggtgaaggctccttctgtgtacctggtggtaggccatgaggtgagctgggcaacctactccgtgttcaaggtggatccctacgcggcggcgaagagaggcggcggcggcggcgacgaggaggatcccgctccggtgcctatccctcgccggctcgcccgcatcagcgccaagttctgcatgtctttcgcccccgtgcccgtgcgctcatggatcgtcggcgtcgggggcgattcagcggatgaggactacgccccggagaccatcgtcttcgacaccgagactcgcgccgtgatccgggggcccaacctcctgtcgaccaagctccacccggttgtgctcaccatcggccacaagatctacgccctggcacggtatccctccgtcacggggcaactcgacttcgttccatggttcgaggtgcttgatctctcccaagcgcgcgtggtcgatggccatctagagagctgcgagtggaagcccctgccacggcctcccttcttcccatgggacctcaccccattgcagtacctttctccgccaatggttactgtcgagtcctacgttgcactggcctcctgcattctggtgtcattatctcagcaggagggcacgcacatgtttgatgtcgacaaggagcaatggtcgaaactggatgacaacagcctgccattcgtcagaggcgccgttccacacggacccatcttccttggcttatcgagagccaagaaaatcatcaccgcatacaatatcacagtggtctgccaaccaaggtcaggcggcacagcgccgtccttatcaattgttgagttccctgtggtgtctgacatggaagaggagatcttaagcacaccaatatttctttctctcggtagccctggcttctgttctttgaaaagttggagcgaccacccaacgacggatgatccatgtactcgtgcacgtatcaaattgatggcataccatacagaggaacccatatcacaagagtacatcgagtcttctcatggcttattgataccgaaccagtggaaacaggtgtacgagatatgtgattcgtccagggaattgatttggcaatgcctgatcactgcaatgtccttatgagtatattccatgatgttggagccaccagaagtttattgtagaggctggcttaagaaaacggtttacttgtagcaccctacaattccagtaaattcttcagagtacaacagctttgcatggcttcgaacttagggagtagtgctgcagggcatcttttgcttgtgtattaagtggatttagaatatgatatttgaggagaaatgatcccctgtagtatctatgctggactgatctaattgaacctgtct

SEQ ID NO: 21137 - DNA, 637 bp, Oryza sativa
  ref <308>: DATABASE ACCESSION NUMBER: AK071433
  ref <309>: DATABASE ENTRY DATE: 2001-12-06
aggagagcgaatatgccgtctctgcggccgatcttgctcgccgccgccgccgccgtcgccgtcgtgtctctgtggccggctgcccgcgtggtggccgacatcgatccgtcgtctgggatgccgtcgccacctgcgaccacctcgccgttcccgttctgcccgacgacgccggcggggatctccacgcagccgtttccctgggcggagccgtctccgacgacgacgaccaccatgttcccgcaggatccagggtttcttgcatcggcggcatgccatgcgaggacggcggcgctggcatggattccggtggtgtttgtgttttctgctttcttggtgtttttgcagtgaatcgtactcactgccattgatgttgtatgtatgagttgaattcagattccatgatgtttctgaatattgcagctggtgtgatgccatgtaacatggtaatttgatagcctttgtattgtatcagatatatagttgcaaacactatgtcaaaaggagttcctctttttctctctcgctgtgctagtcactctgtttcttgttcatgaggaaaggaaaggaaagatacatatgtacttgatatttgcactatttcagcttaaatccaaccaggaacttagtttcaaagtgt

SEQ ID NO: 21138 - DNA, 1397 bp, Oryza sativa
  ref <308>: DATABASE ACCESSION NUMBER: AK071434
  ref <309>: DATABASE ENTRY DATE: 2001-12-06
ggtgggctgggccgaatagacgattgaacaacaggccgaagaaaccaaaaatggtgtagcctgaaggtgaagctgtcaagcacccaaatggcggcgccggtgaggtcggtcctccccgtcgtcctcctcggctgcggcggcgtcggccgccaccttctccgccacatcgtctcctgccgcccgctccacgccaaccagggcgtcgccatccgggtgctcggcgtcgccgacagctcctctctgctcgtcgccgacgacctccactccaacggcttcgacgacgcgctcctcgctgatctctgcgccgccaagtccgccggctcgcccctatcttccctgctcgctcgagggcaatgtcagctattcaacaacactgaggctaggaggaaagtcattgacactgccagcgttctagggaaaacaactggtcttgtactagttgattgttctgcaacttatgatactgttggcatgctaaaggatgccgtggattgtggatgttgtgttgtattggcaaacaagaaaccgcttacttgtgcttatgaggatttcgaaaagttggtctccaacttccgtcgcataagatttgaatctactgttggagccagtctgcctgtaatagcttctgtgactcgtattattgcctctggagatccagtttctcgtattgttggcagtctgagtggtacacttggttatgtgatgagtgagctggaggatggaaagaagtttagtgaagttgtgaaaactgccaagtctcttggctatacagaaccagatccacgtgatgatctcagtgggatggacgtagctagaaaggcattgatcttagctaggcttctggggcaacagattagcatggagaatattaatgttgagagtttataccccagtgaattaggacctgatgcaatgtccacaaaggacttccttgaaagtggtttagtacagcttgataaaagcattgaagaaagagtaaaggcagcatctttgaaaggaaatgttcttcgctatgtctgtaagattgaaagcacagggtgccaagtgggccttgaagaactcccgaaaaactctgcactgggaaggttgagaggaagtgacaatgtggtggagatatacagcagatgctacgagagcgcccctctggtgattcagggcgctggagctggcaatgataccactgcagctggagttcttgctgacatacttgatctccaggatctcttccacaaaacggcttgaaatctatgtcttgtaggtcgaaccgcagagttgattgtgagtcgtgacttgtggggttcttttggtcacagtattacctaaataaatcttgagcagacatatccatttttgtactgtacgcagaaggtttttgaacaaatttggaagttggaacc

SEQ ID NO: 21139 - DNA, 766 bp, Oryza sativa
  ref <308>: DATABASE ACCESSION NUMBER: AK099175
  ref <309>: DATABASE ENTRY DATE: 2002-08-28
gtctcttcctccccgacccgaggcggcggcgaccctagcttcccgattctcccatcccccccatggcgtcccacctcgacttccgctacctcgacgagggcctcggcggcgagcgcgggaagcgcaagcgccgcgaggcggaggaggcggccgccgccgactccatggacctcgacgccgacgccgacgcgccgaggccgtccaagctccgcgcggtgccctccctgtccgacccctccaagcccgcctccttcgggcagcccacctacgacggcgtcatcgccgggcgcgtctccgggcggcgctggaaggaggcccgcacccgccgcgcctccgcgctggcggcgtcccggaagccgaccccgctggagcagcgcgcccgcgacaagtccctgaagcgcgcgtaccaggcccgcgtggcggagctcaaggaggagatccggcagagcaaggcggcgaagcggaagcagcgggaggagcgggagaagcgcaagaaggagaacgtgctccgctcgggcaccaagctgcagcgggtcaccaaccccaagaccatccagaagatcgccaagtccaagaagcggaagcagctcaaggtcgtccccgacgagttcctcggcggcaagaagtcggacgccaaccgccgcatgcaggtgcccggcctagacaactgaagatcgccttaccaaacaaatccttttgttatctgtgatacccatgttacagtgcagcttactagtttttacattgcgcaacgagattttgtact

SEQ ID NO: 21140 - DNA, 931 bp, Oryza sativa
  ref <308>: DATABASE ACCESSION NUMBER: AK071435
  ref <309>: DATABASE ENTRY DATE: 2001-12-06
ggagagagagagaatccgcgcgcgcgaaagggaaggcctgatcggattcgagctgtgccggcgaggagaggagatatggacgcgaagcagagcgtggcggcggcgaagccgtcgctggcgaagaagacggcgtcggcgtcgttccggctgaggaacggcagcctgaacgcggtgcggctgcgccgcgtgttcgacctgttcgaccgcaacggcgacggcgagatcaccgtggacgagctggcgcaggcgctcgacgcgctgggcctcgtcgccgaccgcgacggcctcgccgccaccgtctccgcctacgtccccgagggcgccgcgggcctccgcttcgaggacttcgacgcgctccaccgcgcgctcggcgacgccctcttcggctcgctcgacggcgccgccgccgccggcgagcccggcggcggcggcggcgacgaggaggaggagatgcgggaggcgttcaaggtgttcgacgtcgacggcgacgggttcatctcggcgtcggagctccaggaggtgctcaagaagctcggcctcccggaggccggcagcctcgccaccgtgcgggagatgatctgcaacgtcgaccgcaacagcgacggccgcgtcgacttcggcgagttcaagtccatgatgcagggcatcaccgtctggggcccctgatctccaccaatcccttcaaacatcttttgaattccatccaaatttcaaccaaacacgcacacgcgcagtccaaattgaatcaaactgaacatcactaggttaactcaatatatttatctcatgcaattacatcactgtatgtacatgtgacaaagcagggcctgagctttgttgctatggcctgttttgtgtttaaaaaaattttaaattctactcgaacaggattcttttcaagtgtttctacggtaattgaacggttgcatgc

SEQ ID NO: 21141 - DNA, 1634 bp, Oryza sativa
  ref <308>: DATABASE ACCESSION NUMBER: AK071436
  ref <309>: DATABASE ENTRY DATE: 2001-12-06
tctcctccgtccgccgcctccgccgtcgcgccgatctcccccatcacggcgagcagcggtgaccggcgtcctgctgcttcaggccgccgcgcacacccgcctctgactccttgcgccgcccaagccaatctccctgtccccctcggcctcgcctcccggagaggtctccttcgcgatcgagttcgcctgccgcctgcgcggctgcgccgatcccgagcaccggtgccggcgccctgctgcttccgcctccgaaatttgaggcttcagatgaatccccaggcccgaagttaggtccgcccctggttagaagatggctgaagcatgtacggtttcacaagataatggtaggcgctgcctccccgcatggatgctgaagccatgctcaaacgatgaagtgtcaaagactcgatatcggagtgagccggtgttggaatccaataaacaaccagctgatttggatcagatcaagccagccaaaaggaaaaggggagagcaggttaaaattgtggatgaagaggatgcggatgaactgggagctttgcagccgtgtcagggttggaaaaaggtgaggagaaagcgcttggatgctgtcaaagatgataataatggagaaaatgcaaaaataactaataagaatgcaaggaaagtaagcaggagatctgctccaaagaacagcggtaaacggaaactggacaatgttgagccagaagtatcatcgtcagaatcaattgatgatgatatagagcttactgtggaagatcttttgagcatagctgaagagtatgtaaaagctgatagattgaagcagcatgaagtgaaaacaacaaagacagccagatacaatgagaatcgttgcagtccttcaatttccaccgaggcagatataggaggatcaataataaatgctcgatcagtgatgggattgccagacacaactaggaatgctagatcaatgaagggattgccagacacaacgatgaatgctcaatcaatgaagggattgccagacacagctgaaacaaatacagctccaagtgagcctagcagatatgagatcaacaaacaacaagtacagcaatgtacgccaagtttcaccgcaacatgtgatgttgctcaggatatgttaaacatatttttcggtcctctgttgagtaaatgttcagggtatgaaaagaaaccagaggttgtccaggatgcaaatcatgcaacagagaagaaagacctgagctgtgatgttcaaaggcagggggaacatgcaacagagaagaaacacctgagctgtgatgttcaaaggcagtaggagcatgcaacagagaagaaagacctgagctgtgatgttcaaagacagggggaacttgtgacgaaaaagaagggcagcttgaaagataaggtgggcttgtttttttgagtagagcaaatcgagtgtttaggcagtagagtacaaatccatttactaggattatgtttatagtggccttttctttttcttttggtgagttagctggtttcaggagtgtacatcacctgtaaatatatctatcccacagcgttttagcttacatgtaactatatgctttggcctcacatataatgaggtggtttattgatgatgtaataaggccgccgcttctgcc

SEQ ID NO: 21142 - DNA, 1645 bp, Oryza sativa
  ref <308>: DATABASE ACCESSION NUMBER: AK071437
  ref <309>: DATABASE ENTRY DATE: 2001-12-06
cccaaaccgcgtgggtcccaccgggctccgtcgccacgtacgcggccggctctccctatacaagcgccacgtcgccggcgagccgccgcccctccaccgtccccggcggcgtatattcccccccgtggcgcgctcccatggcttcctactgctactacggcaacacctccaaccctaaccctaaccctaaccctagccctgctccctccgctccgccgctctaccccacgctcagcatggccgatctcgcgcccgtccagataggcccctcccccccctcgtcgccgatgtccccggcgtctccggccacccccgtcgacgcctacgccaatgccccgccaccgtcggaggacgtcctgctccggatcccgggggcgcagctccacctcatcgaccgccaccgcagctacccgctcgccgccggcgacctctcgctgctccgcatccgctccggcgacacctccctcgccgccatcgcgctcctccaccccatccagtggccgctcgcgcgcgacgtcgcctcggtgaagctcgacccctgccactattccttctccctcaccgtgccgccctccgccgacgaccccaaccccggccctctccattacggcctcacgctctcccaccccgacccgcgcctcgatggcatcctcgccacgtacaccagcttctccgtccagtccgtggtcggcggcgaggcgttggcgagcaaggttcgcgacgaggtggaggcggcggcgtactggacggcggtggcgcccaatgtggaggagtacggcgggaaggtggcaaatgcgatcgcgacgggggccgggcacctggccaaggggattctgtggtgcagtgaactgacggtggacaggctccggtggggaaacgaggtcctcaagaggaggatgcagcccggcgacgccgacgccgaggtcagccccgagatgttgaggcggatcaaaagggtcaagatggtgacaaaaatgtctgagaaagtggcaactggaatactatccggagttgtaaaggttactggctattttacaaactcaatagctaactcaaaagctggcaagaagttctttaatttgttacctggagagattgttcttgcttcgcttgatggattcgggaagatttgcgacgcagtcgaagtggctggaacgaatgttctgtccacatcatcaactgtgactaccggtcttgtatcccacaaatatggggagaaagccgcggctgcgaccaatgaagggatggatgcagcaggccacgcaatcgggacagcatgggcagtgttcaagattcggcaggccttgaacccgaagagcgtcctaaagccaacctcactcgccaagtctaccatcaaagcagcagctgctgactatcgtgcaaagcaaaagaaatagttcgtcctcaacgatcaacccagtgttggaacgttcctgactaatagaagctctgccccaatccatcccagctagtttttgcagatgtcttctcttgttttctttttttcacgagtcatgggtgtgctgcactactgctactgttgcttgtaatatatgtgctgaaaaaccaaaagcaactcctgaacgctgatgatgtactaccacttttgtgctgaatgatgcaatgtacggaaatctgtggtgtt

SEQ ID NO: 21143 - DNA, 907 bp, Oryza sativa
  ref <308>: DATABASE ACCESSION NUMBER: AK071438
  ref <309>: DATABASE ENTRY DATE: 2001-12-06
ggcaaggttcagtgagtaataaagccaagatacaggagcgatcggctccgcggcgttcgtcgctgtaaaatccattgttcatcgtctccctcaccggcgtttgtgttcgtgagtgtgagagtgttcctgggctgagccaacaacgacggccacaggtcggccgggttaaaccctcccgcgaactcgatggtgcgctcgagcaggacgagaaactccccgcggtccttgcaccggttgtcgaacacggtgcgcgccgtgatgtcactcacgagcgcggagagcgcggcgcgcatctccacggtgcccgcggccacggcgaccgcgcgcagcagggcggcgacctcctcctcgcggatggagcggaaggagtggacgcggcgcgcggtgaggagctcggtgacggcgatcttccggacctggcgccagtagtccccgtacggcgcgaagacgaggtcccggccgccgttggtgagcacgcgcagggtggcgctcagcggccgcatcgcgaacgccgtgtcgtgggtcttcgtcacctcgcgcgccgcgtccctggacgacacgacgagcgtgggcacctcgccgatccggagcagcatgacgggcccgtggcgacgagccaggtcacgcatcgcgcggtgcgggatctgccccacgaggtggtgcaggctacctatgatcggcagcgtccatggccccggcggcagccgtagcccgccgtcgccatgcgctgccggcggcggcgagcgcctgcgcctggcgagcagcacgacgaacagcgacacgagagccaagccgacgtagacgtagccatgagacgcgtcttccatttccctttcctttcgcaaaggatttatgtggcagtgtgggtgtacatatcgagacgacatttatatactacctcattacc

SEQ ID NO: 21144 - DNA, 2448 bp, Oryza sativa
  ref <308>: DATABASE ACCESSION NUMBER: AK071439
  ref <309>: DATABASE ENTRY DATE: 2001-12-06
gaactgggtgttcgccggtgagaccattatacggcgtcggcatggcttcagacacagaggatggtggagaggtgcaacctacagagacgaccaccgatgactcctcgtcgcccatgacggtggagaaggaggagcaggcggcgtcgactgggatggagatagtgaaggcaggaaatagtaatgctcaagaaactgggggtctctctctaaattacgaggaagcgagagctctccttggaagactggaatttcaaaaaggtaatgtagaagctgctctctgtgtgtttgatggcatagaccttcaagctgccatccaacgattccaaccatcacttactgataagacgacatctaagaaaggccagacgaaatcagaatcaggcatagaaaatcctgctacccttgttcttgaagccatttacttgaaatcattgtcccttcaaaagctaggaaaatcaacagaagctgcgaatcagtgcaagagcgttcttgattcagtcgaaagcatgttccagaatggtcctcctgacatcgaacagaagctacaagaaactgtcaacaaatccgttgagcttctcccagaggcatggaagcaagctggatcacatcaagaagcattagcttcgtaccgacgcagtcttctcagccaatggaatcttgacgatgaatgttgcacaaggattcagaagagatttgctgcatttctgctgtatagctgtgtagaggggagcccacccagctcgggatcacaagttgaaggttcttttattcctaagaacaatgttgaagaggccattctacttctaatggtagtactgaagaaatggtaccaggggaagacgcattgggatccatcggtgatggaacatttgacatacgcattatcgctttgcgaccaaccatctcttcttgcaaagaatctagaagaggttttgcctggaatatatcctcgcaccgagagatggcacactctatctctttgctattatgcaattggtcagaaagaagttgcactaaactttctgaggaagtctctgaacaagcatgagaatccaaatgatataatggcattgttgttggctagtaagatatgcagtgaggagcgacatctagcttccgagggcgtcgaatacgcgagaagagcgatcaaactttctgaatcttcagatgttcatctgaagagtgtgggactccatttcttggggaattgtcttggcaagaagtcaaagactgtctcatcagatcaccaaaggtctctcttgcagaatgaaactctaaagtcattctcagagtcgattgctcttgaccggcacaatccagacctgatatttgacatgggagttgaatatgctgagcagaggaacatgaatgccgcactgcgatgcgcaaaggaatatatcgacgcaatcggtggatcagtctcaaaaggttggaggttgctagcattggttctttctgcacagcagagatatcctgaagcagaagtggcaacaaatgctgcattagatgagactgcaaagttggatcaagggtcattacttagtctaaaggctaagctgaaggttgctcaatcatcacctatggaagcagttgaagcataccgtgcccttcttgctcttgttcaagcccaaaagaattcctctggatctagcaagactgatgcagagggacagaatgacagtgtaagtgagtttgaaatctggcaaggacttgcaaacctgtactccagtctctcaatctggagagacgctgagatatgtctgcggaaggctagagccctgaaatcctactcggctgcaacaatgcatgcagaaggttacatgctcgaggcgcgagatcagaacaaggtggcattggctgcctacgtcaatgcattctcgatagagctagagcatgttccatccaaggtggccattggtgcacttctctgcaagcaagggtcaaggtatctccctgcagcgagatgcttcctctcggatgcactgagaattgagcctacgaacaggatggcttggcttcatttagggaaagttcacaggaatgatgggaggatcaatgatgctgctgattgttttcaggctgcggtgatgcttgaggagtctgaccctgtagagagttttaggtcactcgcatgaggatatcacaattcacaaacatgttctctcttgttttttcaggttcatagtatttgagagaattaacacacattagatattactaaggttgttgtatctaaaaatatgtgtaatcctgtatattttttttctttctgaactctatcaggcattaacaaacagagtggtgtatcaaagctgtaattaattaacaactcaccgtccttatataattgttttacttggtgatttcatctggtgtagctccagaaaataactggatttgataatgtaatatgaatcccaagtacataattcagcaaagattatagcc

SEQ ID NO: 21145 - DNA, 979 bp, Oryza sativa
  ref <308>: DATABASE ACCESSION NUMBER: AK071440
  ref <309>: DATABASE ENTRY DATE: 2001-12-06
gatagcatttgcgtcctcgctcgatcgatatcggcctctaccaccactctctcgaaatattagatatatagttgcaatttgtatcattaacatgtcgatcgaagcaggtgttacggcgactgcacccaccgtgtcggccatcgtcctgacggcgacggtggggtgccaccttctcaagatcagcggctactcgcagacaaggctggtcgataatggcgaacgcgtcgagtcggccaagttcaaggcggccggtcacacctggcgcattgtcttctaccccaacggcaagtacagcatggaccatggcgccttctccttctacctcaagctcatcgacaggtccaagggcgtggatgccgagatccaattcagcctgctgccgcggcatggcgcggacagcggtacgctcccgtacagcaaaccggagatcatgcacacgttcgggagcgcgcgccgcaacagcaagtgcgggttcaactggttcatcagcagggacgagatggagacgctgcagaacaagtatgtcggggaggatgacgactccatcatcctctgttgcgacatcaaggtggtgaacaaaccggccatccatcgcattggcctgaacgacctaggggtgttttgcccctgcgatgacgacacctgcaagcgcctccacaagaggtcgctgcaggcagcgtctgatatagctatggagtctcagccatgtctcggtatcaagggggggttcaaaaggcttttctcatactttctagcctaattagcacagtttaatttgttccaagtcatgccttagtacgtacgtacatcttgataacgcatggtgtccatgttcggcgaatcaatttcttttagcagttaattcatttattaggcttttataaattcactggaatggtattattatatgtattagctagtaatttattttcattaataataaagatgtttgtttccagaaagaaaagagtactaaatg

SEQ ID NO: 21146 - DNA, 947 bp, Oryza sativa
  ref <308>: DATABASE ACCESSION NUMBER: AK071441
  ref <309>: DATABASE ENTRY DATE: 2001-12-06
gtctgagtaggaagctttcactctctagtagtaggtgtgtcctttacatttgctagtctccactttccgagctcgatcgatcgagcatggaagccacaacctccagcttgctcgtgcgccccgtcgacacgcggctctccgccgcctccctccccatcgtcgtccgcgcccgccggcgcgtggccgtcgtcacggcggcggcgccggagcggaagccggccgcggcggcgagcagcagcaactacgtggtggtgccgctggtcgcggcgccgtcggggatcacgcggccgctggtggaaatcctgcgcgacctcaacaagcgcgtccccgacaccgtcgtccgttcctcccgccgccgcgcgtcgccctccgatccggtcatcccctggtatcatgccaacaggatgctaagcttttatgctccaggctggtgtggagaggtccgtgatgttatttacactgacaatgggaaagtgacagtgatatatcgtgtcacagtacgaggaacagatggagaggttcatagggaggcagctggaacaacatcactgaatgatgcacgatttgatgatcccgtggctgctgcagaagaggccgcattctgcaaggcctgcgcaaggtttggctttggtctgtatctttaccacgaagacgagactccgtagggaagtggcgcagcatccacttcataagttctgcgttggttctcgcctgatttggttcaaaaggctgtggttgatccatctctctgtttatcaaggttttcagtctgtatcaggagttgaagtatcattcatactggaattctctttatcttctgaacctcttttcttgtagatacgagtcaatgaggccccgtctgccacttctttcctttttggcactgttataaagagcaaatacacgagtactcctacggttctggttccataatttttgatgttttg

SEQ ID NO: 21147 - DNA, 1898 bp, Oryza sativa
  ref <308>: DATABASE ACCESSION NUMBER: AK071442
  ref <309>: DATABASE ENTRY DATE: 2001-12-06
ggctcccccccgcgcgctcgctaaccctagccatggccgcaccaccatccgaccactagccgcggcggccagcgacggcgaggcccccccaccccgtcctcctcctcctcctcatccgcttctctccggtccgtcccttcgttgactgccgctcggtttgcttccgagggttttcctctcccgctgctgctgcgagggagggtcgatccgttcctccgctgggcgtgcctgtgcgggtgctcctcctcctgcttcttccgcggactcctcctcctcgaaggtccttgtgaactgaagtaacctccacaggagttcacatgttctagaacaccaagtgtcaggggaaaaacattatggattacagcaacagttcatgttctagaacatgcagtgggcttgttaggttaaacaacactatagagtccaatgaggttctgttttctaaaacaagaagtgggcttgttaggataaacagcactgtagagtccaatgaggtttcgctttctaaaacaagaagtgggcttattaggggaaacaccaatgtgagatccaatgaaggttcatattctacaacacgaagtgagcttgctggggcaaatggcgttgtggattccaacgtgggagatttatgttctaaaacacgaagtgggcttgttagaagaaatgccactttggattccaatgagggatcatgttctaaaacacgaagtgggcttgctaggggagatggcattgtgggtttaaatcaaggttcatcctctaaaacaagaagtgggcttgttaggggaggtgacattatgaatttcagtgaaggttcatcctctaaaacacgaagtgggcttgttaggggaaacactactgtggctgccagtaatggttcatattctgcaactccaagcaggtttgttagaggaaacatcattgtgggttccaaagaggggtcatgttcaagaacaagaagtgggcttgtcagagaaagcatccagatggattacagtgacagttcatgctctagaactcgaagtgggcttgtcagaagaaagccctttatggttcaagtcaaggatgaagctgccatgaatgggctgtctgatgactgtttgaaagaggacagtccaggaaagaatgaaccaaatcacaagagtaatctggttgaaaatagtgataaaccagtcatgaaggggcctgatggatggtggaaagaaggcatgctaacaaagaatgggtcaaagtacatgagtgacccggttcaaaccaagggtgaagcatgcatcaatgggcttcccggtggacaatggaaagaaaacagtgcggaaaagaatgtatcaaatcacaagaatgagctggttcaaagaaaggatgatctaattgttgatgggcttcctgatggatggtggaaagaggacagaccaaggaagaatggatcaaatctgaagactgatccgtactacattgatccagtcagtggatatgaatttcgctctctgaaggatgtgcaccgttttcttaaatcaggggacatctataaatgcattgtaaggccaagaaagagaactatccaagatccttgtactattgaaaaccaatctcatgtgagttccttgcagttcttcttggtttgagttactggggcattttgcttcttctatcaggacattaaataaacaaaaatactaggtatcttaattaccatgcacacctcaaattgaacatatttgctttggttaaaatttatagagtccagccctagtaattatatgtttcttgtagctcagacatcagccacatgtgaagtgtcaactgctccttgtcctggttgcccctctttgcgtgcgtaaagaatcagagttttcatgcactattacatcagataaagaactctgattccttctgaattc

SEQ ID NO: 21148 - DNA, 1207 bp, Oryza sativa
  ref <308>: DATABASE ACCESSION NUMBER: AK071443
  ref <309>: DATABASE ENTRY DATE: 2001-12-06
gtccgcaccgcaccaccaccgctgcggcatcaccaatcggcaatcgcagagcaaaagcatcgggaggagcaagctactagtagtagtatagtagtactagtcaaagaaatcaacagcttgattgaccatggccgccgccgccccctcgcgagtctccgtcagggccgcggcgcccgggcaaacggggggcttcgccaagatccggccgcaggtggtggtggcagcggcggcgaggtcggccggggtgagcggccgcagggcgaggagcgttcgggcgtcgctgttctcgccgaagccggcgacgcccaaggacgcgaggccggccaaggtgcaggagatgttcgtgtacgagatcaacgagcgcgaccgcgagagccccgcctacctccgcatcagcgccaagcagacggagaacgccctcggcgatctcgtccccttcaccaacaagctgtacagcggaagcctggacaagcggctggggatctcggcggggatctgcatcctgatccagcacgtgccggagcgcaacggcgaccgctacgaggccatctacagcttctacttcggcgactacggccacatctccgtgcagggcccgtacctgacctacgaggagtcctacctcgccgtcaccggcggctccggcgtcttcgaaggcgcctacggccaggtcaagctcaaccagatcgtcttccccttcaagatcttctacaccttctacctcaagggcatccccgacctgccgcgggagctgctctgcacgcccgtcccgccgtccccgaccgtcgagccaacgccagccgccaaggccaccgagccccacgcctgcctcaacaacttcaccaactagctcaacccgcgctgtacatcacttccaagttccaattgctactgttactactctgccaataattgatggagatgcagatcgagctgcctgattagtttagtgttaattgcggcatgtgcggtgtgtatcgtatcactgataaggaagaggaatcgaggacaagatatttgtttcctccctgcgatgagccgatgaactgatccgaacaagaagaggcttcttggtagtaggtggattggaatatcgaaatgatatgattgtgatccgcaactacaacgaccgccactacggagagctcatgctatttgtttgtttgtttttgtactagtgctcaaatatatactccagctcatgtcc

SEQ ID NO: 21149 - DNA, 1120 bp, Oryza sativa
  ref <308>: DATABASE ACCESSION NUMBER: AK071444
  ref <309>: DATABASE ENTRY DATE: 2001-12-06
ggaaggaaaaacttgggaggaggcgaggaagaaccgaagaagcagcagagcagagatcacctgcgattgcgaggggaggaggcagcgatgtggcggcggcaagtgggtgcccttcttctccggcaccgatccacgccttcctccaccctccgccaccatctccccctccccgtccccgaccagagcccacctctcgcttccaatcttctgctccgcctcttcacttctcaatctggagaggggggtgatggtgccaccaagcccttcattgctttcgtcttagggggtcccgggagtgggaaaggtacgcaatgtgtccggatcgcttctgattttgggtttgctcatttgagtgctggtgaccttctacggagtgaaatttcaactggcagtgagaaaggggagttgatcttaaatataataaaagaagggaagattgttccatcagagattactgttgaactgattagaaaagctatggaatcgagcgatgctaaaagggttcttattgatggtttcccaaggtgtgaggaaaacaggatcgcctttgaaagaataactggaacagaaccagaccttgtgattttctttgactgccctgaggatgagatggttaaacgtttactaggccgtaaccagggacgagtggatgataacattgaagcaatcaagaagcgcctaaaggtgtttgagagtctaaatattcctgttgttgactactacacttcaagaggaaaggttcacaagataaatgcaaccggaactgaagaagaaatctttggagcagtccacaagctgttttcctccttaaggttttgagacttttgtcttccacataagcaggggcctttggctggaaggacatcttgtaggaagacccactttgtctagcatccaaaagttctctctatttctctcgtgttcttttggaagcctcacgtctttattaaaaccattgtatatatgtttcactattatgaatgccacctggtaatggctggtgctgaccttcacgttatccttgtcatgccacagcatgaagaagcatgaacaatagtatgctattgttgcacagtgctgtaacgcattttggtcacaataatcctacaaaccttttgct

SEQ ID NO: 21150 - DNA, 851 bp, Oryza sativa
  ref <308>: DATABASE ACCESSION NUMBER: AK071445
  ref <309>: DATABASE ENTRY DATE: 2001-12-06
gatccttctaatatataactgctaaattttgccgagatcgagcagttcagtgtgtctgtcagaggccttaatgtcgtcttgagcagccgccgcctggagatcaataagatctgatgttctgatcaagctgacgatacatatacaactcacatctgcaggttggttcctttgtgtccaaaccaaggaaaggaaaggcacagtcatctctctctctccctactcctcatctccagccacatctgctgcttcgtctccttctcctgagatctctcgatcttcaagaggaggaaacctaggtgaccttgctctctggtggccacgccatgggagccgtcaagaggtctagctttctcctcgtcgtcgtcgtcttcgctttgctactcctgacctccatggcagcaggagggaggaagatgttgatcaacaagcatcaagtgcaatcaatggagacgtctgatgatgaatccatgcatcaagggcaggaagacgacgaaatgctggcgatggtccacgagagaattctgaggcaggtgaagacgaacgactacgggacctacgaccctaccccaaccatggctaagcctcacgccaaggaaatacctaactaactatatatatatagctgcatgcatgcatctcatatccataatccatgcatgcaaatatgtgatcaatatatatgtcttgcatatatatatgtggtcattaaattgcctcttcatcgagatatatttcgatatgttaattagtttgctacatataatatactactttgggccggccatatatatacatatgttttgtcgaataaacttcatggtttgtcatggaatgttattattcatatgtgt

SEQ ID NO: 21151 - DNA, 1739 bp, Oryza sativa
  ref <308>: DATABASE ACCESSION NUMBER: AK071446
  ref <309>: DATABASE ENTRY DATE: 2001-12-06
gcaatgccttagcgatccgcagcgcacgcacgcacggacggacgccatggacgaagccctggtgggcaggctggaggccgcggtgtcccggctcgaagctctcaatggcgccgccggtgccacggcgagaggcggctacggcggccaggtcgaccacgcgtcggcgcatgacccagcgatcctggcgttcgacgagctcgtcgccggcgccgtcgggagggtgtcggcggcggccggcaagatcggggcggaggtcgcggaggtgaccagggtgctggagaaggcgttcttggttgggaaggaccttcttgtcaggaccaagcaaactcagaagccaaccgtggattccatcgcagtattcatggggcctctgaatgaaacaatattggaggcaaattcattggcagaggggacaagatcgagccatggcaaccatctgaaagcagccgccggtagcctggccgctctggcgtggattgggtacaccggcaaaggttgcggtatgccccttcctattgctcatgtagaagagagttggcaaatggcagagttctacagcaataaggtgcttgtggagtacaaaagcaaggaccctgatcatgtagagtgggcaaaagctctaaaagagctcttcgtgcctagtttgcgtgactatgtgaagacattctaccctttgggccctgtgtggcaacctcctgggagttcaacaagcaaagcaccttctgctccctgccctccttctgcatctcttttcagttcttcagctcaatcatcacaaccaaaaaccggaatgtccgcagtcttcgctgaaatcagctctgggaaatcaatgacacaaggtcttaggacggtgacagctgacatgaagagcaagaatagaacggatagaactggtgttgtagctgctgaaggaaaagaagctcataagaaaccctcctctagttcaaccaaattaccttctaaattggagctccaaatgggtcgcaaatggattgttgaacatcatgttggcaacaagaacttagtaattgaagattgtgataccaagcaatccatatatgtatttggatgcaaggattctgtgctacaggtcaaaggaaaagtgaacaacataactattgataagtgtagcaaaatgggattattgttcaagggtgttgtcgctgcttgtgaaattgtgaactgcaacagtatagaggtccaatgtgagggctctgtaccaactatatcgattgataacacttctggctgccaactttatttaagcaaggaatctttagagacatctataacaactgctaaatctagtgaaatcaatgctcttgttccagatgcaaacagcgacggcgattgggccgagcattccttaccccagcagttcattcatgctttcaaagatgggcaatttacaacattaccagcatgtcattcaggcggctgacctacttcaccatcaacgcctttcattattggagttcgttttcttttaattgtttaaattaactaaccagttacccttccatcctggtttgtacatagagcaagccagtcctgttcatttggctcaggtactgcacattttcctctaccacaacgtattaatcctacagttccaactaggaagaataatcttctgtcaggctgtatgcaattcagtaattttgtaactgttctactgaatgtaatagtactctcaagtctcaattctccaacaaataaaatggcatcaattcactttt

SEQ ID NO: 21152 - DNA, 2108 bp, Oryza sativa
  ref <308>: DATABASE ACCESSION NUMBER: AK071447
  ref <309>: DATABASE ENTRY DATE: 2001-12-06
gaaaagcaacgatcagactaccacactacaatagtatcagtgaactgctattgccctcccaagggaaatatactagtatgtcaacttccatccctctccctttcttcttctctcatggtgttgtgcatgctaggataggccatcgtccaatccagccatcggttgggcttctttctgctggtgccccggcaaaagtctccttccgacgacaaagcagtgcgcatcgacatgctgcacatgttgtgtcctcagaatcaatcactcctgtaaaggaagtatctagctttgagccctctgtatggggggatttctttatcaactatgacccaaagccactacagagatcggaggattggatgatggaaaaggctgataaactaaaacaggacgtccgtatactgtttgagacgcacaatgatacagccaagaaaatgcacttagtagatgcagttcaacgtcttggaatagatcaccttttccaagatgagataaacaatgcaataagtgacatcaaagaaagtgaattcactagctctagtctccacgaggttgctctccactttcgcttacttagggagcatggcatttgggtatctccagatgtattcgaaaaattcaaaggagaggatgggaggttcatcaatacaatagctgatgaaccaagggcattattaagtttgtacaatgcagctcacctccttgtccatgatgagccagaacttgaagaagctatgtcttttgcaaggcaccacctcgaatcaatgagggacggaagtaggctcaaggcccctctagataatcaaatcaaccgtgccctacacttaccattaccgagaacctacaagagagttgaaatgttgcattacatgctggagtacggacaggaggaagaatgtattgttgttcttttagatcttgcaaagctggaatttaaccttctgcagcatgtccacttgaaggagctcaaagctttttctcagtggtggaaagatctttatggatatgtcgagctaagtcatgttagagatcgtgcagtggagtcatatctttggtcctatgcgctgttctatgaagaaaacttaacactcacacggatgatccttgccaagataattgtattcattgtccttatggatgacacatatgatgatcatgccaccatcgaggaatgcaggaagctgaatgaagccatacaaagatgggatgaaagtgctatctcattactaccagagtacatgaaaaagttctaccgtgcactgctgaattacttcagggagactgaagctcaagtagaggccagtgacaaataccgggtgacctgcatgaaaaaagagttccaaaatctatccacgtattacctgcaagaatttgaatggttgcatcaaaattacaagccagcatttaaggagcgggttgctttgtcaaccctgtccagtactgttccactactctgtgtgactgctgcagttggccagggtgatgcagtaacgaaggaatcatttgaattgacaacagtacgttcaagtgccgttatagcttgtgcaaagattatgcgtttcatgaacgacattgctgcattcaagtctggaagaaagaacaaaggagatgccgcaaacacagtagagtgctatatcaatgagcacaaggttacaagcgaagttgccttagacaagatcgaatcaatgattgaaagtgaatggagaaccctgaatcaggttcgttgtgatcatcaaaagcagttccatgtggtgcaacgagttatgaatttggccgtagcagtgccattcttttacgataagaagaaagatgcatatacattttcgaagtatcatcagggaaatgttgggaatctgtttgtgaatcctgtcaccctttagaactgagctatcaacaatgcagcaaactatgtgcttacacaatgcttatgtaattctatctccatcttaaaataagttcacttttgtacataaatctggacatggtctatatccagactcatgtatagaatgaaatttattttgtgatgcaggtagcaattcttatgcgtatactctatgtgtacgttggtaattagtaaataaagatggcaccgtccgaagtgcattgcc

SEQ ID NO: 21153 - DNA, 1255 bp, Oryza sativa
  ref <308>: DATABASE ACCESSION NUMBER: AK071448
  ref <309>: DATABASE ENTRY DATE: 2001-12-06
ggggcccacctgtctgtcaaagacaggacgcagccgcagtgcccccctctctctctctctctctctctcttctctggctccggcgccgcctcccctcgttttccgagagagagagagagagagaggcaggcggaaggggggatggacgactacgcgcgggagatgatggagctcaagacgctcgtcacccgcaccctcgagaagaagggcgtcctcgccaagatcagggctgagctaagagcaagtgtgttcgaggccatagaagaggaggatagggtagtggagaatgatgatggtgggaatcccgctttgcttggtagctgcaatgaccgagctaagcagctgcatgcttcaccatcaggtaggttattaacagcacttgtaagtgaatacttggagtgggcccagctaagtcacacgatgaaagtttatctgcctgaatgtaatctgccaaaggacttctggaagaatgaattaaaggatttttctaacaaaagcggagctgaagggagcaggagtgctgaaagtggtcccatgcttctagatgttcttgaaggatatctcaaatatgagaatttgtctcaaacaaggatggctggtactggtaggagaataatcaattccgagtcggatccggctctaaatgctgaacataggaacacgaggaggccaccgtcgtcttcttcagttacaggcttgcctcctatgggaaggccaatgccatcgtcacagatgtcagaccgaagaggggggtcttcggcttccaatgcaaggaaggatgaatacaactggagatatgatgctgatgatatctctgaagaagtgttgcgagcatcaagtgctctagaaaacgtccagctagaccggaaagctcgcaatctgacgacttcttggaggcatccaggcggcggtgctgagtaaaatcggaaggtgggatgggtccaattcaccattgcgctgcttggacccccttgggccatttgtatcgttttggttgctgcggtgggattgtgcgcttgcgtagaagaatgctcagtgttgatcatgcctactgtactcctagctcatttgtttatgcaccatatatgggatttgatttctgctggacaatcttgttcttgtgcgtataattttagttgcgtgtagtttctaacaaatttgcttttgcttacatcgggaattcttgttacaacgtgcatacaaacctgccctgcagcagcagttctctccaaatccagtttcctgctcctcttgt

SEQ ID NO: 21154 - DNA, 1450 bp, Oryza sativa
  ref <308>: DATABASE ACCESSION NUMBER: AK071449
  ref <309>: DATABASE ENTRY DATE: 2001-12-06
gttatctattaaaaaacggaggtagtatttatttttattcttagaggtaatagtatgcacacaaactgagcaggtattcttttcaggctcttttgaagaggttaggtgtttttatgtgatctctgcaaattattgattctataatgaggttgcgtaaatatgaagtatgatattatctagattccaattacattgtgggacatagtaattctcattgctattgtaggccatagtgtattgattcctgtgcatcgcttctttctggagttcagttaccacgttggtgcttcatatgcaacagcatggaccaatttactatgccatgtcctaagaaggtttgtgcatgacaagaaggtatctaagataacactctttcgttaatgccaactgttaaacatagaaatcaaagtaatttattttgctaccatttcctttaggtggcactcacatattgttcaattgtactggggacattaggctttattactgttattgggatcaatcagatatgcgttttctgctggttttgctcatggctatgtacacaagaaattttagattataaaataaatatgatggaccaatgtttccagctactacttccggtgtacatccttttttattatgtgtcacttcagatttggtctttgttcaaacctgcctataatatcaacaagaactaaaactgaaagatttcaacaagaatcatgtacttgcaaaaccattgttcaaaatccaagatttcatccctgaagtgttcgtttaaaagttaaggcaattttctgttccggattagcctttcggcctgcatcaatggttttaaacaatctggttggattcagttgccctatgagttacttttgtagtactgatgaatctgaaaatttaccctgagttctattgggttctaagttaatccatggtgtattcattcaaagttggcatcccataccacataccgctgagataatatattgctagtttggtggaactatttcactgattatcatatgttatcacatattggttgcatatttgtgcaaatggctgaaacaattctatttttatttagtcgctttgcctttcaagctatattattgtttcagactttgtgatgaactttcttgcaagatatctaaagcttatctcaaagttgataagttatgtactaatttcagtattatgtttgcttttgtcagggctagagaatatatgcattagtgtacttgaaacaaaacagggtagagtggcccaatggcactatttgtctttccaaatcgccactatgtcagtacagataaacgaatagaggtatgatcatttgtatatggtttagatttttcaacaatattgtatcaaagtattgttttcctcatatcttggactgtagtatgtccttgcaggatgtaaatgttaactcaagttacatttcatgaacatatttggatct

SEQ ID NO: 21155 - DNA, 1651 bp, Oryza sativa
  ref <308>: DATABASE ACCESSION NUMBER: AK071450
  ref <309>: DATABASE ENTRY DATE: 2001-12-06
gggcgtcgactccactctcgcctcctcgcgactcggagttcaccgccgccaccgcctccgccgccgatctccccgtcccgccgcgccgccgccaccgtcctccctcctccggccgcatccccggaattcagaaccagtaggaggaaatggctgacggcgaggacatccagccccttgtgtgtgacaatggaactggcatggtcaaggctgggtttgctggggacgatgcgcccagggctgttttccctagtatcgtggggcgcccccgtcacaccggtgtgatggttggtatggggcagaaggatgcctatgttggtgatgaggcgcagtccaagagaggtatcctcaccttgaagtacccgatcgagcatggtattgttagcaactgggatgacatggagaagatctggcatcacaccttctacaacgagctccgtgtcgcgcccgaggagcaccctgtgttgctgactgaggccccgctcaaccccaaggctaacagggagaagatgacccagatcatgtttgagactttcaatgtgccagctatgtatgtcgccatccaggccgtgctctccctgtatgccagtggacgtacaactggtatcgtgttggactctggtgatggtgtcagccacaccgtgccaatctatgaaggatatgcccttcctcatgccatcctgcgtctggaccttgctgggcgtgacctcactgacagcttgatgaagattcttactgagagaggttactccttcactaccactactgaacgggaaattgtaagggacatcaaggagaagcttgcatatgtggcccttgactatgagcaggagctggaggctgcaaagagcagctcatctgtggagaagagctatgagctgcctgatggacaggtgatcaccattggggcagagaggttccgatgccctgaggtcctcttccagccctctttcatcggtatggaagctcctggaatccatgagaccacttacaattccatcatgaagtgtgatgtggatatcaggaaggacttgtatggtaacattgttctcagtggtggatcaaccatgttccctggtattgctgaccgtatgagcaaggagatcactgccctcgcaccaagcagcatgaagatcaaggtggtggcaccgcctgagaggaaatacagtgtctggataggagggtccatccttgcctcccttagcaccttccaacagatgtggatctcaaagggagagtatgatgagtcgggtccagcaattgttcaccggaagtgcttctaagctctggctttttaatcgcttatctacaaggcagtttcttttcagttttcacaagcccttgtcatgtaagctactctgtttgggattgttggtgtcctatcagaatgttgttggatttgtttcatggctgaatattatgcaccttctgaactcttggtatgcatttgtccggtggctgctgtattatacatggcatgcatggtccaacttttgtcatgctaagtttgtggttagtggtaggaccaaaagaaaaatgggagatgtacccactacctaggatcgtctattgtaatcgtacttgtgcgagtcatgttatcatttatcttgtacattcatctccaagataagtgatctggttctttgatcgtttg

SEQ ID NO: 21156 - DNA, 1313 bp, Oryza sativa
  ref <308>: DATABASE ACCESSION NUMBER: AK071451
  ref <309>: DATABASE ENTRY DATE: 2001-12-06
gatgggtgcccgcgcggatcgcggcgcgtaggcagccggagagagagagagagagagagagagagagagagagagagagagggagggagggagaagacggcgggagagcagcgccaccgcccgcgcggcatggaccggaatgccggttccttcgtcgccatgcgccgcctctccggcggctcctcctgccacgacccctcgccgaacacgtacgcggaggtcgtggcggggtcgacggcgtggatcgggagggggttctcctgcgtctgcgcgcagaggagggacagcgaccagcgcatctccttcgatttgagccccgctcaggagtgttgtctgcagagattacagaaccggatagaggtaccgtacgatggttcaaatggagagcatcaggaagcattaaagaccctttggcatgtttcctttcctggaactgaacttttaggactagtatcagaccagtggaaggagatgggatggcaagggaaagatccatctacagatttcaggggcggtggctttatctctttggagaatttactgtactttgctaagaactatactaaatccttccaggagctcctttgtaagcagaatggtgatagagcattgtgggaatatccatttgctgttgctggtgtaaacattacattcatgctcattcagatgcttgatcttcaagcagctaaaccaaggtcgttgattggatcggtgttcttaaatctacttttagaaaatgatcgagcttttgacattctctattgcataacctttaagctcatggatcacaaatggcttgaaatgcacgccaattatatggatttcaatgcggttatcaaatctacacgacgacaacttgagagggagttactgcttgaagatatccaacgaattgaggacatgccatcgtacaggtttctcgaccgctagcaactgaattctcagtttctcacttaacctcgccacaggtagtaaatctcaatatacagtcacctgcaaaccaagtacagcgaactcgattcgtggggactccaggaccatggacgtgtaacgtgtgccaaatggtttgtgttttcacgttgaaactgtaacaggccttgtttgttttggtctgcttgtttataaaaggcaccactcagggttaacagggtatctgatcagccgatggtttaactagtgtatgtagagtgtccagattttcaacgagagggtttcacaatgcagagcgacaagttcttagatttctctgtaaaaaggaagatcatgtaagctaatctgagtctgaaatgcttcctagatccatttttttcatc

SEQ ID NO: 21157 - DNA, 1959 bp, Oryza sativa
  ref <308>: DATABASE ACCESSION NUMBER: AK071452
  ref <309>: DATABASE ENTRY DATE: 2001-12-06
gaggttcgtacgtataggatatttgatccattgatcgatggccgtcgacatggagctcgacggcggtggcgacggcaagggcaaagccccgccgcagataagcctgtcggggctattccttgcgtgcatggtcgccggtggcgtgcagtacggctgggcgctgcagctctctctcctcaccccgtacgttcagacattgggaattcctcatgcactcacttcagttatgtggctctgtggccctattgctggcttaattgttcagccatgcgtcggcctgtacagtgacaagtgcacatccagccttggaagacgtagaccgttcatcctcactggatgcataatcatctgcatatctgtgagaaaaacccaattatcatccaactactctcttcgtttcatattataaatcgtttaaacttttttttaagttaaacttgttttaaaaaattttgatcatcaaatgtatataaaaatatagtaatatttatagcaccaatttgcactacattcccagtgtcctgcaaccaaattgatagagagatattcgcggcagccacgaccatcaccctatgagatagaaagacggcgagtttctgcactcgcacaggcttgaaaacaagattcctaagacaatggcaccggccatctacgcatcttcaaggtgaaagaatcaaatagtttgcgaggccctctcctctaacactttgattcgtgacatctgactgctacaaatcacaacagtagatcacctaagtcagtatgtcgagctatggaccatgatccagagaataggccccttaggatactagagagacaccatcacttagaagtttacagcaaatggtgaatagtcggcaaaatcggcttatcagctacaattcctatgtgcagtaggaacggtgttcaatcaaacaatttggaaatgttaggcgcccctaaagtgcaaatttttcatatagttggtcatccaaaatagggtgtggacggctgataggctatagaagagaggttagcaaaaccaaagagtctgccccttctatagagtatcacaggaaacgacaatccatcttatcgcaaaatgcaggctctctataaggatttagacagccatacaacattgggcgagcatagacctcaaaatacaagattgggacgcttgcgcttcgatggaagaatggtggaagagggttcttcacacaccgcacatccccaaaggacctttaaaatccctgattatcctggtgggttgggagctctggtgtgagagaaacactaggatattccgccacgtggctaccaccctgacaaccatcatcgctaaaatcaaagaagaggggttggcctggatcaaagtgggatcaaagtgggagccgcaaaagctcgttgagttaacttcgttggaagaaccctatagtttctccttctgtgggctctttttttttatggcaggccctgtaaataactctttttttggttgtttgttttttctcctactctatcaatatatgcaaggtaaagctttcgtctttttttttaaaaaaaaagtgcactatatctaacaattcataaatttagttaaaactaaagtgacttaaaagttaaaaaaactaataatatgaaacggaggtaagtagttagttatttgattaactaattacatgactgacaggtgatcgtcatcgggttctcctcggacatcggctacgctctcggcgacacgactgaggactgcaagtaattaagctgctcgatcactgacagtgacagagcttgatgaattcgctgattaaatcattggtcgattagtaagcaaaatttcaggattcggactcgctaatcgagcgacttaatccatccagggtttacaggggtcctcgttaccatgcagcggcggcattcatcctcggattctggctgctcgacttctccaacaacaccgtgcaggtatgcagcctg

SEQ ID NO: 21158 - DNA, 1211 bp, Oryza sativa
  ref <308>: DATABASE ACCESSION NUMBER: AK071453
  ref <309>: DATABASE ENTRY DATE: 2001-12-06
gagcgtcctcaaccaatcaattgcaagcaatttctccatcacaggagtcaccaatgggctccgccaagctcattgctgtagtcctcctcccggcccttctggccttccaagctccaatggccacggcagtaaactccaacctcttccgggactacatcggcgccatcttcaacggcgtgaagttcaccgacgtgccaatcaatccgaaagtccggttcgacttcatcctcgccttcatcatcgactacaccaccgagacgaacccgccgaccccgaccaacggcaagttcaacatcttctggcagaacacggtgctcaccccgtcggccgtcgcgtcgatcaagcagagcaaccccaacgtgagggtggccgtcagcatgggcggcgccaccgtgaacgaccgcccggtcttcttcaacatcacctccgtcgactcgtgggtaaacaacgctgtcgagtccctcaccggcatcatccaggacaacaacctggacggcatcgacatcgactacgagcagttccaggtcgacccggacaccttcaccgagtgcgtcggccgcctcatcacggtgctcaaggccaagggggtgatcaagttcgcctccatcgcgcccttcggcaacgccgaggtccagcgccattacatggcgctgtgggccaagtacggcgccgtgatcgactacatcaacttccagttctacgcctacggcgccagcacgacggaggcgcagtacgtcgacttcttcaaccagcagatcgtcaactaccccggagggaacatccttgcgagcttcacgacggcggcgacgacgacctcggtgcccgtcgagacggcgctgagcgcttgccggactctgcagaaggaggggaagctgtacggcatcttcatctgggctgctgatcattccaggagccaagggttcaagtatgagacagaatcgcaagcacttctggctaatgccaccatcagttactagctagtagctagttttgtttgctgcattattgtttcacatttttaaacaaagatcacaagagctgtattatgaaaataagcaactcaaatttgaaatacgaatttgaattagcatctagtatatatctagccgtgcatcattccagctggaatttaagataaaaccccaaccgtgttatacgtacagacatgcttatgttgtgtatgtcattattggattgttcctgttttgttg

SEQ ID NO: 21159 - DNA, 1724 bp, Oryza sativa
  ref <308>: DATABASE ACCESSION NUMBER: AK071454
  ref <309>: DATABASE ENTRY DATE: 2001-12-06
gacacgtcgcctcgcctcgtctgcgtctgcgtctgcgtctgcgtctccgtctccaacccaggcggcgtaggggaaggagaaggaaggagagatcgcgcggcgcgctggctgtcgctgtcgccgtcgcgcaggctcgtccacctcgcgaaatcgtgagctcgcgcgccgctccgggcatgcagggcgccacgccgggcgatgccgctggagaggaggtgggaggcggcggggacgtggtgatggtgaggcgggcgagcgtggcggcgtgcctgacctgcccgctctgcggccgcctcctccgcgacgccaccaccatctccgagtgcctccacaccttctgcagaaagtgtatacatgaggagttcgtcgataaggagtcctgctgctgccctacttgcaacattgatctggggtgtgctccgttggagaaactcagagttgatcacagtatgcaattcgtaaggtcaaggatatttcctttcaaacgaaggaaggttgagaacccagaaatcatttgtccagttgcgtcacctgtcaagaggaaagaaagatcactatcttcacttacaatccctgctcctcaggtgtctatacagaaatgtttgacaaagaggagaacgaaagcttcgtgcttacgcaactttcctttgcattctacctcgaggggcagtaaagatacatcaaagaaacttgggggttggagaccattgggttgtcaacttaagcttggcaaagacaaaaaatctctcaaatcaagtgtaaaagatacaaacagaaccaaaagtaagtctggtgatacagatgatggtgctcctgctagtaaagcaaaggctagagaaccctttacaagatatgggcgtgcagctaagaggactggaagaaagaaattgctcatgttgaagaacaaaaagaaaaggttcaaggcaaagcagcccagtaaaaagaggagattccgagcactatggttttatctacttgctgcttttgaccagagggagtaccaactttaccacaactaccagcaaagtatttgaggatcaaggatgttgatttgcctgcttctattatacagaagtaccttgcacagaaacttaacctctcaagtgaaactgaggtaggagtgttgtgtggtggcaaagtagtgaaccaagggatgacactgcatgatctagcagattgctggcttgagaaaggaccaaagagccgaatgcgctcatcggtaggctccccggccactggattcatggtgacattgttctatagaaggccagatgtggatgtgtcctcatccccagctccaccccaacctgacactgaaagttgccatagctgatgcagagctttgcttcgtttctgaaccatctgtgattggcttcactcattgggctgtcagcccttgattgatctgcgaatcggttccaatttgtgtgaggctcaagccacaccaattcactaatatgtagataaatgctactaattttacaagccatgttgggcttctgatcatctaccttcttcaaccattattttccttttttttctcttcaaccattgtacctaggtatgtgatctgtaatgagatgttaatcgttaagtatcagttgttagagctagggacttcatgttgtctccacgtagctagtagtactagattatgcttgtgtatttgaatttgctggtgcattcatcatgcatgtatatatataagctctggaattccttgc

SEQ ID NO: 21160 - DNA, 3262 bp, Oryza sativa
  ref <308>: DATABASE ACCESSION NUMBER: AK071455
  ref <309>: DATABASE ENTRY DATE: 2001-12-06
gtcgctactgtacggccccctgcgctgcgccccccctcgtcgcgcacacgcacacacgcactcgcactactcgaaccacgcgaacccctctctttctctctctctctctctctcgcttaaatgccacaaacctaatcatttccacccctcttgcgctctctctctctctctccaaccccaccctttctccccaccatggtggcgatctccgagctcgggtgagcggaagggaaagaatgcggccgatttgaggagggggatggggttttcgggtggatttgtgaggggatagattaagagtttgtgcttctctggtttggtcggaggaggaggagatgagctcgtcgtcggcggccagcatcgggccgccgcagccgccgccgccccccgcgccgcccgaggaagagaagaagtgcctcaactcggagctatggcacgcctgcgccggcccgctcgtctgcctccccaccgtcggcacgcgcgtcgtctacttcccgcaaggccacagcgagcaggtggcggcgtcgacgaacaaggaggtggagggtcacatcccgaactaccccaacctgccggcgcagctgatctgccagctccacgatgtcacaatgcatgcggatgtggagactgacgaggtgtacgcgcagatgacgctccagccactgaacccacaggagcagaacgatgcgtaccttcccgcggagatggggataatgagcaagcagccgacgaattacttctgcaagacattgacggcgagcgacaccagcacgcacggggggttctccgtgccccgccgtgctgctgagcgcgtcttccctcctttggatttcacacagcagcctccagcccaggagctaattgcacgggatattcatgacatcgagtggaagttcaggcacatctttcgaggccaacccaaacgacacctgctaaccactggctggagcgtttttgtcagtgctaagagacttgttgctggagattctgtgcttttcatatggaacgagaaaaaccagcttttacttggaataagacgtgccagtcggccacagactgtgatgccttcctctgttctttcaagcgatagcatgcacataggtctccttgcagcagcagctcatgctgctgctacaaacagccgtttcactattttctacaacccccgggcaagtccatcagaatttgtcataccactgtcaaaatacatcaaggctgtttttcacacccggatatcggttgggatgcggttcaggatgttgtttgagactgaggaatcaagcgttcgcaggtatatggggactataactgaagttagtgatgcagacccagtccgttggcctagttcctattggagatctgtgaaggttggttgggatgaatcaactgcaggggaaagaccaccaagagtttctttatgggaaattgaaccattgacaacctttccaatgtatccatctctgttcccactgagagttaagcatccttggtattcaggagttgcttccctgcatgatgacagcaatgctttaatgtggctgagaggagttgctggtgagggaggttttcagtctctgaactttcagtcacctggtattggctcctggggacaacagaggctccatccatccttactgagcagcgatcacgatcagtaccaagcagtagttgctgctgctgctgcttcccaatctggtggttacttaaaacagcaactcttgcaccttcagcaacctatgcagtcccctcaagaacactgcaacctcaacccattattgcagcaacaaattctgcagcaagcaagccagcaacagataattaatcctgatgcccaaaatatccaaacgatgttgagcccaagtgctatacaacagcaactccagcaactacagcaaatgcagcaagttcagaatgatcagaagcagaagattcaaccagatcaaagctaccaagttcctacaagtgcagttctcccaagtccaacatcattaccgagtcatttgcgagaaaaatttggcttctctgatcctaatgcgaattcttcaagcttcatcacctctagcagtagtgataacatgttggattcgagcttccttcagggaagttcgaaagctgtggacttatctcgatttaatcagcctgtagctagtgagcagcagcagcagcagcaacaggcatggaagcagaagtttatgggttcacagtcagtgtcttttgggggctcggttttgcataactcacccacaagcaaagatggttctgttgaaaacaaaattggtcgtgatgtgcaaaaccagtccctttttagtccacaagttgactcttcatccctcctgtacaacatggttcctaatctgacttcgaatgtttcggatggcaacttatcaacgatcccttctggatcaacttatctgcagaatgcaatgtatggttgcttggacgactcttctggtttattgcaaaatacaggagagaacgatccagcaaccagaacatttgtgaaggtttacaagtcaggttcggttgggaggtcgttggacataacccggttctctaattatgctgaacttcgagaagaactgggtcagatgttcggcattaagggtcaattggacgaccctgatagatcaggctggcagcttgtattcgtcgacagggagaatgatgtgcttctccttggagacgacccttgggagtcctttgtgaatagtgtatggtacatcaagatactttcacctgaggatgtgcataagatgggaaagcaaggaaatgatccacggtatctgtcctgaagtgagagaacatggtgccatttctgggcttccaggaggattctgcagtgcatggtggcactcttgctctcgacaatgcacgtcgtcagaagtcccaaatttgtatcttgcatgtacgccgtacatgtttccagaactctctgttacctattcggtgcaggccaccggaaccacgaaacctgatattttgtaggttccacttaggaatcagtatcggtttaactcttatcctagatgatttgtaactcgcacggcagtccactgttttcatgtttcatcgagtcttcctagacattaaacttagttgatattgtatcaggatttatgtgtattgagattcctctacatgctttcaaccaaaaaaaactgcaataatcgaagcgcacgaggattgtttcaattcgtgttgtaggatctggattttcaccgattgtccggttatgtcagtttcgagaggagctgtcaatctg

SEQ ID NO: 21161 - DNA, 1450 bp, Oryza sativa
  ref <308>: DATABASE ACCESSION NUMBER: AK071456
  ref <309>: DATABASE ENTRY DATE: 2001-12-06
gcaggacggttaattaccaaaattctaaattagcgttcggtcaaaggaaaaaaaaaccttctctcctccccacgaataatcctcctagcaacctcccacctcatcgatctacaacacccgaactccgttgcacgtcgcgcgtcacccagatctcggcgtcagggtcgtggacgtcgatttcgctcccggccctatcggcgtcacaatcaccggcgatgatgcatcggccaccacggatcaccgccgacaagagcagcatccccgtccagatcgtcagccggcagcaagcgcaatctcaatgacgcgccatggatggcaaggcccgcgctgcttccatttcggccgctgatgaggtgagattccgtgtcgacgagagcggcgccgcgccggaggggatgagtgcgacgtgcagccggcggcaacgacgatgcagcggggcttcgagagaacgagagaaggcggactgacggaggagacggcgcgtgcgacaactgattacatggataatggagtcggagagcttccactactggcggcggcggcactaccgctcgatttaggaataggttgagaggatgagagtacgacacaaatacttagggttagtcaatgtctgttggagatgggccaaatgggctttctttcacttgcggctgctgctgcttgctagctaaatgggctgctgcttcctacttgccactatttcgttgcttccatgcggctcgtagctcgagctgactcgttatgtctaatgagctaaaagcttagctcggctcgttaacaaactcaaacgagtcgagccgagccgagccgagcttctcgttcagcactagagccatcagcgccatagtgcgagcttgaggacaaagaaaggcggaaagaagctgacgtgctcgagagcgcagcagccacgaaggaggtcgagagagggcgtcgtcgcgacgaccacacatgagcttgccccatgtgttggccggccaacctcctactggctactactctacagctatgccatggaactcgccttctgttgagaaaaaaatggagaagaagaggggaaaaaaaacagaggggcaagatgggagagaagcactttggatggaatgctaaaatgagatattttgacagtttagtgttgacaccgaatttcggcccactcgttccaaatcccagaacatccttgaatggaacgggcgcccctcgccgttccccgtcatgcagtgctccggccagtttcccggtgtcagtagccataacgagtgaccaacaagtcaacaaccatatcagtacgactgagagtgtcacgtcacgtgggatctgggtgtgtttagttcacgctaaaattagaaatttggttgaaattgaaacgatatgacagatggaagtttatgtgtgtaggaaagttttgatgtgataaaaaagtaaaagtttaaagaaaaagtttggaact

SEQ ID NO: 21162 - DNA, 1394 bp, Oryza sativa
  ref <308>: DATABASE ACCESSION NUMBER: AK099176
  ref <309>: DATABASE ENTRY DATE: 2002-08-28
gggctcctcctcctcctctcatcctctcctctcccactccacacccaggcacccagctcgagcgcgactcggcaaatccatggctcccacggcggcgtcggcggcggcgggggaggagcagcaggcggtggggctggcggcgcgcgactcctccggccacctctcccctttcgccatctcccggaggagcactggagatgacgatgtggcgataaagattctgttctgtggaatctgccactctgacctgcactgcatcaagaatgagtggaagcactccatctacccacttgttcctgggcacgagatcgccggtgtggtgacggaggtggggaagaacgtcaccaggttcaaggccggcgacagggtcggcgtggggtgcatggtgaactcgtgccggtcatgcgagagctgtaacaatggcttcgagaaccactgcccggagggcgtcttcacctacaactccgtcgacaaggacggcaccgtcacctacggcggttactcgagcatggtggtggtgcacgagcgcttcgtggtcatgttcccggaggcgatgccgctcgacgtcggcgccccgctgctgtgcgccggcatcaccgtgtacacccccatgaagtaccacggcctgaacgcgccggggaagcacgtcggcgtgctcggcctgggcgggctcggccacgtcgcggtgaagttcgccagggcgttcgggttgaaggtgacggtgatcagctcgtcgccggggaagaagcgggaggcgctggagcggctcggcgccgacgcgttcgtcgtgagcagcagcgccgaggagatggaggccgcgaggtccaccatggacggcgtcatcaacacggtctccgccaacacccccatggcgccgtacctggcgttgctgaagcccaacgggaagatgatcctcgtcggcctcccggagaatcccctggaggtccctcccttctctctcgtccacgggaacaggactctggcagggagcaacatcggcggcatggcggacacgcaggagatgatcgagctggcggcgaagcacggcgtgacggcggacatcgaggtgatcggcgccgacgacgtgaacacggccatggagcgcctcgccaaggcggatgtcaggtatcgcttcgtcatcgacgtcgggaacaccctccacgccgccgccgccgagtgatggcatcgcctgcaaactattcgtgtggtctgtaatctgtatgaaattgttcatggtacgtacacgatatatagattgtggcgtgtcatggcgtataggaatgaacccgatcgaggaagctattgttggtagtctgatgctagtcagctcagtgtttgactgtttgcatttacggattgaaattgagctttgtgtggcctaagttttattttcc

SEQ ID NO: 21163 - DNA, 1079 bp, Oryza sativa
  ref <308>: DATABASE ACCESSION NUMBER: AK071457
  ref <309>: DATABASE ENTRY DATE: 2001-12-06
gagcaaaatcacaattttctctccctcgacggcgccgcttcccaacgtccaatggcgagcagccggctctcgatccggcgggtgtagtctccgcggcgtcggcgacggcagcgggaagcttcagcttcggccagatcgacggcaccctcgccgccggtctccgatgggaccaggactatggcagtaaagatttggctggaacatccaatattttcagccaattgtctgaagatgtgattaccaaggatgcaaataactagcaacaagagcaggtatgtgcagagttgcagacatccgctgagactcaaccgaattcatccaggcatagaaacggaaaaatagaccatagcagcaatagttctgatcaggtagatgaagaatccaacattttgaagagtcttttatgttgctcagggattcatagtacataaatatgctgaaggaaatagcattgtcgcaaagagatgcaaaaggtgaaacatgggtgctgaagaataactgccagtaattttagctgaagctgaccgtagcaaagttttggttagtgtagcgaactgcaaacattaatttcattcagatgagacatgcaaatttgattgagaggaaatgtctcccatgtcttcttaaaaccttgtggaatggctagctggttctttttgtaggaaggacaaatctgaaacaagaagatgtaggtgacaggttgcgagctccaacaaatttggtgcaaagtttgttatgggaacctggtatggagtgtacacgggaaaaaggtatatcaacagaatgattaactgatcatgcttaatttgctgagaccttttacagtgtttgcatttctaaaatagtatagatctaacggctcacgatgaaaggtgccttatgaaaggtatcagaggtagaaaggtactaaggattaaaaggtaattgataacagggcaattatgtctaacaacgtatggacgtaccgaaaggtacggtgtaagtggatttgaaggtaccacaaggtaccgtgtaagtagtttttaaaggtaacgtaaaatatgatttatgtggtggggacaaaaattacattctcttct

SEQ ID NO: 21164 - DNA, 750 bp, Oryza sativa; identical to SEQ ID NO: 19809
  ref <308>: DATABASE ACCESSION NUMBER: AK071458
  ref <309>: DATABASE ENTRY DATE: 2001-12-06

SEQ ID NO: 21165 - DNA, 3577 bp, Oryza sativa
  ref <308>: DATABASE ACCESSION NUMBER: AK071459
  ref <309>: DATABASE ENTRY DATE: 2001-12-06
gatcagtagttaagttcatctctccatctgcacgacttcaagccatccaatgctacaatcttcagaggaaaacccaagattttcttggaatctttgagctcaactccatgagctctgtagagaacccaagcaatggcaggagcaatggccatgctcctgccaacgcttctgctgctactgctaattcggcacaagcgacgcagcaaggccaaaccgagcagaatccgtgcgacgcgggctccgaggccgatctcctgtggaagctgaggaagtacctggtgctgcttgccatcctagcagcggccatcaccttccaagccgggctagggccccccggcggcttctggcagcaggaccagcacggctaccacgccggcgacgtggtgctcaggtacagctacccgaggaggtacctcgtcttcttctactgcaacaccacggcgttcggggcgtccctcatcgtcctcatactgctcctcgtcaaggagctgagccgcgacgccatttggctccggtccctccagttcgccatggtgctcggcttgctcggcctcatgggtgcctacgctgccggcagctgcagggaggtgaggacctccgtctacatctgggctttgcttgttggcatctttgcatatatcactctccatgtcgtattcttccggcatctggcacctcaatggctgtgtgaaatattctacacgattcggaaacactggaaggagattctggggagtatacatggagatggaggaaccgataagacgggagaaactggggattctgaaaagacgaaacgtctggaacagaatcgcagcttcttgctggttcttgccacattggctgcaacggtgacatacactgcggggctaaacccaccaggtggattctggcctgatgacaacaagcctagccatcttgccggtgacccggtgctgcgagatcactacccgcgccggttcaaggcgttcttggtctgcaatgccactgcatttgctggatcacttgtcatcatcatcatgctgctcagcaatacagcagtggatcatgttgtcaagtcaaatgctctgcggttgtgtgtgttggtgagcctctttgggcttatgggtgcctatgctgctgggagttgcagggaagtccatacatctatatatgtctttgcccttgttggtgctgttttcctctacctctgtattcagtggatcgagcatatggtgccaataccttgcataaagagttccatggaatgggtgggaaaaaagaagacccatttacttcagaagctgggttctttcatcatgcgggggactaggaatcctactgaagaatcgcgctctactcccagagcacaaaatccagtgaacaacagaaggtcaggcacttccgatactgctaaggatgatgttgagaagttgcgcacatatcttctgttgcttggtatccttgctgccactgtcacataccaagctgggctaaatccaccaggtggcttttggcaagataataatggacatactgctggtgacccaatcttggaggccatcaatcccaagcgctacaaggcattcttctattgcaatgctaccgcgtttgtggcatctttggtgatcatcatcttacttcagagtcaactgattactgttggtgccatgaagcgtcacatattgcaaacagccatggcattagacctttttggtcttatgggggcctatgctgctgggagtagcagaaagttctcaacgtcagtgtatgtgttcatcttggtccttgttgttttcacttatttcacgcttcatgttctgctgtccatggctctcaagactcaactgaagacaaaaattgaacatgtgccaaacttattccatcgttttacgagattttgtttcagaagaactgaaggggggagtgatgatggacgaagtgattcggtggagctgcaaaatgaagaaaaagatttggagaagcggcgcaagtttctgatgatgcttgcgattctagcggcttccatcacatatcaatctggtctaagcccaccaggtggcttctggagtgacaacgatcgtcaccgagcaggcgatccagtgctccatgatgagtttccaggccgttacaggattttcttctacttcaacgccactgctttcatggcatctctggcagtgattctgttgcttgttaacaagaggctgtgtgacaagggtctgaagtcctatgctttgcgcgcttgcgtgctggttgatttgattagtctcatgggtgcttttgctgctggaagctgcaggagagtgtcgacatctatctacgtcattcttgtcgtcgctgcagtatttgcatatgtcatgattcaaatcctggttctacaagttgcagaacaaaaagtggacttactgaagaagcgccgttctggttttgagagctagcaaagatccatgactctgactggtccaactggaagcactgataagaaacgaacagaacacaaatggcgcaaagatttgatgctgattggaactcttgcagtcactgtcacataccaagctgggctactccctccaggtgggctttggcctagtgaccaaggcaaccattatgcgggagacccaatcctcaaggttacccatcctataaggtacaaggtattcttctattgcaatgcaacagcattcatggcctcaacggtcatggtcatcctccttctgaacaacacaataagcaagtacaagagatcactccttgccatgaagacagcaatggtattagacttgcttggtctccttggggcatatgcagccggcagctgcaggaagttcaagacatctgcatacatttttgcacttgtcatcgccgtgtttatctacatcgtcattcatgtattgctgtcatttgatgaggtcgcattgttagtgaaagagaagggaaagaaatggatgccatgccttaagatgtgggatcagattgaaacaggagcttcggatcaaccttctgctacgcaatcaggagctccacctgtgtaatagcatgattcattgtgccactattgtgacatttaaacaacctgtaaagcagatttgcgtttcattcttgtatagagtcatcgtgtagaattgttttctagggagcattctgagcctgtgaggtttgctgccatttctgttagcagattttggtaaaataacagaccaaacatgcctcaaatacttctattatcaaattttggtaacaccaaatccaaccccaaaatctgatagggtagcaaaccaaacaaaatatgacctggttcaaatctgaactgtgagagaggtagttatttctcagttgacaatttgtaggctactatttggaatggaatttatttacctaggtaatagggaaataggggaatatactttttttttctgggagtggccaatattaactaatattagcccacctaatcttttcttttacgggaaaaaaaaggacatatccacctagtggagaggggcgaaacattgtgcatagataagtcatttctcggcaggtatatgaagggagaaatgggatattctgtcaaaaccagaaagtaatatatattttg

SEQ ID NO: 21166 - DNA, 1233 bp, Oryza sativa
  ref <308>: DATABASE ACCESSION NUMBER: AK071460
  ref <309>: DATABASE ENTRY DATE: 2001-12-06
gatttcttttccctttcttcttttcttttcggccaagcagaaagtctactattcgtccccgctctactgttcatcttccagctccagacaaagccaggtctccttcttcttcggggaagtctatttcttatcacttccttcttttcttttcagcccagcaaaaagtctacctctcctgcccacgctactgttcatcttccagcgccagacagagcctgagccagccgtcccgagcctgtgcatcgccgcctcctccatcaaatccggccgatagtgtggctcatttcgaaaattggttgaggggaaatattcctcttatcctcctctacctatggcccccaaaatctgactttatccctttgaatccggcgcgaatttggattcattttcgagtttatctctccgccaaaccctaggttttcccggcatggttccttgcgttccaagtaggaatccatctccccctctgccgtgcctccctcagccccacctaatcttattcaatcctcccctatataagccgtcctctcccctcctgtttcctgtttttgttgcagccgcccctagcctcctcctcctcctgtttagccgcctcctgcaccctagccgccgctgctgcttgtcgtcacccctcgccgttgtcgtcttggtcatcgccgtcatcttctccacgtcgtcatcatcatcgtgtgttgccaccgaatcgtcgccgtcttcctcttcgatcttccccgcttgtcgtttccgttgtgtcgaaggttcgtgagtgcatcggaagtgttccagaagactaactggagaccgattattgcaagcaatagaggtggtgggtaccttagcagggtggacatatgtgaggcgaggatgcacaaggtgttttgaattcttacaagataggtcttaccaagctttgattcaaatacaagaatgcaatacaactttgcatttattctgcttggttccctgagcatttgtcttctcctagaccaagaagcgtggtatgaatttgcatttgttctgcttggttccttgagcatctgtcttctcctagaccaaggagcgtggtatgaatgttggagttattgtccactgctccgtagttgtctttttatttcctgtaaaaggttagtggattaaaaagattttatcatagcctcaatattatttgttcacatccatgctaaaaaggatttggattaaaaacttaataagcatggatcacattaatttgcc

SEQ ID NO: 21167 - DNA, 1200 bp, Oryza sativa
  ref <308>: DATABASE ACCESSION NUMBER: AK071461
  ref <309>: DATABASE ENTRY DATE: 2001-12-06
ggcttccccctcccctcctctcgctctcgcttgcggccgcgcgcgcgggcccccggtggtgcgagcagtcgtcgtcgtcgtcgtcatcgtcttcgtccggggccaggtggtcggggggcgaggcgatggcgtacagggcggaggacgactacgactacctgttcaaggtggtgctcatcggcgactccggggtcggcaaatccaacctcctctcccgcttcacccgcaacgagttcagcctcgagtccaagtccaccatcggcgtcgagttcgccaccaggagcatccgcgtcgacgacaaggtcgtcaaggcccagatctgggacaccgccggccaggagaggtatcgggcgattacaagtgcatactatcgaggggcagttggcgcacttgtcgtgtacgacgtgacacgccatgtcacctttgagaatgtagagaggtggttgaaggagctccgggatcacacagatgcaaacatcgtcatcatgcttgttggcaacaaggctgatctgcgtcaccttagggccgtatcggttgaggacgccaagggcttcgccgagagggaaagcacattcttcatggaaacgtccgcgttggagtccatgaatgtagaaagtgccttcactgaggtgctaactcagatctatcgcgtggtcagcaagaaggccctcgacatcggcgatgaccctgctgctccaccaagaggacagaccatcaatgttggtggcaaagatgatgtttctgctgtgaaaaagtctggatgctgttcatcctaaatccattatgtccatgagaaggaaccatatgctcacctgattatatcatgagtaattaaaaggataactttcttttgctgcctaacctggttgcctgtgagattttagtgttacatcaagaaggttggggctgttaaacccaggttgggaaaaagctaactttgaagtgtcagtggttttatggtttgcatttgtggtttcttcattggtgtactattgttccatgtaaattgacaggatttgagatcctccccacctttcactgcataacatatcccagtaaaatgttgttgtaattggatatcagactgtagctgattggcagcaagggttctaattagaagggctattatattctgtaactcctactcacaaatgtacaaaagtttgcatccttgaacttcttaccagcctgtatattacg

SEQ ID NO: 21168 - DNA, 1136 bp, Oryza sativa
  ref <308>: DATABASE ACCESSION NUMBER: AK071462
  ref <309>: DATABASE ENTRY DATE: 2001-12-06
aaaaaagaaaatctcccgtcccgtctcgtctcctccgttccctgcgccatctcgctgccgaacaggggagggccgtaggggtgccgatctccatctggcgagcagagcaggggagtggagggagtggaggggaggggatcctgttggatccgcccctgccatggccaacgaagaagcaacgacgtcaccccaggcatctgtggaggacaaggctaatcgcgtcttcttggatttcatgaccaaggttgcacagtatgatgagctagttgatgcaggaaaaagggctcttatgatgtttcatcaagagctaggaacctgatcatccatcgaatgcttcatttaacattttcgaagaccaaaactcctcacagagtcaggtgcaattagtgagatagtcaagtctaacctcagtgaccgaatgaggtcttatcttgaagctggttgcacccatcacaatgaaaccatccagaacatgaacaagttacattcttgtcaagagaaactcaatgaccatataagcaaagccaaattattgcttgaagaactccatattctggaggaagatgtttatagtaccacactaaaagcctgtctgagttccttaagacatatggatgattgccctgatgataatagtcttacaaatattttttctgaggatgaacagcaatctggggatttgctggacaaagcagtgtcctgtgcaagtgtgatggtcctggttcacaatatgttaaaactcgattatacgatgcaggagaagattgttaaggcattatgcattaaaacagcatcgtcagagctagagggctactgtcaaatgtgggatttgcgaccatacatcgatgacaatgtcatacaacttgcgtggcagtttgtttcttagagggtccaaagccactggagaagatgaagagaatcacacattcacagtttcacacagtgttgacaggcaggtgactttccaatgagcagcagtggtcatgataagcagcagcattagtcagtattgagtagtggatcaattgatgatgatccaacaatgaactacattcaaatggaactgtcaactgtacatatgttattaggacactaccaattaattttttgggtatgaagaggaattttatgaggcc

SEQ ID NO: 21169 - DNA, 1958 bp, Oryza sativa
  ref <308>: DATABASE ACCESSION NUMBER: AK071463
  ref <309>: DATABASE ENTRY DATE: 2001-12-06
gattctctcccttccctctcctctcctcccctcccctcccctcccacctctcctctctcgacgcgggttccggccggagctgccgccggagggcggcggcggctaccggcggtggcagaggtggctcaaggcggtggctgcgcggagggtggagccagcggcgggcttccctccctcctcccagatccgatggaggcggaggtagaaggcggaggcggcgcgaagggtggacgccgcggcggtgggtccgctgggaggggtgagggcggtggcgtcggcggccctcccctccggatctggcgaggcggctacgtccgcggctggattcggcacctccgccgtcgtcgctgtggtgcgacctcccccgttcccgaccccctatattggataaggaggggaggagggcgaaggggagggtgaaggcagttttggagggcggctacgccgggaggggggatggcggtggcggcggtggccagatgcggacctccgacgcgcgcggcggacggcgcgaagacggcgaacggtgagtcaccttcccgcctctccctctccctagcctctgcgtctccctcttcctctcctcccctcccctcccacctctcctctcttggtggagtggtggcgtggtgcggggactgccgttgccgacgaggccagctcggagtggcggaccatggcgcgagggagtgtccaacacgcaacccctcccatctgctgcctccgtgcctcctcctcctgtgctgacggctccggtggaggccctcttcgatcgccaccgccaccgtgccctgctacccccttccgcttccctttctccacccgtgtccctctcctccgagtagcgttaccggccgcagcccctctcctccgagcagcgttaccggccgcagcccctcctcctgagctggctgtcggtgccatgccgcgccgctcctcggatgagtcgatgatgccgcgacactgagccttcgtcggagagcatctgatttggccctttgtgcccaggtggagccgtgaaggtaatggccgccgccagccagtggaccaccttcttggtccccctacgacctgcgcgcgtcgatctactaccggggaacgccggatgcaggccgtcgtggctggatctaccagcgctggtgtacgacggcacgaagttttgcaatggcgtcgtgcttgggacaataggagttggtgcgattttgcgccttttgccacaaccaacctcaacatggtgaatttcgatgctttgcttgcttgcgcaaatcagcagatgtctttgatgcttgcagggtacctgtgcgtgcactgtgtatttgtctctgagaagttactgtgaaggaggtgacatctctcttcaagtatgttcaagtaggctagcgtgaaggttctcaaggaggtgaccaagacgaggaggtgcctgtgctggaggtgcccttggcgttgaccaagatcaagaaggcaaatcttgagacatcctcattctttgagactcttagagggacagagttcccggtcaggacatggatgcgcatctttgtgaagaaagaggattgagaatggtgtgtatttgtgtccttaacctttaaggggagactcatgaaagaagaaaaagattctagactttatggcctttctgtcccctcaatttctgccattgtttggatgccatgggaccatcaccagttcaaagctactgacagtgctctttgtagtggttccagacgttaccattgtatatatgtatctatttacatgtctaacttgatgcttatagagattatatttgttgtttatgtattttttttgtgagttattcccatatcaaactaatttagttgcgactttggagttgctggtatagtagagaattgaatggctctgctttttgtaagtgcaagcaattgtgttctttgggttttatactaattctcgaacttgatgatgttgggccggtc

SEQ ID NO: 21170 - DNA, 1486 bp, Oryza sativa
  ref <308>: DATABASE ACCESSION NUMBER: AK071464
  ref <309>: DATABASE ENTRY DATE: 2001-12-06
gacaatttgcaacacacacacacacatgacacaagcacacacacccctattcatacacatactccatatgtagccctttcttggtttctctctctagcagctactacccttcaatttccttaattctctctcttcttgttcttcttcttcctccatatagctagctagagagagagagagagagagagagaggaggtgatcaagggggggaggttgatcgatgtcgatgatgagcttcttgagcatggtggaggcggagctgccgccggggttcaggttccacccgagggacgacgagctcatctgcgactacctggcgcccaaggtcgccggcaaggtcggcttctccggccgccgcccgcccatggtcgacgtcgacctcaacaaggtcgagccatgggacctccccgaggtggcgtcggtgggcggaaaggagtggtacttcttcagcctgagggaccgaaaatacgcgacggggcagcgtacgaaccgagccacggtttcggggtactggaaggccacggggaaggacagggtggtggcacgaagaggggcacttgtggggatgaggaagacactggtgttctaccaggggagggcacccaagggaaggaagacagagtgggtgatgcatgagtacaggatggagggtgtgcatgatcaacaagcttccagcttctcctccaaggaagactgggtcctgtgcagagtcatctgcaagaggaaatcaggagggggtgcaacctccaagtcaagaagcctcaccaccaccaccaccaccattgtccatgacacatccacaccaacctcctcaccaccattgccacccctcatggacaccaccctagctcagctccaggcctccatgaacacctcctcctcctccgccatcgccgccgtcgccgcacttgagcaagtgccctgcttctccagcttcagcaacagcattgccagtaacaacaacaacagcaacagtgctactgtcaatgcacagcaatgctacctgccaattgtcacaggtagcaacaacaatggcatgagctacctggatcatggcctgcctgaatttggcagcttcttggacacccagagctgtgacaagaagatgctcaaggcagtgctgagccagctcaactccattgggggtgaggtgttgccaggcctgcctcctccatctgaaatggctgctgctgtcagcccttcttggatgaatcacttctagggaaaaatattattcagacaatataagaatagctagctagctagtagttgatcttcagtgtgtatgatgaattgatgatttgatatggtatacatacttatttgtgtgatggtacaatatttatgtgtgagtattaatagagcatgccatagtttttctgtaaggcataggaaaattcaggactaaaactatgtaatgattgctaaagtgtgtatactcagaaatcagaagtagaggtttgcgttgtcgaaaaattttcggacc

SEQ ID NO: 21171 - DNA, 1954 bp, Oryza sativa
  ref <308>: DATABASE ACCESSION NUMBER: AK071465
  ref <309>: DATABASE ENTRY DATE: 2001-12-06
gggtggcggtggtaggtgtgagacgaggagaatggaggccaccattacccgcttcctcgtcttcttcttcctcctcctcgtcgtcgcggtcagaggcgacgacccttacaggttctacacctggaacatcaccttcggcgacatctaccctctcggcgtcaagcagcaggggatactgatcaacggccagttcccggggcctcagatcgacgcggtcaccaacgacaacatcatcatcaatgtcttcaacaacctgccttccccgttcctcctctcatggcaaggaattcaacagaggaggagctcatggcaagacggggtgtatggtacaaactgcccgatccctccgggtggcaatttcacttacatcatgcagttcaaggaccaaattgggagctactactactttccttcccttgcattccataaggctgctggtgggtatggtggtatcagggtccttagccgcccggggatcccggttccatttgcaccccctgctggcgatttcaccatattggccggtgactggttcaagctcaatcacactgatttgcaaggcattctggacagtggtaatgaccttccaccccctgatgggcttcttatcaatggccaaggctggaacggcaacaggtttacagtagaccaagggaaaacttaccgttttagggtatcgaatgtgggcatagcaacatcagtgaacataaggattcaaggtcattccttgctgctggttgaggtggagggatcacacaccgtacagagcacatacacatcgattgatgtccatctaggccagtcctactcattcctcgtgacggctgatcagccaccccaggactacagcattattgtctcgacccgtttcaccaatcctgtgctcaccactactgctgtcctccactacagcaattcaaacggtgccctttctacggtagcaccacccccagcaccaacaatccagattgattggtctctcaatcaggctagatcaattcgatggaatctgacggcgagtggaccaaggccgaaccctcagggctcataccattatggccttgtcaacactacaagaaccatcaggcttgcgaactcaagggctagcataaatggcaagctgagatacgcggtcaacagcgtgtccttcattccagctgacactcctctcaaggttgccgacttctacaacattcagggtgtgttcgctctggggagcatgcctgacaacccaaccggaggtggcgcctacctgcagacagcagtcatggcagccaacatgcgagactacgttgaagtcatctttgagaactctgaaaactttgtgcagtcatggcacattgacggttacgcattctgggttgtcgggatggatggaggacaatggacacctgcgagtcgccagagctacaaccttagagacgcagttgctcggtacacattacaggtgtatcctcaatcatggactgcaatttacatgcctttggataatgtggggatgtggaacatcaggtcagagagctgggctagacagtacctcggccaacaattctacctccgggtctactctccggcgaactcatggcgggacgagaacccgatcccaaagaacgcgctcctctgcggtcgggcctcggggcgccggaccaggcctctctgaacctgaattggggatcagtttcatgtcacgaaggggtgacagctgataaactgatgagaatcagatgagagccaaggatacatgtggtgttcagattattgagccccaattcttttgacaagcttgagaagttgagaagattgtactcctagcatcccatttctgctattcgcattgttaagcaactgtagctaaaatgttgcagcgaattctttgtatggcaagcaaggataatcttgcttcctgacatttattgatagatgatataatatcgatatccacgcatatatattg

SEQ ID NO: 21172 - DNA, 1444 bp, Oryza sativa
  ref <308>: DATABASE ACCESSION NUMBER: AK071466
  ref <309>: DATABASE ENTRY DATE: 2001-12-06
gtgatcaacaaaaacacaaaaaaggggaaggcaggcagggcaggcgaggcgatcgaaggaagaggtttcatcatttcactccatttcccctgtttcttcttcttcttctgttcgtctctcgagggctcttcttcttcttcaatatactactagttggccttcctccctaacaagcaaggaaggaaggaagggagaaaggcgatcgatcctctactctagccaggatactcgtataggagtagttaggaggaggatagaagttagggtttgcggtcgggcagatccaggcggccgtggccataagggaatccgtctgccttggtcggtggatgggtgggtgatgaaggcagcgcccacggcgtctcagcacctcaagcgtcctaacctcgcccgatccgatccgtcgcccatgccggcgcccgcgcccgcgcccgccccctcgcagcaggggcaggggccctcccagaaccagaagctcaccaccaatgacgcgcttctctacctcaaggccgtcaaggataagttccaggacaagcgcgacaagtacgatgagttcctcgaggtcatgcgcgatttcaagagcggcaggatcgacaccgctggcgtcatcatccgtgtcaagaccctcttcaatggccaccacgagctcatccttggcttcaacgccttcttgcccaagggatttgccatcaagctccaggacctggagaagaagcctgttgacttcatggaggccatcaatttcgtcaacaagatcaaggctcgcttccagcaggaggaccacgtctacaagtccttcttaggcatcctcaacatgtaccgcttgcataacaagtccatccaagatgtttacggggaggttgcagcgctcttccgtgactatcccgatttactcgaggagttcaagcatttcttgcctgatacgtcaaccgctccagaaccggtaactgttcctagaggtgtttcaagcagacacgacgacaggggcccactaatgccctcggcaaggaacgcgcagatcattaagagggagagggcttatccatcaactgtcgatcgtgacttcagtattgatcgccctgatcctgaggatgatccccacagaaggcgtgttgacaagggaagggatggtaaggttgatcgcagtagaaaagattatgaaacggacgtgaaagacgttgaatatgacagcaaagatttggatggaggacaacgtaagcgcaaactagcaaggaagatggatggtgctcttgctgacacacaacaaggtggggttagcacctctacttcaccatacgacgataaggatgcattgaagagtgcatacacaaaggagttccgtttttgtgagaaagtaaaggagaagctagagcctgaagcttaccaggagtttttgaaatgccttcacatatacagccaggaaataattacaaggagtgaattg

SEQ ID NO: 21173 - DNA, 655 bp, Oryza sativa
  ref <308>: DATABASE ACCESSION NUMBER: AK071467
  ref <309>: DATABASE ENTRY DATE: 2001-12-06
ggcgcgagcgagcgaccgaggcggatcccccaccgtcgccggcgccggcgaagcggctgggcggcggcggacgcggctcaggcgagaggccgttcctcttcccggaggatggtgtctggctactactccaacgcgcgcttcagagatcagcacattgtaggatggttgggaagaaggtagactgcatttctaattgcagactcagcagcctccacctcccaattccttgcacctctgcaatgaatgctgacaccgagatgcttgagggaggctgtgcagaaaaatgtcgatgcagtcctcaatgtcataggatagctcccgcaactgatgtatccacaacttcacctgtgagttacagtcctccaactgtgataagtcctcaagtgcagccttcatgatgatcagctcgtctctcagggatgtgatgccggcttgaacacctctgagcttgctgtactccctcccaagtagaacgggactctcggtgacatgggagactagagagtagagctgtacttcgagcttgttggtgttgaagacacttgtgtggtgcttccagttatcttgcccagtggggtgtctatgtgagtatgcatgctgactctgtgacacagagtgcacagtctgagctccacttgttgagcaccttattttc

SEQ ID NO: 21174 - DNA, 2744 bp, Oryza sativa
  ref <308>: DATABASE ACCESSION NUMBER: AK071468
  ref <309>: DATABASE ENTRY DATE: 2001-12-06
gatcctctcatcaccaccaccaccccacctccttctctccctgtctttctccttctcctcctccttcctctcgctctctcctccttgacaaaatttcctccacccattcccttctccacccaccctgccgatctctctgaattcggtcgcctcctccgcaccatctttctctcctcctctcttctagcaatcggtcgtttcctccggttgttgtgctgattcttcgttctttctctccctctctctctctttctttcttcctctctctgccttggagaggatcaagaaacgaagggagggaggagaggagaggagaagggaaatcgagaaaagtctgttctttggtttggctcgtgtggttcttgagagctgctgtttggaaaatctctgcacctgttgctgaccacttgcttcaattgttgaaagagatgaacagcacctgagatgctattgccagacatcaattgataaagagcacatcttcagtaatgcaaggacagaagaactctgttgagcagcttgctgatgtgtttggatttgaccatgcatccagttcaggaaaccctgtcatggatcaacaaggatattggaacaacattcttggttcagtggagtcacataaccttcaaggttatcaggtgaaccgtagtgatggaactattccctatggaaacggtgtgcatcaaaatggcacttttttaggtttttgggaatcaggcgaagcaagtgcaagtggcagttcactacattttgggggctctaatgagatcaaagctgagcaacgtaatatcggtggtggcctaaggattggtgaaaggcgcttggtagctgagcgcaacctttctttggataatgttgatataggccttaacatcaatggtaatgatctatctggtgaaaattcaaatgtgaatggtgcttcacaaggctctgaactacatggtggctgctctcatactggttcaaatggtcaagcctctgagctgagattacatccatacaggacattcatattaggtgcagatcaacctgagccttttaattctttgaatggcagtgaaaatcctttaggtgatttttccttgatgccagaaggcattgatcagcgaccaggcagttccctggatggccgccggctggcatgcaagaggaaaaatatagaaggagttaatgggcagtgctcggcaggtgctagcactagtttttcccacaggaacgatagtattttccataacattgcttcttcgagtcataatccctctcctagtacaaatttaccctctcctaattgtctgttggttccaagcactcttgatgaacaactcccgcgttatggagctactacagctggattgtcatctagtagctatgatcctagtggaggcaataacaattcaggaggctcacaaagaagttttcggccaagaactagcctggctcaacatattggcccctatggtgtgtggccatcttcaagtactatcagacattccaattcatggaatcatcagccacctccctttcagagttcatttgatgaaccaccggaggtaattccagtggtcagtagcctgaactttcaataccagcatccaatgaatgtcgttcctggcattccacagatgtcacaccggttcactggtccaggggcctcatcatcaagaacaggcaatttggagaacagaattattggtagtgaggaatttagcgcgaggaatgtagtggctaccagcttccctgatgcagttcctccggccgcactagacatgaggcatttgataccagaaccatctagttggaatgtagatggcagagctactaccattccaggaaatgttccttcttcatcgagagctaataccaattcgatggttaatccaccagcaggctctccatttattgcccatcaaaacttgcatagacgtaatcctcgtaatttgtcagaggagataagtcgtttatctggagctcttcgtggccatcagcacccacgcctaaggtccggttttctgttagaacgacaaggtgatggtgtttggggtgttccgttgtcaactaggagcagggaaggaagaagattaattgagatccggaacgcgcttgaaatgattcacagaggggaaaatgtaagatttgagtccattttctatggtggagtcgacattcatgacagacacagggatatgcgccttgacatagacaacatgtcttatgaggagctattggcactggaagaaagaataggcaatgttagcactggcctcagtgaggaagaagtgacaaagctcctaaagcaaaggaaattctcatcatggaggttggaagcatctgtggaagaagagccatgctgtatctgccaggaagagtatgttgatggggatgatctcgggacactggactgtggacatgacttccatgttggatgcgtcaggcaatggctggttgtgaagaacacctgtcccatatgcaaaaatactgctctgaagtcttagaaaaagcacagggcagtaaacactgtgtgcttgttcgatcgcaagatcgtttagtgattcatattaccgtgccgttttttgattagaaattttttttgccattgacctacaaatttgattaaaaaaaaaggtaaaagaactggtccctgcaaactgccccctcctgcagtaaataatccctggaatctgtcgctctgcattcaactgaatatttatggctggtatattggatgatggctcaatatttttttc

SEQ ID NO: 21175 - DNA, 2115 bp, Oryza sativa
  ref <308>: DATABASE ACCESSION NUMBER: AK071469
  ref <309>: DATABASE ENTRY DATE: 2001-12-06
gaatctgaggcttacttaaccttagagagcttatagctatctctgcagctgcaaccaattggcatgtgtgtggcagctctcactagcgagaaataccgaagatatgcttacatactcccttcgtcttattttaaatatagttatggatttttgcatctaacgttttactgttcgttaaactttgggatactatagtacatataattaaactgtactagtagagacaaccagagaaacggaggagaggctctctctctagctactacctcaccatggccgtctcctcttctacctctacctgctccagcttctctctcctcctcctcctcctgctcctcgccgcggcgccatggcggtcaggcgaggcggcggcggcggcggcgagagctctcaacttcacaaggcaggatttccccggggagttcgtcttcggcgccggcacgtcggcataccagtatgagggggctaccgatgaagatggaaggagcccaagcatctgggacactttcactcatgcagggaagatgccggacaagagcaccggcgacatgggcgccggcggctaccacaaatacaaggaggacgtcaagttaatgagtgatactagcctggaggcataccggttctccatttcttggtctaggcttattccaagaggaagaggacccgtcaatccgaagggactcgagtactacaatagcctgatagatgagctagtcgaacgggggattgagatacatgtgactctctaccacctggatttccctcaaattcttgaagatgagtaccatggctggctcagcccaagggtcattgacgatttcacggcgtacgcggacgtgtgcttcagggagttcggcgaccgggtgaggcactggaccaccatggacgagcccaacgtgctgtccatcgccgcctacgacagcggtgccttcccgccgtgccgctgctcgccgccgttcggggccaactgcaccgccggcaactccaccgtggagccgtacgtcgtcgcccacaactccatcttggctcatgcctcggttactaggctgtacagggacaagtaccaggctacacaggagggattcgttggcatgaacatctacagcttctggaactaccctttctcctccagctctgcagacatagcagcaactcagagagccttggatttcatggtcggttggatactggaccccttggtttatggggactaccctgaaatcatgaagaagaaggctggttccaggattccatccttcaccgaagaacaatctgagctgatccgtgggagtgctgatttcattggaataaatcattacacgtcggtgtacatcagcgatgcatcgaatggcgaaacggtgggccctcgagactacagtgctgatatggcagcaaccttcagaatttcgaggaacgatacgccgagtggtcagtttgtccctactaggctcccaagagatccgaaggggctgcaatgtatgctcgaatacctcagagacacataccagggcattcctgtttatattcaagaaaatggtttcgggcatttcggtaaggacgacgattcactcaatgacacagatagagtggactacttgagtagctacatgggaagcactctagctgcactaaggaatggagccaatgtgaagggttactttgtgtggtcatttcttgatgtgtttgagctgttagcaggataccattcgccattcggcctgcattatgttgattttgaggaccccaatttgccaaggcagccgaagctctctgctcactggtactccaagttcttgaggggtgaaattgggataaacatcgaaagcacgattagtcccgatgaacatgaacatgaacatgctgatcaatgagcttatcgggagtgcatgatgttcagctgtaggggatgaagaaaacactatcatagtgttttttactacctttctattcttctttcgtttgtggaacatttctttcataggattcttatataattagtcattactcacagttaggtgtttactgatgagttatattctcctcatttgtagacagtcatgttcttattgtcatggctcattacagctgaatagagaaaatcggaaatttgcc

SEQ ID NO: 21176 - DNA, 1166 bp, Oryza sativa
  ref <308>: DATABASE ACCESSION NUMBER: AK071470
  ref <309>: DATABASE ENTRY DATE: 2001-12-06
gggagagaacatatcaatggatcagaggattgagcactcctacctgcccatcagaggcctgaagcttcacatagctcacattggaaaaggtgaagctgcaactctgctcttcgttcatggcttccctgaggtgtggtactcatggaggcaccagatgattgcagcagcagcagccgggttccgtgctattgcacttgatttcccaggctatggcctctcggagccaccggctgacctaacacaggcgtcatggcagggcctgatgaatgacctcttggccattctagactcgctgtcgattcccaaggtgttccttgttgcaaaggattttggagtcaaaccagcatatgatcttgccctctgccatccggaccgcgtatgtggtattgtgagcttaggtgtgccacctcttgtggaaagcctcagtttcagtggacttcctgagggattttacatacacagatggagggaacctgggagagcagaggcggattttggccgattcgacacgaggaggatcttgcgcacaatctacatcctcttctccaggagtgagattccagttgccaagcaaggacaagagatcatggaccttgcagatgaatcaacaccgatgcctcagtggttcaccgaagaagacctctcagcttacaccgacctgtatgagaaatcaggtctcatgactgctatccaaattccatataggaccaaggctgcaaaagcagaaggtgctaatccaaggtttgaaatgccaatgtttgtgattatgggtcagaaagactacatcctcaagtttccagcactgaaggaatatatgtcaagtgaaaaactgaaagaaattgctccagactacgggatcacttacatcccagaaggatcccattttgttcaggaacaattccctgacctggtgaatcagcttgtgatagacttcgtcagtaaacatgcatgagatagcaacaaaaacaaggtgcaatttgacaaatccccagactgcaaaaggtaacagttgagcactgcgttcactgatgtgcaccactaaagagttgacgttgtaacgtcgtgctcatgatggtatcgcaaactattttagtgttgtataaataaatgtgcaactgaagaaaattatcctctttttttcagatttaatactacaaatttgtacc

SEQ ID NO: 21177 - DNA, 4009 bp, Oryza sativa
  ref <308>: DATABASE ACCESSION NUMBER: AK071471
  ref <309>: DATABASE ENTRY DATE: 2001-12-06
gagatcctgaacaattacaagtagcttcctactattacgactagtaccatcaaactacttcatccgactgagagctgagctcagacataagagagtaatggcgacgatgcttgtgggtgtttctacaggagtaatgaacaccctcctgtccaagctctccaagattttggaggacaaatacacaaagctcaaaggagtacgccgtcaaatcgcattctttagaaatgagttgagcagcatgaaggctgccttggagatgcttgaaactgtagaggaacttgatcccctccagaaggaatggagggacacagtgcgtgagctggcttatgatatcgaggactgtattgatcccttcttggttcttgttgatcagaagcaagatgaacaatcaacattctttaaggggttctcctacaaactgaagaagatgaaggctcgccatgagatctctaatgagattgaagaactgaagacacgcgtgatagaggcaagcaagaggcacaagagatataattttgttggtctacaatccagccatggcacttctggtattgaccctaggctgcgagcactctacgttgaggttgatgagcttgtgggaatcaaaggaccaaaggagcatgtcatggagtggtttgccaaggggagaggtgatgtagaagtgaaggtgttgtccgttgtgggttctggaggtctgggtaagactactcttgccaaccaaatcttccgtcaattgaagtgccaatttgaatgcacaggttttgtatctgtgtcacgaagtcctgacataaagagtatttaaagacaaatgcatactgaggtagggatcactgatgacacatctgaagatgagcgacaactgatagacaaaataagggaccacctcaaagataaaaggtactttgttgtaattgatgatgtatgggatgttgaagcatgggaagctgtgaaacttgccttgttcaataatagatgtggtagcagaaccgtcatgacaacacgtaatgcagcagttgcatcgcattgctcacgtggtggtgtttgtgtctatcaaatggaaccccttagttttgctgactccaaaatgttgttttgccaaagagcatttcgttcccaggaattatactatccccatttggaagaagtttgtgatgagatactggcaaagtgtggtggattaccattggcaattattactgtatctagcttgttagccggcaagcatgcaaaagatgaatgggacaggatgctaactgctattggccatgcacttgctaagaatcctgatgctgctaacatgacaaagatattatctctcagttactttgatcttccccaccatctaagaacttgtttcttatatttgagtgtatttccagaagattacaagatcagcaagcaacacttgataaatagatggattgccgaaggatttgttcatgaagaacaaggatggaggacctatgaagttggcgggaactattttaatgatctcatcaatagaagtttgatcgaaccagttgatataaatgatggccaggcgaaggcatgtcaagttcatgacatcattcttgatttcatcacatgcaaggctgccgaggaaaatttcgtcacctcagtgaattctgtggagcatgggaacatttcagaatgcagagttcataggctctgtgtcaagaatcacaataatgaaaaggttagcaaaccaacaagcctgaatgtcactcatgtccggtcacttaccatgtttgggcatgtcgatggaatttccttgtttgctttcccaattttgcgtgtgttggacttatcatattcactgttaaaagacaaacatcttaaaaatattgaaaagttgcattttctcaagtatttatctctccggtcaacattaataactaagctcccaagaaagattggacaactgaactgtctagaaacactggacatatcttatactgaaattctagaactgccgctaagtattgcaaaacttgagtgcctggccaatctatatgttggaagagggactagatttccggacagattaattggtaagatgcatagcctggtagaactagaggaatttggcgtgtcatgtgaactaggcaagtctctgcaaggattcagtcagctatcaaagcttaggacgttgaaagttcatcttttttggtggtcagatgctgaggagtgtcaaaattacgtgtcagctttgctatctagcaaccttcatcatctatatttgaccggtggcccactgatcatggagaagtggtaccctcctagtccttgcatcatccggaagcttcatatcataggctgttacatccgtaaggtcccaaactggatgagctcgcttggaagcctcactgaattacaactctggatccatagaatgggaccgaatgatattgagatccttggcgcaatacccagcttgtgttttctcaaacttaaaactatgtgtggcatcaatggaaggatcatcatatgtagcaacaaaggattcagaagtctgacatatttctcattacgaatcaagagatgtgggaccttgctagagtttgaaccagaatcaatgccaaagcttgataacttccaagtggaattccgtttacatggaatggattgcctgaatggtgcttctgatttcggcatccagcacctctccgcccttaccaaagtcaagatcggtatttggggcaacatttgctctgatggtatttatgatccagaacaagatatgaacaatagcatcaccaggtctgttgttagcctaatcaaagctgccatcgagaagcttcccaatcatccaactagcagattccatttagagtatgatcatggaagttgtttattgggtgagacaagtcaagagtttgagggtcagggtccagatgaggcctatcctcgccagcataaaattttttcactacgggaactagaagatgcaacaaattgctttagcgatagcaatgttcttcaacgtggtcgattcgacggcagcatgtacaaaggaagactaggagatggctcattagtagctgttaaaaaggattatataagccgggctttaagcatgggttatccaaacattgattggagaacatggcactttcaaacacaagttgagatgcctgtgcatagaaacctgatgcgtcttcatggattctgcataacgccaacaaaaagaacggccgccatatgaacctccacttgattggcgaacaaggaggaggattgcattgggttccgccaggggactgtcctatttacatgatcattgtgacccaaagattatccatcgtgatgtcaaagctgcaaatatttcattagatgaagactttgaagccttagtggggggttttggtttggccaaactaatggatcacatggataccgatgaaccaaatgcagtacgtggaacaattgggcatatcgcaccagaatatctttcaactggaattatctctgagaaaactgatgtatttggttatgggattatgcttttggagcttattacaggacaacgtgcctttgaccttgctcgtctagccaatgatgatgacgtcatgctactggactgggtaaaaggattactcaaggagaaacggctggagatgttggttgatccagatctacagagcaactacattgatgttgaggtagaatcactaatccaggttgctcttctttgcacacaaggctcccccacagaacgccctaagatggcggaggtggtgaggatgcttgaaggtgatggccttgccgagagatgggaggagtggcagaagatagaagtagtacggcaggaggtagagcttgttgggaatagtcacacattgtttatttagagagagttgaactaacttaaaagtggggggagtcactcacctcttgatgtagcttttggggtgtagcaaggctttctcccttttgggatgtagcaagactttcttccggttgagccaacgtctcctgattttgggccctcagagcttggccctcattg

SEQ ID NO: 21178 - DNA, 1230 bp, Oryza sativa
  ref <308>: DATABASE ACCESSION NUMBER: AK071472
  ref <309>: DATABASE ENTRY DATE: 2001-12-06
gaaccgaccgaccttcctggtggtggatgttctagccaagaaccctaaaaaaaaaattccccatctcctcccaatctgattcctctcgagacggcggatccgagcaatctctccggcggaggcggcggcggcggcggctgacgagggaagatgaatcctctgacgcaggtgaagaggacgcaggtaatcaaccagaaggaagcgcttctgggcatcggcgaggacgggtcgtggcacgccaagttcaaggactccgcctacgtcttcgtcggcggcatcccctacgacctcaccgagggcgacctcctcgccgtgttcgcgcagtacggcgaggtggtcgatgtgaacctcgtgcgcgacaagggcaccggaaaatccaagggatttgcgtttcttgcgtacgaggaccagaggagcacgattcttgctgttgataatttgaatggagctaaagttcttgggaggattgtaagagttgatcatgtgagcaaatacaagaaaaaggaggaggaggatgaggaggagctgcagaagaagagggaggcccgtggcgtgtgctacgcgttccagaaaggcgaatgcaaccgtggagcttcctgcagatattcccatgatgagcagaggaatgcaaacactggttggggttctaaggaggagagcaaagcaagatgggagcatgacagacaccatgagccaccgatgagccacaagaagttcccttcgagtgctggggaacaaaggttccctgacagagctaaagaggagaacaaatcaactggcagggaagggcagtcctcaagatcggaggcatacaaagaccatgattccaggcttaggcatagtgatagaggttcaaaagatcatgacaggtataggcatgatagatcacctgagagatcaagaggtgataggcagagaaacaatgacagatatgcccaaggaagagatgaaaaatcagaaaggtacagatctgaagtgaaacatgatgaaggagaccagaagcgatcaaggcgggacactgattctagtggacattatgaaaggaggggtaacgaagattcagaaaggtacaggaaatcacggagataaaatttggatttgttgttgcttcagacgttgttctgatctgttcgatgtttgttcttgtacgagatggataagatttttgtttgatccttgggtctgatattagtctaatagatgccatagattacatttgagatgattttg

SEQ ID NO: 21179 - DNA, 1668 bp, Oryza sativa
  ref <308>: DATABASE ACCESSION NUMBER: AK071473
  ref <309>: DATABASE ENTRY DATE: 2001-12-06
gcgattcaccctcaccgatctcgcgacgatgggtgatgtggccgcaccagctgcggcggcgcgggcggcgaggccgacgagcccgttgcgcccgcccaaggcgatccgcagcaccaagccaaggggctcgacgaggagaccgtcatggcaccattcgtcaagcaccttgtctcggagccggcctgctgggatgcgcctgcgtcgtcgtcgtcgttgtcgagcgcctcgtctcggagccggcgagccagactgcgcctgcatcgtcgtcgtctgctcccccggcaaggtccccggccaccgcccccgtgccggtcgtcaccccgcccaccgccgcatcgctgtggccaaccctcgctgccaccgccaccgacctcctcccggagcgctcgctttcatctccttcccccgtgccgctcgtccctccgcacttcaccatcggctccccggctgccgattcccctcagccgtcgccctcctgggctcgccggcgtccatggcggagaagctccccggctgctaattccctcgacgacggcggtgagggtgctgcgtccgccggcaaggacgacgaggaacggacgggtcgcggcggctgctggtggagcagcgagagatggagggggggggggatcactggctagctgcagtggcaaggaccagcgagttcgaggtggagtgctcgccggtgtccatggtggagaagtgaagaaaggaagagggagagagatgacggaggttgacagaaaactggatggaagtggcatggttccaatttccccaaattctagtggcacgtagccgatatgctcaatagtagtggcattttttcgaattggcatatttgcagtggcatggatccaattaacccttttttttcctctgcttgaagctttctagtgtcaagttatcaacaatgtttccagtcatcagcgtgcaggtgttaggagacaagtttcttttcagtaaaaatattaaattctactagtacatcttttgattagaactgtatgtccagcttgtgatgtacctaagttttgttaacatatgtctgccaataacagcattagtaatcattattgaagaactaatgtacgtcttgtttgcagcctgtagaccagcaacaacgcctttcgcaatgcttcgagaagctgatgtctgatgttgctaggaacttggaaccaaagaacagagataaattcactaaaaatcttacaacattcaggcatgatttccgtgtgaagaacattcaggcatgacagctgttcaggaccagctaccagctttaaggttagaagaatagaaaaaaagttgtaaatggttgtgcttcctgttgctgtcaatgctcaaattggaagtgaggagacggtaaatttgctccttgagcttcaatacagcatttttcttttggaggtgctgtccagagttttggagctcgacggcgccttttgcctatggacctatggaaggcagttcttcagtcttgcccacggtatttgttgattaatcttgttctttagtcttcttcagagttcagattgtttagattgtctgattttccacttgctcttaagatgtattataggttaatatagctagttgggtttctgttctggtttccttggtttgacactattcaggttactattcttgattggtttcaaacttccc

SEQ ID NO: 21180 - DNA, 2066 bp, Oryza sativa
  ref <308>: DATABASE ACCESSION NUMBER: AK071474
  ref <309>: DATABASE ENTRY DATE: 2001-12-06
gatcgacctcccctccccttgcagatctgatcggcgacggcgatcgccggaccaccaccgcccgccgccatggcgctcaccctccgcaagaagcagctcgattcgatcgtgaggatgctgcatctgaaccagcagctgcagggctcgccggacggggtcggcggaggggtggggtcggcggaggaggaggaggcgtacaagatcctggtgatggactccccctgcgtcgcgctcctcgcgccggtgctccgcgtcggggagctccggaggcacggcgtcacgctccacctcaacatcgacaaggcgaggcagcaggtccccgacgcccccgccgtctacctgctccgccccaccgccgccaacgtcgaccgcgtcgccgccgacgccgccgcgggcctctacgcctccttccacctcaacttctccacctgcgtcccgcgggccctcctcgagcgcctcgcctccgccaccgccgcctcccgctccgcgcaccgcgtcgcccgcgtcgccgaccagtacctcgacttcgtctgcctcgaggaggggctcttctccctcgcccagcccagggcgtacgtcgcgctcaacgaccccgccgccgccgaggccgacatcaccgcgctcgtcgacgccatcgcgctcggcctcttctgcgtcgttgccacgctcggcgccgtgcccgtcatcaggtgcgctggcggcgggccggcggagatggtcgccgccgcgcttgacgcccgcctccgcgatcacctcatcgccaagcccaatctcttcactgaggccgcgtccacagcagttgcatccttccagcggccactcctgtgcctgtttgataggaatttcgagctttcggtggggatccagcatgattggagctaccgcccgttggtccacgacgtgctcggcctgaagtcgaacaaattgaagttgccagagaagtatgatttggatgacactgatccgttctgggtggcaaacagctggttgcaattccccaaagtggcagaggaaattgaggcccagcttgccaagtacaagcaggatgtggatgaggtgaaccagcgcacaggtggtggcagggatggtgttgagtttgatggcaccgatctcattggcaacaccaggcatctcatgaatgctgtgaactcgctcccagaattgacggaacggaagaagatgattgacaagcacacgaatattgcaacggcgctgcttggccatatcaaggggaggtctctggatggatatttcgagtgtgagaatagtatgctcgtggatggcaccttggaccggaccaagttgatgaacctgctgagagggaacggcaccaaggaggataagctccgactggctgtgacctacctgctttccttcgagacaccagtgccatctgacttagagcaggttgaggccgctctgcgtgagtcagaagtggacatgtccgcgtttcagtatgtaaagagaataaagtcactgaattcccagttcgctggtgcatcaaacaccgcaagcaaggttaacatagttgattgggcagaaaagctttatgggcactccattagtgccatgacaggtgtgaggaatttgttatcagatggaaagcagctggccgctacaagggctgtagaagctttgatggaggggaaaccaaatcctgaagttgacaactacttactatttgatccacgggcccctaaatcaggaactgctggacagttcagaggacccttcagagaggccattgttttcatgattggtggtggaaattacattgaatacaggagcttgacagagctaacgcaacgttcacagactaccaagcaagtcatatatggagcaactgaaattcttaatggggtggagtttattcagcaactctcagaactggggcagaaagcagggttgggtggtgtcagcagcagcctgccaccccagtaaacaggctccttcaagatattttgatgttaatgggtgtttaaagcttcctagatcagtggtatcttaccagacttttgatgttaaagagtggtccagactgcatagatcaatggtatccaatttcc

SEQ ID NO: 21181 - DNA, 1310 bp, Oryza sativa
  ref <308>: DATABASE ACCESSION NUMBER: AK071475
  ref <309>: DATABASE ENTRY DATE: 2001-12-06
tgagggctagggctagggtttgaggtcgggcgcgcgcggcatggcggggatacggtggccgcccgaggacccggagatcttcccgtcgaggatggtgaccggcggcggcggcgggggcgcgggaggaggaccccccgggcccccgggggagatggcctccgacgacgaccggtcggtggcggcggactcgtggtccatcaagagcgactacgggagcaccctcgacgacgagcagcggtacgccgacgccgccgaggtcctcctcgcctcctcctcctcctcctccgccgccgcctccggccccgccgccgccacgacggcgtcggtcgccgccaacccctccggagatttcagctttgacaaggacgtgccagactccgccgatatggagccgccgttgctgggcctgccgaattatcatcaggatggttcttatgcagaataccttgctaattttcaagaacggagccacacagatgactggtttggcacggagaacatggatgtcctcgtaagctggacgaaaaacttatgttccaacaaggatttgcgtagctgcagtgtactcgacataggaactgggagcggtcgactctcgcaacagcttgcaaagcaagggttctctgatctgactgggatcgaccacagtgaaggtgcaattgaggttgctcgtaatcttgctatccgtgatgggtttgagcacattaatttcttggttgatgatgtgttagagtcaaagttggagaggagatttgaacttgtgatggatgaaggaactctggacacgattgggttgcaccccgatggacctgtaaagagaatgatgtattggcagtcggttgcagggctggtttctcctggtggcatactggtcatcacatcatgtagcagaaccaaggatgagttggtccaggaggtagagagcttcaaccagagaaagctcagtgctatgggctccgaaggtgcgcaggccagtgatactgcggtgttcaagtacatcgaccatgtccaaacgtaccccatcgtggatagttcctgcatcacgaccgttgctttctcgcatagctgaaacatatatgtatgctctctctttttctccctaactttgccatcccagtgtgtatcccctttaccctagttctcttcgggtgatagtctactttgccagataggttattcagttgtaacgttgctttgttatgtcttgaattcttgatggatgtactcttttgaaagcgtgacaagcaacactattacatcagatatgcagaactctgtgctatgaaagctgaatcaacaattcaccaatc

SEQ ID NO: 21182 - DNA, 1518 bp, Oryza sativa
  ref <308>: DATABASE ACCESSION NUMBER: AK071476
  ref <309>: DATABASE ENTRY DATE: 2001-12-06
ggtccccaaacccgagcacgccaccgagccctaaccctagcctccgcgatgtcgaccgccgccaccgccccgccgcccgccgcggtcctcccggcggctcccccgccgtcctaccccgccacctccgcgccctccgcctccgcggccgccgccgaggacgacgacgacctctacggccgcctcaagtcgctccagcgccacatggagttcgtcgagatacaggaggagtacgtcaaggacgagcagaagaacctgaagcgcgagctgctgcgcgcgcaggaggaggtgaagcggatccagtccgttcccctcgtgatcggccagttcatggagatggtcgacggcaacaacggaatcgtcggatccaccaccgggagcaactattatgtgcggatcctgagcaccatcaaccgcgagctgctcaagccctcggcgtccgtggcgctgcaccgccactcgaatgcgctcgtcgacgtgctgccgcccgaggcggactccagcatctctctgctcggatcatcggagaagcccaacgtcacttatacggatattggaggatgtgacatccaaaaacaagaaattcgggaggctgttgaattaccgctgacacatcatgagctgtacaagcagattggtattgatcctccaagaggtgtgcttctgtatggtccacctggaactggcaaaactatgctcgccaaagctgtggcacaccacactactgctgcatttatcagagttgttggttcagagtttgtgcagaagtacctgggtgagggacctaggatggttcgagatgtattccgtttggctaaagagaatgccccagctatcatattcatcgatgaggttgatgctatagcaactgctcgttttgatgctcagactggtgctgaccgagaagttcagcgtattcttatggaactactcaatcagatggatggatttgatcaaacagtgaatgtgaaggttataatggcgaccaacagggcggataccctagaccctgctctgttacgtccaggtagattggacaggaaaatcgagttccctcttccagatcgtcggcagaagaggcttgttttccaagtctgtactgctaaaatgaacttgagtgatgaggttgatttggaagattatgtttccagaccagataaaattagtgctgctgatattgctgctatctgtcaagaagctggtatgcatgctgtgcgcaaaaatcggtatgttatcctccccaaggacttcgagaagggttaccgaaccaatgtcaagaagcctgagactgactttgacttctacaaatgaggcaacatattgttgaactgcatgcttgttcccctccggagctatcattaacattaaagatgatttcctggatagtcgcctcagcgatatttagtttatgtacctagaggctcgtcagtgccccaatctgttttatcaggtctgtaatttcaatttgtgcttgtacttgctggaaaatagaaaggtttgcacggtcaatccttttgatgg

SEQ ID NO: 21183 - DNA, 922 bp, Oryza sativa
  ref <308>: DATABASE ACCESSION NUMBER: AK071477
  ref <309>: DATABASE ENTRY DATE: 2001-12-06
gtcctaccccggcaaatcaccgcgccctccacccggatctcttccctatccccttgcgcgatctcctcctccgtggctttatcctatcgctcccctcaagctgttctgccgccgtcgccgcccacggtttgccgccgtcgtctcaggcgcagggacttttgcccctgccgctctcgcacccccggcggcgacccgtctccggcatgaggaggcggcacagcgcaccgggaaggcctcgcggcggcgcggcgcgtggctgcggatccgctgtgccgccgccggatctggccctttcgtggctggatctggcccgtcaccacctgatctggccggtgagctgacggagcggtcgacggcggctggtggcgtgaggacggcggcgtttggcgggggagacggacgacgggagacgcgggcgacggcgcggctggccggtgagacgccggtggcagcggctgatgacatcggccgaggagctggcgtggttggcggtgaggctggcggctggctgggcgccgccgacgtgcttgggcggcgttgggcgaagagccggggcggccgtgttgcggcggcgtacttggtggtggcggcgtcggtcgaagccagggcggttttgctgcgccggcgtgcttggtggtggctgcgttcgtccccgaacacccgctgctcgacgccctcagttgcttcgcccaggtcatcggttggtggtgacgggcggccacgggaccaacgggatgacgtcgtgcaggacatgatcgtgatgggcaacggaccgggccgccttgattattggatcggggaggctgtggaatccttcacgacagaggacaagatggaagtggggctgcagggatgccatgcacttcaatgatgctgcggcttgctgcttgcttgcaattgttctggagataatctgataagt

SEQ ID NO: 21184 - DNA, 1717 bp, Oryza sativa
  ref <308>: DATABASE ACCESSION NUMBER: AK071478
  ref <309>: DATABASE ENTRY DATE: 2001-12-06
gagcgacgagccaaacgccgaagcgactcctcgtttcgtctcctccccatctctccccccttccgcttccgagccaagcaaccgagcggagcagcacaaaccctccttctccgcctcgattccgcgcgcgcgtgggtccccccacctcaccgtcaccggaggagcagcaccggggggtcgctggccatgtggcccggctgcggcggccgcttctactgggcgcccgcgccgccgtcgccgtcggcggcgggcgcgaggggcgtcgtggtggtgttcgggtgggtgtggagcgacgaggcgcagctgcggccgttcgtcgagctctacgcgtcgctcgggtggcgctgcctcgtctgccaccccgacctcgtcgcgctgtatctgtctgagaaagctgcgtcgctggcatctggtgttatcagtgaattagtgaaggaattcaaagtaaagccattgccaactgtgtttgcttccttttctggtggttcgaagggatgcatgtacaaggttattcagttacttgatggaaactgtgaaggagatgcaaccatgaaggactataggttggtgagaaactgtatctgtgggcaaatctatgactctggcccagtagattttttcagtgatgtgggtacccagtttctccaaaatcctatgattggcaactcatctcgaccatccatgttactttcatggatgacaaaggcccttgcatctggaatggacacactattcccaagcagaattgaagctcagcgtgcagagtactggcacacactatattcatcagcagggctgggtcctgttcttatgctttgctctgaagatgatgatcttgctccatgtcatgttgtctgtggttttgccaggcgtctcattgaactgggtactgatgttaaagttatcaagtggagtgattcccctcatgttggccattacatgttgcatgaagcagaatacaggagtgctgtaaatgatactctgataaaagctcttgtcaccttttgccacagaagccagctgaatgccacaagtgatcaggaatacaagatagcacactccgtgtgcagtctgcacaacgtggctgctaattcaaatgagaggctgagaagggtagccaacggccccagtgaccacttcttcttgccaagttcaaaggaccataatgaatctagggatccggattctttgattgatgaacagaggcgacaactatcctatccacccagcatggagcctcaaggagtccttggccaaattctgtttgatgtttgtgttccgaagaacgttgaaggatgggacatcaaaccaacagtgtccccaaacggacggccaacattggcttctgcgcggcaactcggccctttcaatcccatcaagtattttcgacgctcaaggctataatttgtctgctgcaactgtgagttttgtgtacataacggaggcaagatgtctaatatgactctgagcaagctttctcctatgtaagtttccttgagattgactcacctgcaatttcttttttgcaccgatgactgtacatatgttgtgtatagttatactagtggatatattagaaggggccttctaggttgggatggtaaggtgtatactaacagtgtataggggaaggtgtgcactattatggccctaaattatctatttttgtgccccatagtcatatgatctaatctaattatgagaactatttatcttc

SEQ ID NO: 21185 - DNA, 2028 bp, Oryza sativa
  ref <308>: DATABASE ACCESSION NUMBER: AK071479
  ref <309>: DATABASE ENTRY DATE: 2001-12-06
gactactttgaggttttcagctggagccacccacctctgcacttctctacccactaccagtaaccagtagtcggccacgccattcaaccattttcaagcctactccaccaaagtgcaagaaagggggaggccccatcaccaaaagccactcctctcctctcattgcagactgcagagccaagaacacatccatcttctccttctcccattgctccagatcccatcagatcctcaccgagatcatcagatcagagcaagaggaggtagctcgatgcgcggggcggcggcggcggggaggagatgatgaagccgcagcacggcggcatggcggggcatggaggaggaaggacgaggagccccttcctgacgtcgtacgcgctcacgctcgccttcatcaccttcgtctccgtcctctacttcaaggacttctcctccacgctccaccaacccttcctcacccgccctcctccccaccgccgccagatcgcccgcccccgcgccccgagccaccaccatggcggcggcagcagctccggtggcggcgatgtggtgccgccgttcgcggtgggggcggcggcggcggcggggtgcgacgtcggggtgggggagtgggtgtacgacgaggcggcgcggccgtggtacgaggaggaggagtgcccctacatccagccgcagctgacgtgccaggcgcacggccgccccgacacggcgtaccagcactggcggtggcagccgcgcggctgctcgctccccagctttaatgcaactcttatgttggagatgctgcgggggaagcgcatgatgtttgttggagattctctgaaccgtggacagtatgtgtcattggtgtgcctcctacaccggtccatccctgagagctcaaagtccatggaaacttttgactcgcttacggttttcagagcaaagaactataatgccaccattgagttctactgggctccctttctagctgaatcaaattctgatgatgctgttgttcaccgtattgcggatagaattgtaagggggacagcccttgaaaagcatgccaggttttggaagggagctgacatcttggtattcaacagctacctttggtggatgactggacaaaagatgaaaattctgcaaggttcttttgaagataagagtaaggatattgtagaaatggaaacagaggaagcctatgggatggtactgaatgcggtcgtgaggtgggtggagaacaacatgaaccccagaaattcaagggtctttttcgtcacaatgtcacccactcataccaggagcaaagattggggtgatgattcggatggaaattgctacaaccaaactactccgatcagagatttgtcatactggggtccaggaactagcaagggcttgatgcgcgtcattggagaagtgttcagcacatctaaggtccctgtggggatcgtcaacatcacccagctttccgagtaccgcaaagatgctcacactcagatatacaagaagcagtggaacccgctaaccccggagcagatcgcgaacccgaagagctacgcggattgcacgcattggtgcctcccaggtctccaggacacatggaatgagctgctctactccaagctgttctttccttgagcaaaagaacagtttctgatatttgagtttggagcactgatccctatgtctgaactctgaagagaattttgctgaatgccacgtccaagttgtgagtatatcagatcacctggggagtttctgaccttctggaggagagtcagtcagtctaacatcatataggtccaaacattctgaagattacgattgaatcataaatatacaaggagcactagatggaaatatcatggaaaatgctgagctcgttgaaaagccacatgctcatactgtactaatcacatggctgttgattttgttggacatcaatatcgaggcgacaatattcttgcagtcgcatggagaatattatgtggcctttccgagttaatggaagctaatcacatgctgttgattttgctgcac

SEQ ID NO: 21186 - DNA, 2612 bp, Oryza sativa
  ref <308>: DATABASE ACCESSION NUMBER: AK071480
  ref <309>: DATABASE ENTRY DATE: 2001-12-06
gagctactctgcttcggtgttggttatatccacgagagtacgagagacgcgcgcgggcgcgagctgaggttgctgctgcagcgcaggcaaagaggggcaagctagcgcaagcgacgctaagcccgcgcgcgcctgcgtgcgtgcgtcgtcggagagcgcgggcgccaaacggcgccgcggcggagtacgtcgagcgtcgcgtggacgttggcagcggcaaggtttcctctggatacaccgttcttgagtttgagttgggcaaggaggttgtgaacgtagcctgaacctgacctgagattgtgaacgtaattttggggggaaaggttgttctgtactgtctcttcaatctgtgagttcgtgacaggttcttgcaaaaaccaaaacatcatcagtgaaaaattgttcgtagcattttagctctagtatagatcgatcaatcgatcgttcgttcgttcgatcgttcgaggacgagagatttgctaacatggcgttggcagggacctccaaagtagtgctgggatgtgtcgcgtttgggatattctgggtgctggccgtcttccccaccgtcccgttcatgcccgtcggccgtacggccggctccctccttggcgccatgctcatggtcctcttccgtgtcatctcgccggaggacgcctatgccgccatcgacctcccaatcatcggcctcctctttggcaccatggtcgtcagcatcttcctcgagagggctgacatgttcaagtacctcggcaacctgctctcctggaagagcaggggcagcaaggacctgctcttccgcgtctgcatcgtgtccgccattgccagcgcgctcttcaccaatgacacctgctgcgtcgtgctcaccgagttcatcctcaaggttgccaggcagaacaacctgccgccgcagccgttcctcctcgccctcgccaccagctccaacatcggctccgcggcgacgcccatcggcaacccgcagaaccttgtcattgccgtggagagcggcatctcctttggacagttcttgcttggagttttcccggcgatgatcgtcggcgtcctgacaaatgctgccatcctcctctgttacttctggaagtacctttcagtggagaaggatcaggaaggcgggcagccggctgggccggaggtggtcgccgacgacgaggtcacctcacacaggttcacacctgcaagaatgtcacacgtctcatctctgaacccggatgatatggactgcataagtgagccaatcatcaggagcaacagcgtgaggagcaccagtgctaatgagaatctgaggagcaggagtgtgaattcggaggcggacatacagctcgcgatcaagtcgctccgggcatcgagcatgtcgcatgagatggtcgaggtctcaactgtcactgacaggagggatgaaggtgcatcctccaggaagttcacaagaactgctagccagcagaggagtgtgatcatagaggactcgccgccgtctcccgccagcaatggcgacaaggagaaggaagatgaggttgcggagaagagatggagggtgtttgtgtggaagactgctgtttatctcatcactcttggcatgctcattgcacttctcatggggcttaacatgtcatggacagccatcactgcggctcttgttcttctggcgcttgattttactgatgcacaggcttgtctggagaaggtgtcatactcattgctgatcttcttctgcgggatgtttattacggtcgatggcttcaacaaaactggcataccgaacacactttgggagctcgttgaaccgtattcacgaattgacagtgctaagggtgttgctcttcttgctgtggtaattcttatcctctcaaatgtggcctcaaatgttcccacagtactactgctcggcacaagagtggctgcatcagctgctgcaatctctcacgattcagagaggaaggcctggcttatcctagcgtgggtcagcaccgttgccgggaacctcacactactgggctcggctgcgaacctcatcgtctgcgagcaggctagaagagctcagttcttcggctacaacctctccttctggagccacctccggttcggggtgccgtcgaccatcgtcgtcacggcgatcgggctgctcatcgtcaccagttactgaagaagaagaagaagaagaagaagctgacagcagcataaggtagcgtacaagaaggagatagatgaacgaaccctttggatcaataagagagagtacatgtaaaatttctaaaataggcttgtcctgtaaaactcgtgtgtgttttgtgtgtatctatgccagctgctgcgtctgtgcccttgctcttttgttgtcgctaagcagacggtgattgagaaggatgcagatgtagcaggctaagcaacctgcattttcagtgtttttcttcagagtcggaagttgcaaatagggcgagtaaatgaagaatgctatgacaatctgattttagtttttatatttgtttcctactcaattaatttgtagccgcggtagaattttggaaatggtgtttgtacaactgcacatgcgcatggttactactagatcaaattgttttttccgcgggaaaaaggcc

SEQ ID NO: 21187 - DNA, 1142 bp, Oryza sativa
  ref <308>: DATABASE ACCESSION NUMBER: AK071481
  ref <309>: DATABASE ENTRY DATE: 2001-12-06
ccctccgcccccatgaacgtcgtctcccccgcaccatactactcctcgtacccggcggtgacggatttcctcaagtcggggctgtacaggtgggccggcgacgccaagatgttcgacggcgacacctacgtcgagctcgtctgctcgccgagcaacccggacggcggcatccgcgaggccgtgctcaagtccggcgacggcgtcgccgtccacgacctcgcctactactggccgcagtacacccccatcaccagcgccgccgcccatgacatcatgctcttcaccgtctccaagtgcaccggccacgccggcacccgcctcgggtgggcgctggtgaaggacagggcggtggcgcagaagatgagcaagttcatcgagctcaacaccatcggcgtctccaaggactcgcagctccgcgccgccaagatcctcaaggccatcaccgacggctacgaccgcgcgcccgccgccggcgacgacgacgacgactcgagccgactgttccacttcgcccgccgcaagatggtctctcgctgggccaagctccgcgccgccgtcgccgcctccggcatcttcaccctccccgacgagctccccggccactgcaccttcgccaacgagaccgtctccgcctaccccccgttcgcgtggctgcgctgcgggaaggaaggggtggacgacctgaaggggtacctgcgcgagcgcaagatcatcagccgcggcggcggcaagttcggcgccgacgggagggtggtcaggatcagcatgctcgacaccgacgaggcgttcgccatcttcgtcgaccgcctcgccgccatgaactgatcggtcgatcgagcgagcgagctcgccccagctagggcttgatcttgaatcttgatcgatgtcgacgatgagatggtcagttaagttgcgaggattaagatcaagcttaattagttatcgtcgtcgtctttggttgcttcatcaagttcggttctagatatcgatctggggtgcatgcatggtaatgtgctttggttaatattagtccaaaactctatataattttggatcgactcttaaaatttcgatgttgtgttgtgagactttaatttgtgagtttgtggctggttggatatcaatatggatcataattaagt

SEQ ID NO: 21188 - DNA, 1098 bp, Oryza sativa
  ref <308>: DATABASE ACCESSION NUMBER: AK071482
  ref <309>: DATABASE ENTRY DATE: 2001-12-06
ggacgacccaaccaatcgactcgcaccaccaccagcagctcaagcagcaacagctcaaacggaggaagatctcatcgccatgacgaccggcaatggcgacgcaccggtgatcaagaacgcccacagcgacatcgacagcaccaacaagacgctgctcaagagcgacgccctgtacaagtatgtcctggacacgacggtgctgccacgggagccggagtgcatgcgcgatctgcgcctcatcacggacaagcaccagtgggggttcatgcagtcgtcggcggatgaggcgcagctgctggggatgctgctgaagatggccggagcgaagaggacaatcgaggtgggtgtcttcaccggctactcgctgctggcgacggcgctggcgctgccggaggacgggaaggtggtggcgatcgacccggacagggagagctacgagatcgggcggccgttcttggagaaggccggggtggcgcacaaggtggacttccgcgaggggaaggggctggagaagctggacgagctgctcgccgaggaggcggcggcggggcgcgaggcggcgttcgacttcgcgttcgtggacgcggacaagcccaactacgtcaagtaccacgagcagctgctgcagctggtgcgcgtcggcgggcacatcgtgtacgacaacacgctgtgggccggcacggtggcgctgccgccggacacgccgctgtcggacctggaccggaggttctccgtcgccatcagggacctcaactccaggctcgccgccgacccgcgcatcgacgtctgccagctcgccatcgccgacggcatcaccatctgccgccgcctcgtgtgaggtcgagaccgagaccttaccggccgatccatccatcgctctcgcgtgattaattaacgtgtgttgctgtactcttctactgctacaactatactattacttccttaattgccgcttaaattttcctatacgtgtttcaatcaatgagattattatattcttcgagcatgagagagacggagttgtagggacatttgatgatggttgttactgtactacatgttgataagtgcaacatctctttccatggttgctactct

SEQ ID NO: 21189 - DNA, 613 bp, Oryza sativa
  ref <308>: DATABASE ACCESSION NUMBER: AK071483
  ref <309>: DATABASE ENTRY DATE: 2001-12-06
gatttcgtcaccgccgaatcccccagcagccagccatgtcgtcgtcggcgtcgcgcgccgccagcctcctccgccgcacatcctccgccctgtcccgccgctgcgcccactcctcctccgccgccgcgccgtcccgcccgcccgttccgctcccacgtttccgcgccgccgccgccgccgcctcctcctcgccgtcctctgggatcacctcccgccgcttcctcgcgtcgaaatccccgtcgtcgtcgtcgccctccaaggcctccgccgacgagaacctggtgcgggtcatcgactccgagatcgagtgcattgttcagtcggaggagggcgccgcctccgcgaagcaaattgatctaccagaagacttcccttttgagataatcgacaatcctggtgaccaatccataacactcaaaagagaaattgcaggagagactattaaagctactgtctacacaaactttgatacacaagatttgaatgaggatggcgatgataatgagaacaatgaggaatcttttaagccagcaatccagatggtcgtcactgttgagaaaccagaagcctccatcttggaatttgaatgccacttcaatgatgatgaactggc

SEQ ID NO: 21190 - DNA, 1378 bp, Oryza sativa
  ref <308>: DATABASE ACCESSION NUMBER: AK071484
  ref <309>: DATABASE ENTRY DATE: 2001-12-06
tggtatatagtcctaaccaacagtcaggaacagcaacaaaagtaagccaagaatctctctgcctcccaccaacaaccacacacactcacagctttggtcatggaggtcacccccaaccacacgcagaccgtctccggctgggccgccatggacgagtccggcaagatcgtgcccttcgtcttcaagagaagggagaacggggtggacgacgtgacgatcaaggtgaagtactgcgggatgtgccacacggacctgcacttcatccacaacgactgggggatcaccatgtacccggtggtgccggggcacgagatcaccggcgtggtgaccaaggtgggcaccaacgtggccgggttcaaggtgggcgaccgcgtgggcgtggggtgcatcgcggcgtcgtgcctcgactgcgagcactgccggcggtcggaggagaactactgcgacaaggtggcgctcacctacaacggcatcttctgggacggcagcatcacctacggcggctactccggcatgctggtggcgcacaagcggttcgtcgtgcggatcccggacaccctcccgctggacgccgcggcgccgctgctgtgcgcgggcatcacggtgtacagccccatgaagcagcacggcatgctgcaggccgacgcggccggccggcggctcggcgtggtcggcctcggcggcctcggccacgtcgccgtcaagttcggcaaggcgttcggcctccacgtcaccgtcatcagcacgtctccggccaaggagcgcgaggccagggagaacctcaaggccgacaacttcgtcgtcagcaccgaccagaagcagatgcaggctatgacgaggagccttgactacatcattgacacggtcgcggcgacgcactctctgggtccgatcctggagctgctcaaggtcaacggcaagctggtgctcgtgggcgcgccggagaagcccgtcgagctcccttccttccctctcatcttcggtaagaggacggtgagtgggagcatgacgggtgggatgaaggagacgcaggagatgatggacatttgcggggagcacaacatcacctgcgacatcgagatcgtgtccacggacaggatcaacgatgcgctcgccaggttggcgcgcaacgacgtccgctaccgcttcgtcatcaacgttgggggcgactccaagctctagactcatgctactatcatattgctacctagtaccaacctccatgcctttcttaatttaatttattggaggctctgcacgcagaatgggacagttcgagctgtcgttttctcgttggccacgtgaagtaactgtacgcactttgtacttattcgagaaatgatcagtgataaatcatcaatggccttattttattctt

SEQ ID NO: 21191 - DNA, 1997 bp, Oryza sativa
  ref <308>: DATABASE ACCESSION NUMBER: AK071485
  ref <309>: DATABASE ENTRY DATE: 2001-12-06
ggtttgcgcgtcacactcatcacacaaacacaagccccatccccgggaagacgaggcggtgtgtggcacgtcacgtgccccacccccctccccacccacccgcctcgtcacccacccatctccaaatccatggcccccctccccgccgccgccaccgccaccgcctcctccgccgccacccccgccgacgacgaggcccactccctcctcccttccaccccctccaacgaggaggatgacgacgacctcgaggagcgcgcctacgaggcgaccgagaaggtcatcgtctcgatctcggacttccccgacgccgacgacgacgaggaggagtccgggctcgccacctccaccgccgcctcggggatcccgcccttctcgtggaggaagctgtggctgttcacggggccggggttcctcatgagcatcgcgttcctcgacccggggaacctcgagggggacctgcaggccggggcggtggccggggacacgctgctgtggctgctcctgtgggcgacctccatgggcctcctcgtccagctgctcgccgccagggtgggcgtcgccacggggaggcacctcgccgagctctgccgcgacgagtacccctcctgggcgcgccgcgcgctgtggctcatggccgaggtcgccatggtcggggccgacatccaggaggtgatcggcagcgccatcgccatcaagatcctcagccgcggcttcctccctctctgggccggcgtcgtcatcaccgccttggattgtttcatttttttgtctcttgaaaactacggggtgaggaaattagaagctgtatttgcgattctaattgcgactatggctgtctcctttgcatggatgtttactgataccaagccaaacatgaagaacctgttcataggtattttggtcccaaaattgagctccaggacaataagacaagcagttggggttgttggatgtgttatcatgccacacaatgtgtttctccattcagcgcttgttcagtcgagaaaaatagacccaaacaaggaacaccaagtccgtgaagcgttgagatactattcaatagagtcaaccatcgccttggctgtgtccttcatgataaatctctttgtaacaactgtttttgcgaaaggattttatggcacaaaagaagctggtaatattggccttgaaaatgctggacagtatctacaagagaagtttggtggagggtttttccctatcctctacatttggggaattggactattagctgcggggcagagtagtaccataacgggaacatatgctggacagtttataatgggtggatttttgaacttgaagttgaaaaaaatggatcaggtcactcatcacccgaagctttgcgattgtgccaacgataattgtcgcactcttcttcgataaatcggattcgctggatgttctaaacgagtggctaaatgtgcttcaatcaattcagatcccttttgccctgattccgctgataactttggtttccaaggagaaagttatgggggtatttaaaataggtcgaaatactcaagctgtgacctggacagtggcgacactattgatcacgatcaatggctatctcttgctggatttcttctcttcagaaataagaggcctattatctggctcaattctctgcgtggcagtacttgcttatgcttcttttgtattgtatctcatcctgcggggtaccgagctgccaaatcagatcatcacaactatacgcaagagtttttcatgacaaagataaccaaaatttggccgttttaaacaccatcataacatctcaaacgtatagagaaatatggacttggggattggaggagatactcactgtacagtgacttccaaaagggttagctgtttgagaagaagtgcaactgatgtaatcttcatttcatttgttgtaacaccctgactgtgtcgtcctgaagcaaaggaaatacaaagagagattaatgaaatgatgatcaatgtcgttg

SEQ ID NO: 21192 - DNA, 1595 bp, Oryza sativa
  ref <308>: DATABASE ACCESSION NUMBER: AK099177
  ref <309>: DATABASE ENTRY DATE: 2002-08-28
ggcatgctagctagctaattaagctccccagctcgattcctagctatctaattagctagcgagggatcgatcgagagcttctccttccgggcttccggccagccggcggggaatagctagaatcagaatggcggcggaggcggatgcacggaaggtgtgcgggttgccggagcgggtgcagctccatggggcgatgctggcgctgcagttcggctacgcggggttccatgtggtgtctcggtttgccctcaacatgggcatcggcaagctcgtcttccccgtctaccgcaacatcatcgccctcatcctcctcgtccccttcgcctatttcctcgagaagaaggatcggccgcagctgacgctgagcttcgtggtgcagttcttcctgctggcgctgtgcggcatcaccgccaaccagggcttctacctcctcggactcgacaacacctccccgaccttcgcctccgccatccagaactccgtcccggccatcaccttcgccatggccgccgcgctccgcatcgagcgcgtccgcctcgaccgccgcgacggcgtcgccaaggtgctcggcacgctggcctgcgtcgccggcgcctccgtcatcacgctctacaagggccctaccatcttcggtcccaagctgcagctgcaggcggtggcggaggtgccgttgagggcggcgatcgccggagaggggaagaactggacgctgggctgcgtgtacttgatcgggcactgcctgtcgtggtcgggatggctggtgctgcaggcgccggtgctgaagaagtacccggcgaggctgtcggtgacgtcatacacctgcttcttcggcgtcatccagttcctcatcatcgccgccttcatggagagggacgccgacgcctgggccttccactccggctccgagctcttcaccatcctttacgccggattcatcgcgtcgggggtggcgttcgcggtgcagatatggtgcatcgacagggggggcccggtgttcgtggcggtgtatcagcccgtccagaccctggtggtggccatcatggcctccctcaccctcggcgagagcttctacctcggcggcatcatcggcgccgtcttcatcatcgccggcctctacctcgtcctctggggcaagagccacgagcgtgctcgcctcgccaaggacgccgccgccattgccaccgaccgcgacgccgccccttgccggatcatcgccgccggcaagcagtcctcctccgtcacccagcccctcctgctgcctacctcctcctcctccgacaacgccgtctgaccgatcgatcggtctctttattaattacatgcgtgcatgcttcgagccatttgatcgatcgattagctgctagtactacagacttagcttgttgagaaccaaatgatgttgatgatttgcctttgcctatgatatcgatcgacattaaactagctagtagcttgcttgttttgctaggatttgttttgtttggatcatgcttgtgctttcttaatttgtaacgtcgcgagagattaattgctcaatgatgcttgtgctacattttgtataattaatgtacctacatgtgtgcttcattgtacct

SEQ ID NO: 21193 - DNA, 2713 bp, Oryza sativa
  ref <308>: DATABASE ACCESSION NUMBER: AK071486
  ref <309>: DATABASE ENTRY DATE: 2001-12-06
gttcggctcgcacatggttcgccgcctttcggtgagatccccgcggctgcagcgagctcgcaggccgccgccttccgcgccgccgaccaccgcgcccatggaccccccctcgccgccgccgccgccgccatatcctcctgctgctgctgagggcggtccggcagcggatagccaggccgctgagctgccccggctgactgtgacgcaggtggagcagatgaaggtggaggcgaaggtgggcgaaatctaccgcgtcctcttcggcaacgcgcccaacgccaattccctcatgttagagctgtggcgtgagcagcatgttgagtatttgacgagagggctgaaacatcttggaccaagcttccatgtgctcgatgccaagtaatggttctccggtattgaattatatagcagaatatggttttaaaatgagattatgcgaagttgatgtatatatttggttttaaaattatgttctagtcgaccttggctgtgctactggattattcatgcacttgctctgttggatgaaatacctgacgatgttgaggatgatattgtggacttcttatctcgatgtcaggtttgttaaactgctggtattatataaaaaaatgttactcttactacataaatatgcattagttaccactcttcatgcgtctgtaaagaaaccaactcaacaagtcaatttttcagtactttgttctttcctttactgaggtgataacaaagttcaatcgaagaaatagttccactagatttctaaggtcttgtggaatttttaaagtctcaagctgggtgtctgaatgaatcttctgaacccacatgtaacttttcatgcatatcaaggatagcacaactatctttgttctgctccacttagttagttcatgttatccctttcctttctcataaagtgttcggtacaacatgaatttgcttatggatacatagcaaataactgaagatattgatttgcacatacatgtgattctgaagatttcattgccattattatcatgattctttcaggacaaagatggtggttatggcggaggacctggacaggttttctcttaacctcaaacttttgggttccaaacttgtggctgggtaatatagctttgagttggttaacatttcacattagttgtcgttatcttaggcaatacaaaacttcaacaaaccatgtgaacactgatcttttgcttcaaatgactagatgggccagtctaggctactcaacatctaccctaactaaattgaccatctcaaacaagttcgatgtgatgaaatatctgaagatcaatttatctttgggtatttgatggcctaaagtgtttatataactacaggttctcattttgatggcaaagttagtgctttgacttgtgttatccaactcgtgcaaactttagaatagtcaatcttgactgttctttgatcttcctaatttgagttcagttttacgaactcactcgataaggttaatttagtatgaggcgaattttttgatgtcaatttcacttctttgtgctagttgcctcatctcgctacaacttatgctgctgtaaatacacttgtaactatagggagtgaaagggcactatcatcggtaaacagggacaacctgtacaagttcatgcttcggatgaaagatacatcgggagctttcagaatgcatgatggtggtgaaatagatgttcgtgctagctatactgcaatatcggttgccagccttgtgaacattcttgatggtgaactagcaaaaggtgttggaaattacataacaaggtgtcaaacctatgaaggtggcattgctggggaaccgtatgctgaagctcatggtgggtatgtttcaacggaggatctctgtttttttttatttttcctgtatgtatctatttggatcttttaagtaatagttgctttggtttgacaaggtacactttttgtgggctggctacgatgatcctgcttaacgaagtggacaaacttgatttggctagcttgattggctgggtggcatttcgccaaggagtggaatgtggatttcaaggacgaactaataaattggttgatggttgctactccttttggcagggagctgctcttgctttaacacaaaaactaatgacagttgttgatgagcaattaaaatcatcatattccagcaaaaggcctccaggagatgatgcttgtggtacgagctcttctactgaagcagcatattatgctaagtttggatttgattttatagagaagagcaaccaaataggcccactgttccacaacatcgcgctgcagcaatacatcctgctttgcgcacaggtgctggatggagggttgagggataagcctgggaagaacagagatcactaccactcgtgctactgcctgagtggtctgtcagttagccagtacagcgccatggttgattctgatgcgtgccccttgccgcagcacgtgcttggtccttactcaaacttgctagagccgatccatccgctctacaatgttgtactagacaaataccatacggcctatgagttcttttcaagctagtgatacaactgtctaggacatgtatgatatgtatgagctctacaatgttgcgccttacaagttacaactgtctaagacatgtatgatatttcattcttttttacactgactgaacggccccagataccaaaagtccatataaactcgc

SEQ ID NO: 21194 - DNA, 2191 bp, Oryza sativa
  ref <308>: DATABASE ACCESSION NUMBER: AK071487
  ref <309>: DATABASE ENTRY DATE: 2001-12-06
tgttttgtctgttcaatctgtagattgtagagtccattcttagcagtttcactggctctgctcctggtgaggtgccaaagaaaatggaatcttctgatgtggtgctggtcactggagctaccggtggcgttggacgaagagtggttgatatcctgcggaataagggaatacccgttcgagtattggctagaaatgaagagaaggcgaggagcatgctggggcccgatgtagacttgatcataggagatgtcacaaaggaaaattcacttgatcccaagtacttcaaagggattaagaaagtggtaaatgcagtgtcagttatagttgggccaaaggaaggcgatacaccagacaggcagaagtataaacagggcatcaagttttttgaacctgaggtagctgcatcaatacattccttctcttgtagaatataagtaacaatggatgactgacatcctcattcccaacatacaacatggaaatattgcatcagtttgcacttttgctcgttcaaaagctagttcattatattattttgttatgcctatcagatcaagggaccttcacctgaaatggtagaataccttggaatgcaaaacttgattaatgctgtcaagaacagtgtgggtctgactgaagggaaactgctttttgggggcacaggcaacttatccggaaagattgtttggggagcacttgatgatgttgtgatgggaggtgttagtgaaagcacattccaaatccaaccaacaggaagtgaaactgatggaccaaccggattgttcaaaggtactgtctctacttcaaataacggtggcttcactagtataaggacaaagaattttacagtgcctgaggatctgtcagcatatgacggtattgaactacgtgttaagggtgacgggaggcggtataaacttattgtgcgcactagctttgaatgggatactgtcggctacattgcaagctttgacacgactaagggggaatggcaaagtgttaaattacctttctcttcactgaatcctgtattccgtgcccgcactatgcctgatgctgcaccctttgatgcaagcaatgttacttccttacagctcatgtttagcaagtttgagtatgacggaaagctgaacccaacatttacagaaggttcatttgagctccccttttcaagtattagagcatacataaacgagccaatcactccaaggtttgtccatgttagttctgcaggagttacaagacctgagagaccaggcctggatttaagtaaacaacctcctgctgttcgcatgaacaaagagctgggctccattctaacttacaagttgaagggtgagggtttaatccgggaaagtggcattccatatactattgtgcggccatgtgctctaacagaggaaccagctggagctgacctcatatttgaccagggagataatatcacaggaaagatatcaagggaagaaaattgctttcatttgtgttgcagctctggcaagtccaaatgcagtagagaaaacctttgaggtcaagagcactgttccattcagtgaacctttcgtggttgatccttcaaatcctcctccagagaaagactatgatgtgtatttcaaagagctcaaagctggcataacaggtaaagaggcactagaaggaacacctgctcaggtctgaagaacatgttaaatgcagaacgcccaactgctttgacaaatcttgacatggtgcttcttgaacatgaacagaattacataaatatgcaagtctgattcataaaccaccaatagttgcagtacctgagcatatgtgccacacttaatctttgcagtcatgtggtttccaaaataccaaatgggaagtactttgtgaagtatgtgaaggaacagttgtttcttttttttatgtaaagtagtatatcctctggagtttgtgttatatttaatctgctgtatctgtatgagaagatatgcatacatcttcagaagacatatggatgtcgatcaagagctcaaaggttatggagcattggagctctttctgtagcagattctgtatattatgttgcttttattttcactgaattgtgtgctgtagatagcgtcattggaatctagatcgaccattttgtaaaatcaaatacattgtcatacagagagaagagaagtttacagttccagttttttttttc

SEQ ID NO: 21195 - DNA, 1219 bp, Oryza sativa
  ref <308>: DATABASE ACCESSION NUMBER: AK071488
  ref <309>: DATABASE ENTRY DATE: 2001-12-06
taactttccccttctctggttccccctcctccctctacagtactctccccaaaatctctcctcaccggcccctcttccccttcgattccagtggcttgccgccagcgagggttggaggaggggtccggccacctcccctctactagtattaggttgttaatctgttattaggtcgtcaggtgtctcctgtagttagggtttgtccctagttggtcttttgccggcgagctccatgggtgccggtgtggtcggatgcggcggcggttggtggcggtggagatgcgagatccgaagaccggtggatgaatcgacggaaaaggctggttccttgcggcggcggcggctacatcgtcgtcggcgaccgggagaagccggctccttgcggcggtgccagttgcttcgtcgtcggtgtccgggatgtcgccgtcccgacgaatcgacggaaaaagctggctccctgtggcagtgtcagtggcttcgtcgtcggtgtccgggaggtcgccgccccgttcctagagacggcggcggcagcttcttgaggcctgcttcgccagggcaagctgtcgcccggagcttgctgctcgtggtgcttgacagcctgttggcgaggtggcggcgattctgccagtgcatgcttgagtgcttcctataccatggttccatcagtcaagtctcgcaggatttctctccccctttctcgcatgtcgatccaagaagacagcagtttgtttgccaccattcgagttcttcagtgggtttggggatctggatgtgggctccttcttcctctgtgtttcccaccagctcattccatgcaaggtttgttgttcgggttgagctcacgcttctcagatttaacgacgaactccgtggacttctcttgctgagtccggtgatgccccctcaaaatctacggctcagcagcaaacctcccttttgtgcagtcttcgtggaggcaaccggatggggattaccagtttgtcaagcgtgctgcacgccaaaggaggcccaaggttgcattcgtcgcggcattgccgcagctccctgttgatgtgcaccttctctgctgcgtggtttcatcatgaagtttgtagccttagtgcagttccccgttctttcgaaacggatggttttatgcttcctttttatctgtttggcaatgtactgggatttattcccgtgaactctgtcgctctatattaatggttgtttaagtttc

SEQ ID NO: 21196 - DNA, 3445 bp, Oryza sativa
  ref <308>: DATABASE ACCESSION NUMBER: AK071489
  ref <309>: DATABASE ENTRY DATE: 2001-12-06
ggctccctacagctagcttatcgatcggcatgggcatggcggccgtcctgctcctctcctttctcctcttggccgcccccgccgcggccatcaatatcctccggcgctccctcgccgcgcagaccaaaggagacctcgcctccatcaccgctgggaaccccctcgtcgccaatgccatgaacgaccgcctcaagaacctcaccgacgcatttgctcagcagatgggcaaggagttccactactgcatcaaggacacggacgacgagtggaatatcgccttcaatttctccactgatcccaccttcctctccaactgcatgcaggccaccgatggagacgtaccgcagcgtgtgtgcacagccgctgagatgaagttctactttgaaagcttcctcgacagcaatggaagaaagaactacgtgaggcccaacaagaactgcaacctcacatcatggatggatggctgtgaggctggctgggcatgcagtgcaggcccggaccagaatatcaacttgcaggatgccgtcaacttcccttccagaacacttgattgccgaggctgctgtgctggattcttctgccctcacggcctcacttgcatgataccttgccctttgggagcatactgtccagaatctaccttaaacaaaaccaccgggatctgtgacccatacaactatcagccacctcctgggaagccgaatcatacttgtggtggtgctgatagatgggcagatgttgttagcaccgatgatgttttctgcccagccggcttctactgtccaagcactataaagaaactctcttgtagtagtggtttctattgcaggaagggatcaacttcccaaaccaaatgcttccacaagggcagctgtaaaccaaactctgtaaatcaggacattacaatatttggtgcattgcttgtgggtgccttgagtttagtactgttgatcatttacaacttctcagggcaacttctgaccaaccgagagaaaaagcaagcaaaatctagggaggctgcagcaagacacgcaaaagagactgccatggctcgtgaaaggtggaaatcagctaaagatgttgccaagaagcacgccgttgggctgcagtcatcgctgtcccgcacattctcgcgcaagaaaactcttaggacacacgagccatccaaaggagcggttgaaactgatgtggagccatcgaaaggatcaggagaaaagaagagtaatcttactgacatgatgcgctcgcttgaagagaacccggaaaaaggagaaggcttcaatgtggaaataggagaaaaaaagaaaactaaagggaggcatgcacacactcagagccaaattttcaagtatgcatatggacagattgagaaggaaaaggcaatggaacagcagaataaaaatctgaccttttcaggtgtgatatctatggccaccgatgaagatatcaggacaagacctagaattgagattgctttcaaagaccttactctaaccttaaaggggagtaagaaaaaaactgttaaggtctgtgaccggaaagcttatgcctggtcgggtagctgctgtgatgggcccatcaggtgcagggaagaccacattcttgagtgcaattgcaggtaaggcaactggatgcgagacaacaggtatggtacttatcaatgggaaaatggaacccatccgtgcgtacaagaaaatcattggctttgtcccacaagatgacattgtccatgggaacttgactgttcaggagaatctttggtttaatgcacgatgcaggctttctgctgacatgtcaaaagctgacaaggttcttgttgtggaaagagttatcgaggctttgggactgcaagcagttcgtgattctttggttggaactgtcgaacagcgtggcatctctggtggccagcgtaaacgagtaaatgttgggctagaaatggtcatggaaccctctgtgttgattttagatgagccaacgtctggtttggacagctcttcgtctctgcttttacttcgtgcactacggcgggaagctcttgaaggtgtgaacatctctatggtggttcatcaacccagctatacattgtataagatgtttggtgatttgatacttctcgcgaaaggtggcttgacggtttaccatggacctgtgaagaaagtggaggaatacttttcaggattggggattgttgtcccagatcgtgtgaacccgccagactactacatagacatcttggagggaattgtgaagccaaacgcaaatgttgcagttaatgccaaagatctccctctgcgatggatgctgcacaatgggtatgaagttccacgggatatgctgcagagtggttctgatgcagaatcgtcgtttaggggaggaggggatcttacccctggcggtgacactgggcagtctattgctggtgaagtgtggggcaatgtcaaggacatagttgggcagaagaaggatgagtatgattacaacaaatcttctcaaaacttatctaatcgatgcactcctggcattctcaggcagtacaagtactacctggggaggtgtggcaagcaaaggctccgtgaagctagaatacaaggcgttgactatctgatcctgggccttgctggtatatgtctagggacattagctaaagtgagcgacgagacgtttggagcactcggttacacatacactgtcattgccgtctctctgctgcgcaagattggagcgctgagatcattctctctggagaagatacactactggagggagagagcatctggaatgagctcgttggcgtacttcatgtcgaaagacacaatagatcacttcaacacgatcatcaagccgatcgtttacctgtccatgttctacttcttcaacaacccaaggtcgtcgatatgggagaactacgtagttcttgtggcgctggtgtactgcgtgacagggatcggctacacatttgcgatattcttccagccaggatcggcacagctggtaagtggtcagcgctgcttccggtagtgctgactctgatagcaacgcagcagaaggacaccttcttcgcgaacctgtgctacaccaagtgggcgctggaagggttcgtgatcgcgaatgcgcagaggtactcgggcgtgtggctcataacgcgatgcggctccctcctcaagagcggctacgacatcaacgacaggttcctctgcattctcgtcctcgccgccaacggtgtcctcttccgctgcgtcgccttcttctgcatggtcatcttccagaagcactgatgcctgcctgcctgcctgtctcctctactgtacatctatctccatctattatactctctctagtactactgtactttctactctctagctagctagcagcagcatctgtgagcatgtactgtacttgtgtatcctactaatgaatcctagctaagctagtagatcgatcc

SEQ ID NO: 21197 - DNA, 2568 bp, Oryza sativa
  ref <308>: DATABASE ACCESSION NUMBER: AK071490
  ref <309>: DATABASE ENTRY DATE: 2001-12-06
ggccggccaaactgcggcctccaacacgcgccggcgggcggaggctcgcggcagatgcgcccggcaggtcaggccgccgccgtagcccgtagatagggtgcgcgcaggacggagctgttcgtggaggccgtggggtatgcgctcttgagatgtctaatctatcagagccctcaaaagaagctgtgtcagctgacgattcaagtgctgtccagaaaactggagcatggagtaacacgttgaacattcttctgcaacaaacttcagtctatggtgtggctgctggttattgcctgtcagcatctctgctctccattatcaacaaatgggcagtcatgaaatttccttgccctggagcattgacagctttacagtacttcactagtgttgttggagttctcttatgtggacaactaaagcttattgagcatgatggccttaatttgaggaccatgtggaagttcttgcctgctgctgtgatgttctacatctccatcttcacaaacagtgaacttctactccatgccaatgtggacactttcatcgtgtttcgctctgctgtgccaatttttgtggccattggagagaccttttatcttcaccaaccatggccatcactcaagacatggctttcgctttcaactatacttggtggaagtgtgatctatgttttcacagacaaccagttcactgtgactgcttacacttgggcagtggcatatcttgcaagcatgtccattgactttgtctacatcaagcacgttgtcatgaccattggcctgaacacatggggccttgtgctttacaacaatctggaagctttcatgctcttccctcttgagatgcttctaacgggggagcttaatcagatgaagggcgacaatgctaaagtgacaaactggctttcatctgatgtcattcttcctgttgctctgtcgtgcttgttcgggctatctatatccttcttcgggttctcctgcagacgggctatctcggcaactggatttaccgtgctcggtatagtgaacaagctcctgactgttgtgattaatctccttatctgggacaagcatgcctcctttgtgggaacaattgggctcttgatctgcatgtccggtagtgttctctaccagcagtccaccacaaaaccaaaggcccccaaggctgagccaaaagaggagaatgatgaggagcagcagaagttgctggagatgcagcaagggcatgaaagcagctcaactcagaagcaaacatcatcttaagcctggtagaaaatttggcattgatatcttaagacagcttccctgaaccatttgggatgcttgggaaggatcatttggccaaaggatattcattcgttatatgagaaccttgaaatgccgttggcatgaaaaatcgcagagaaaacttaatgtcactttgcaattctttgtttagtagtataccgtatttatttgttagacctgtggtagggtatcaattatcaaagaatcccgaaacatagtcgaactggattcttcgtatacaatgtgctgtttcattgataatacagggtggttacccatttctatacaggacgcgcccggcagggcaggccgcaggcgatagcgtcggcgtgcaggaaacgagggtcacgtaccctgagtctcggactccgtgaggctgtgggctatatatgctcttgagataacagagctggacaatcgaggtatttgggtttgcctgcggtgttcatcttgctggtgatggagccactgaatcagccttgctagagccctttaaggtcattgtaggaaacgttgaattcggaaaggaagtgaaggttcaccattgctggagggattgcacctgtcagatggttgtatgacaggtctagaaccatcaggttcttgaggttgctgatcgattctgggatctctccatttaagttgttgaagctcaagttgagtgaaacaagttcttttaactcaccaatctccatggggatcacaccagtgaaattgttgttacctagattcaacatttcagggagagcagtagttgtatgatactgcaaacacaaacatgcacccgcataaaacgaaaatgtaaatgctctttgttctgagttatctgcaaccttgtctgactttagcattggcatctccattagtgccgctggtatttctcctgtaaggctattattggatacatccacatacttaaggaagttaaggctattgatccaggtcggtattggtccactgagttgattgctgtataaagttaaaacctgcaaatttctgagttttgataaccaattaggtatcttaccatacagtgcacaacgctctatggcaagaccctgaatattctcaaaaccatcaattgcttcatcctgtggcatagcttcattcttgaagttgctccccataaacaagacagtgaggttccttaagctcttgagtatgtgaagggtattagttatgtttgtaaaattgttgtaggaaatagataagaaggtgatcgacttaagatttcctatattttttgacaactggccatgaagcctattggcagataggcgcaacc

SEQ ID NO: 21198 - DNA, 1289 bp, Oryza sativa
  ref <308>: DATABASE ACCESSION NUMBER: AK071491
  ref <309>: DATABASE ENTRY DATE: 2001-12-06
gacgatgatctctactggtagtatcacggacggcacaatcaacggcgggcgcttcaaaaacgtgaagggaagtgggagtatttaggacccttcccagcaatctcacccatccctccccttcccctgcttcggcagctgctggtgtggtgatacactcgcctagctttggccaccactaatctctgctctgctttttctcctctgctccactgatcatccaattcttctcttcctgattggccattctgattggctggtgacatgtcgaagaaaattgtggtgaagctggacctgcatgacaacaaggacaagcagaaggccatgaaggccgtctcctcggttatcggaatcgacgccatttcgatggacatggcgtcgcggaagatgacggtgatcggcacggtggatccggtggacgtggtgagcaagctccgcaaggcgtcgtgggcggcctacatcgagtcggtcggaccggccaaggagccggagaagaaggaggagaagaaggaggaggccaagaaggacgccggcggcggcgacggcgacggcaagaaggaaggaggtgacggcaagaaggaggagggcggcgacggcaagaaggagggggaaggcaagaaggaaggcgacggcggcggcgacaagaaggagggcgaaggcaagaaggaaggcgacggcggcggcgacaagaaggacggcaacggcgacggcaagaaggagggcgacgcgaaggccgccaagaaggaggaaggcggcggcggcggcggcgacggcggagggaagaaaccagccgcggtggcgccgatgccgatgccgatgccgctgcaccacctcccaccgcagtacttcaacatggagtacatgaaccagtatcaccggccgccgccgccgccgccggcctacccgtacgtgccgccgccgcagtactactacgtccgcaacatgagcatggaggagaaccccaactcgtgcgccatttgctgatcgaaaaaaaaaaacgccatggcaaatgagcaccatgaatgctttgcatctcaatgcatgatctgtgtgcacttctgcagcaggtaggcgacgcgtgcgtgcgtacacgcttgtgttcttgatcgatcggccgtgatgtgtatagtataagatctcagtgtttatgatgagaagaacaaattaagtttgcgtgatcgaaccagtacgtacatagtagtaagttcgttttttttttcttttcgacaaattcaaccaacctcttcatcggtggatatatccggttaatgaaatatatgatgagaccaacg

SEQ ID NO: 21199 - DNA, 1405 bp, Oryza sativa
  ref <308>: DATABASE ACCESSION NUMBER: AK071492
  ref <309>: DATABASE ENTRY DATE: 2001-12-06
gggcgagagagtagagagagacccgagcgagagtccgacacggggccagcaagcgctgggataatggcgacggcggagaaaaagaggcctcggagcagaagcggcggcggcggcggcggcggcgtggagaagaggccgagcaggaagcagatattggggagaaagaaggctgttgaagaacttatcaggaaagctgtagccgtgaaggatcatctagcgcaatttcctgattttcataagtatcagagaaatggtcttttggtctacttggagtctggacatggaaatcaacttccattatcaacaaggaagtacatccaaaatcttctcaaggttaacatggagggacaatatgggccagaatggccttcagaagagaaaattaagcgccgggaaatggttgccccagaagcacgatatatctttgtccggcaatcttcaaatgccattaccacccaaaatattatgaagcaagattccgggctagaatttacacatgaagcatgtaatgaagatcgcttgattggttttgtacactacagatttgttttggaagaagatgttcctgttgtttatgtctatgagttacagatggtgccttctgcacaggggaaggggctgggaaaatttctaatggaattgattgaacttatagcttgtaagagccaaatgggagcagtgatgctaactgttcagaaagctaacaaccttgctatggctttctacaagaagttgagtgactgctggttgaaacatttcaatgtaactcttatcctgcagatatgtaatatccagtacttcgccatcacgagtagatccactgattgggcttgaaaaaaactatgagattttgtgcaaggcatgtgaatctgaagctaagtccaaattagaggaaggcaactgaaaactccctgcgcaatgaccaatcttgttaaaatgtgatgtgatgatggatgttgttctccactacagttttgacaccttacagggtacagcactacagctcatgcttgagcggccgcatatcgtcaggacaccatgttatcgcaatgcattcagatgtattgcacatttgcactgttcttgtctgaatgaagctgatcctgctaatccatcctgggaaacaaacacgattggctggcccatattctttccttgcaaaacgcaaatgtacatctgcacgatggagagcatatgaaggttgcatgtcgtaggcttgagacgacagtaatgcaactttttgcaaactatggatggagattcacaaatagacttgaataaatgtatactccttatcttggtttggtcttttattttgttggtgtgtttaatttcattttgaactacgatactttgtaataattggctgtagctctgatgagcaaaggctggaatgtttcattcc

SEQ ID NO: 21200 - DNA, 1437 bp, Oryza sativa
  ref <308>: DATABASE ACCESSION NUMBER: AK071493
  ref <309>: DATABASE ENTRY DATE: 2001-12-06
ttggtgtttaaaaaaagaaaaaaaggaaatagtcgtgcggcggtgtttccccttcttcctctcggcggcgacgccgactcctcgtgagttcgtccgccgccgccgccgccaccacctgcaccgatccccatccatcccgcgagcgagtaggggcgcgcgtcggttgtccggctgcttccgcggtatcctgagtgggatctaggaagtggtgggaaatggagaagccgttacagctttgtccagggtcagtgaagatagattttgcctctgcctcgtatgctggcaaggcagatatcgctgctaccgcggcagcgctcttgcatgcgcttgggccgccccgaacacctccctgctatcagttcccactggcaaaagtaaattcatcactgccactatggcctccagtgatatgcccttcaacatttgcccagaagcgtcctatgtcattgcctagcccacctccggccaagaagctgcaagtgcagcagtcttcatccatgctgccacaagattttccaaagttagaggtattgccagttgaaaagcccacaaagttgcaggtgcggcggtcaccgcaacatgtatccccagcgctgaagcaagattcaccgaagatggagaggccattgttgccaaggcctgcaacctttattgacgtgatgctgagttctcaaaagccatctagcgaaatgtggtctgaaacaaaagatgtgacactgccaaggaaaacaaactgcagctgcaagtattcgaaatgcctgaagctgtattgtgagtgctttgaaaaaggcagatactgcattggttgcaattgcacaaactgttgcaacaatgttaatcatgagaatgcaagacaggatgctatcaatgttgcattggaacggaatcctgcagcttttatgccaaaagttttgaatagcacagcccacaactgtgagagcaaagcagcagagggtgatattgtgggtaaacatacaaaggggtgtaaatgcaagagaacagagtgtctgaagaaatactgtgaaggcttcaaagctagtgttttctgttcagagaactgcagatgtacgggttgcaagaattacaagagtaatgcagatagaatttcccagaagaacactgttcatgcgcatcatgtgcagaatcctgcttcaagtgggatggttggacaatctgtgataattttccatgcagcagaaaatgactccagtctttcattggctgcatctgtgagcgatcattccattaacaacaacacttcacatgtaattcttttgcagcatacttttcaaatttgtcacgggccctgcttcctgataggctgatacttaatgtacaacacaatttaaggctatctactgcagcaatctggataagtgatgatagttgattagagaataatgcttttgtgtataaaacaaaataatccttctgagc

SEQ ID NO: 21201 - DNA, 1577 bp, Oryza sativa
  ref <308>: DATABASE ACCESSION NUMBER: AK071494
  ref <309>: DATABASE ENTRY DATE: 2001-12-06
gactcccatggcggcaatcgatctctcctcccccgcaagatcatcgccggcgcctctctccccgcgccgcggctccctgcacctcctcctccgacgcccgcgccgacccaccctccgctgctccctcgacgccgcgccaaagcaggctcaggctcagggcccgcccgcggcggtcgcggcggaggaggcgcccaccgcgcgcaaggagtgctatggcgtcttctgcaccacctacgacctcagggcggatgagaagacaaagtcctggaagagcttagtgaatgttgctgtgtcgggtgcagcagggatgatatcaaatcatctgcttttcaaacttgcctctggtgaggtttttggaccggaccaaccaatagcacttaagttgttgggctctgaaagatcaatacaagcacttgaaggtgtggctatggaattggaggattcactgtatccattgctaagggaagtcagcattggtatagacccttatgtagtcttcgaagatgcagaatgggctcttcttattggggctaagcccagaggtcctggaatggagcgatctgccttactagatatcaacggtcaaatctttgctgaacaggggaaagcacttaactccgtggcatctcgggatgtgaaggtcatagttgtcgggaacccctgtaacactaatgcattgatttgcttaaagaatgctcccaacataccagcaaaaaactttcatgcattgacgaggttggatgaaaatagagccaagtgccagctggcactaaaagcgggtgtattttatgacaaagtatcaaatatgactatttgggggaaccactcaacaactcaggttcctgattttttgaatgctaaaattaacgggagaccagtgaaagaagtcattaaagacacaaagtggttagaagatgaattcaccaaaacagttcaaaagcgtggaggagtactcatacaaaaatggggcagatcttcagctgcatcaaccgccgtttccatcgtggatgctattaggtcccttgtaaatcctaccccagaaggcgattggttctctactggggtttatacgactggaaatccttatggcatagcagaggacatcgtgttcagtatgccatgcaggtcaaagggtgatggtgactacgaactagttaaagatgtggcaatggacgatttcctctgggaacggataaaaaagagtgaagctgaattgctcgccgagaaaagatgcgttgcccatcttactggagagggcaatgcattttgtggtcttcccggagacaccatgcttccaggagaaatgtagaatcattgttgcggtaaccctggcttgtgttatttcacaggggttttcgacggaaacacacacacacaaactactagtagctgagagaaacaactgcttgcagattacttgcagcagttatttatacgtatgtataataagtatttatttaataaggatgccacagaaatttcaactatgttgccgagtttgtacactataatacaatcaaccaaatgcaatgcggctgatcgtatagcatatacttctggattttcccagttttgcg

SEQ ID NO: 21202 - DNA, 1511 bp, Oryza sativa
  ref <308>: DATABASE ACCESSION NUMBER: AK071495
  ref <309>: DATABASE ENTRY DATE: 2001-12-06
gagctcattgaactgaataaagtcggtgtgctatagctaccattcccccggacctgtgtgttggcgctgtcggtatctgggtggtgaaaaccgtgcgaaatgctgaggtgcttcctggtcgcggcggcggcggtggcgttggctgcggcggcggcagcgccggcgagggctatcccgttcacggagagcgacctctcgtcggaggagagcctgcgggcgctgtacgagcggtggcggagccggtacaccgtgtcgcggccggcagcatcaggaggcgttggcaacgacgacggcgaggctcgccggcggttcaacgtgttcgtggagaacgcgaggtacatccacgaggcgaacaggaggggcggccggccgttcaggctggcgctgaacaagttcgccgacatgacgacggacgagttccgccgcacctacgcgggctccagggcgcgccaccaccgcagcctgagcggcggccgcggcggcgaggggggctccttccggtacggcggagacgacgaggacaacctgccgcccgcggtcgactggcgcgagcgcggcgccgtcaccggcatcaaggatcaaggccaatgcgggagctgctgggcgttctcgacggtggcggcggtggagggagtgaacaagatcaagacggggaggttggtgacgctgtcggagcaggagctggtggactgcgacaccggtgataaccagggctgcgacggcgggctcatggattacgcgttccagttcatcaagaggaacggagggatcaccaccgagtccaactacccatatagagcggagcaggggaggtgtaacaaggcaaaggcaagctctcacgatgtaacgattgatggctacgaggacgttcctgccaatgacgagtcggctctacagaaagcagtcgcaaaccagcctgtggctgttgcagtagaggctagcggccaagatttccagttctattcggagggtgtcttcaccggagaatgcggcacggatctcgaccatggtgttgccgctgtcggttacggtataactcgagacggcaccaagtactggatcgtcaagaactcgtggggcgaggattggggcgagagagggtacatcagaatgcagcgtggtgtgtcgtcagactcgaatgggctgtgtggcatcgcgatggaggcttcttaccctgtcaaatcaggagcacgcaatgctgctgcaagtaacagagtggttaaagacgagatgtgagcctgtgatcgatggagggatatgatatggatatgatcgatgctttatgtgtgcttcgctgaaagtagtgctagctaagctttcgttgtcaactggatttaatcttctactgttcacggttgtactgtacgccaggtgtcaaatcagaagttaggtaaaataaattcaaagaggagcatgactaacataatgtgctcaactggattgctgaaaaatttgctcaaatcgacattactgggaaaatatttttttgcagacaaggtgcacctatcttt

SEQ ID NO: 21203 - DNA, 1004 bp, Oryza sativa
  ref <308>: DATABASE ACCESSION NUMBER: AK071496
  ref <309>: DATABASE ENTRY DATE: 2001-12-06
gttccgcccgctccaccgtctcctccgctcgtcgcctcgtcggcgcgcgttgcgatgcgcggtggtgccgtacggctgtcccccgccccgctagccgctgccgcctccccgctgccgcagggccgggccacatggcccccggtggtggtgtactgttcgccggtacgtccgtctgctcggaggaggggcaggatgaggatgaggaggtagcgcatcggcggcggcggcggcgcgacgatgcgggcaccgaaaagcgcgcgcgaagcctgtactaagctctacagaatgtgctctggttggaaggctatcttaaaccgtggcgtgtaacagttggagtttacatcctgcatctttctgtacttcgaaaatgactaaagctggagccacttgagatgagatgatagtgggaagcatctttgaatggaagtatcatgcttttttaatgatgtggactgctcaggaaaatcttctgttcaatctaattcatgctgcttgaccttacaaggtacctcaagccccagtgatggttggtgctcacctagggctagcctcaagctccagctagctccaccaacttcaatttccagcatccaacaagtaccctacatacactagattatatacataacatggttgtgatcgtgatggagacgacgatcctgctgctgtcctagctgctacaaaatctttattactccgatgacggatgacgacgacgatgattatgatgagccttcttctccagcttgctagaaggcgaattcagaagtaataaggagaaggggtccgagacatcatcaacctccccatggggaatactgttgtttgcgtctttcgttgtactgctctcgtgtctccatgtctacgtgtgtttgtagtattgtgacccacccacgaggcttgtcgatcgttggctgccggctggagatacgctggccagctgatggccgatgtacgttaattgtccgtcttctctgcatgtctaatctatcaaatatctatcc

SEQ ID NO: 21204 - DNA, 2382 bp, Oryza sativa
  ref <308>: DATABASE ACCESSION NUMBER: AK071497
  ref <309>: DATABASE ENTRY DATE: 2001-12-06
gaattcctgacggcttcacccacgcttcccccggaaggccggaaatgctccgccgggacagcagagacggacatcgccggtgcggtggctccggcgccggcgccggcgggagcgctccccaccgtgaaaaccctagcgctcctgcgtccagtccccagcggtccgcgagaagccatcgacgcgacgcggagcctgatggtgatggacccgtcgtcgcttcctcggtcgccccgatttcctcccccgcggcaccgctgccgggttccggtccccggtggcgacgctcccggattggcttatacatccggaggccaatcctgcacgggatgccctgtaccaccatctcgtcctccgcttcaccgtctcggcgacacgctcggtgccactaactccctgtttccctaagtactcaattactcatatcattctcatcattaatgtcccttctgcaacaaaatgccatagccatgtattggtgtacaatgcaaattcatgttttataggcaagaaaactggactgccttggagagatgagttcaaaggtttgtctgggactttgagtacccatgcaattcatgatgccattggatacgaatgcttgtgcacaaccaatgagaagggctggtgagggtgctgggactgagaggttgatggaaagattgaatattgggggcatgactcaggagaaagcactgaggaagaggtgctttggtgatggagttactggaactgcacgatgtgtgttcacatcagatgctgatagagacactcctcatcttcggacacaatcctcccgaaagaattatgctgatgcaagccacgtttctgctgtcattttgggtggaggcactggagttcaactctttcctctgacaagcacaagggctacccccgctgttcctgttggaggatgttacaggcttattgacatccctatgagcaattgcttcaatagcggaataaataaaatatttgtgatgactcagttcaattctgcttctcttaatcgccatatccatcatacataccttggtggggggatcaactttactgatgggtctgtgcaggtattggctgctacacaaatgcctgacgaaccggctggatggttccagggtacagcagatgctatcagaaaatttatgtggatacttgaggatcattacaatcaaaacaacattgagcacgttgtaatcttgtgtggagatcagctttacaggatgaattacatggagcttgtgcagaaacatgtcgatgacaatgctgacattaccatatcatgtgctcccatcgacgggagccgagcttctgactatggactggtgaagtttgatgattcaggccgtgtgatccaatttcttgagaaaccagagggtgctgatttggaatcgatgaaagttgataccagcttcctcagctatgcaatagatgacaaacaaaagtatccctacattgcatcaatgggaatttatgtcttgaaaaaggatgttcttttagacattctgaagtcaaaatatgcacacctgcaagactttggatcagaaattctcccgagagctgttttagagcataatgtgaaggcatgtgtcttcacagaatattgggaggatattggaacaatcaaatcattttttgatgctaacttggccctcaccgagcagcctccaaagttcgaattttatgatccaaaaactcctttcttcacctcacctcgatacttacctccagcaagattggagaagtgcaagatcaaagatgcaataatctccgatggctgttcctttagtgaatgcaccattgagcattctgtcattggaatctcttcacgcgttagcatcgggtgtgaactcaaggataccatgatgatgggtgcagatcaatatgaaactgaagaagaaacttcaaagctattgtttgaaggcaaggtcccaattggtataggcgagaacacaaagataaggaactgtatcatcgacatgaatgctagaattggcaggaacgtgatcattgcaaacactcagggggtccaagagtctgatcaccctgaagagggatactacataaggtctggaattgtggtgatcctgaagaatgcaaccatcaaggacgggaccgtcatataaaagcatagataggccttggaatcgcacctccagtcatctgaaaactggcatccattgatgtgggattttgatgcatgagttggattcaagacggatagcgtagcctccatggcgaagtggtgtttttggtttagctatatgcctatatgcaataagctgcctgaggaagtcgcgcaaccttttgtgtaatttcaggtttatgtacttggtttgttttggaatgggaactctattattggtattctgaagtttgcacctc

SEQ ID NO: 21205 - DNA, 1068 bp, Oryza sativa
  ref <308>: DATABASE ACCESSION NUMBER: AK071498
  ref <309>: DATABASE ENTRY DATE: 2001-12-06
gaccgtcgtcttccccgccggccgccgctcccctcctcgccaccgccgccatgcctttccacttccaattcccatggctccccaacaaccccacctcctcctcctcctccccaacgaaaccacctagccctgcaatccccaaccccttcctccccatccaggccggcctcgcctccttcctctcctccctcccgctcccacgcgcggccttcccgccgccgccctgggctcgcatctcctccgcctcagcctccgcggcctcggcctcggctctccccgtggcggagatcgaggagcggctcgcgggggtccccgtgtacgcgctcgccaactcctcgcaggagttcgtgctcgtgtcgtccgcccgcggtgggggtgggggtgggggaggtgcccgggcggcggtgccgccgccggcgctcgggctcctgtgcttccggagggaggacgccgacgccctcctggcgcagatggacggggacatggcggctggctccaccgtcgtgcccgtcgcgctaaacaaggttatccaacttaagtccgatggtgtggcatttagatttgttcctgattcttctcaggtggcaaacgcaatgaagttaatggaaaatgaaggccagtatgtgaatgatggatttccaggggttccagtttttcagtcaaggagtctagtcctgatgagttataacaagagatatcgtccagttttcttcagaaaggaggacttggataactcactacatcgagcctctcgtgaccagcaaaagcctaaccctgctgtaaaaatgggtgacattcaggtttcttctttggagaatatcatcaaatctatgaaggatagctcctcttccaaatgggatgatgctgtttttattcctccaggatttgatcttgctactagttcaaagcaatcgaatcatgacaactagatctttatttatgttgaagctgcttaactgctcttgtcatggaaatgcttacatgaacatattgaagaaatagaatacatgttcataccatactagcaacttgataatgggtaatgcaattataagtttgtcgttccct

SEQ ID NO: 21206 - DNA, 562 bp, Oryza sativa
  ref <308>: DATABASE ACCESSION NUMBER: AK071499
  ref <309>: DATABASE ENTRY DATE: 2001-12-06
ggtagtggcgacggtgggaagctatggtggcgtggacgctacgacctgcggcggcgggcagggccatccggcgagccgcgtaccactccgacggcgcccctcctccccgcaagctccggggcccccgcttcagctctttcaataggaacaaccatgagatcgatgcgttgcttgaggaagtcaagaatacaccggttaacatgatcaccgatgacctaatgatccgaaccgtgcggcattcttttctggctcgtcaggagattctgtatcaaaatgttctgcgatcatgggtggttgtggcagcggtactcacagggtatagctgggggtacaacaaatttgctgaaagttctactgtcggatctgaaccaccaaaagaacatgaggggaagtagaagacttgacgattgtttttgctctttacggaagactgagtgtttgggataaaatgcagtgaattgtgcctcagaaactcgcttgtaaattggtcaatttctgttaactgactatcctgtaagacagggcttgggcgaccaatcttgctccgccttttacaatctcc

SEQ ID NO: 21207 - DNA, 1425 bp, Oryza sativa
  ref <308>: DATABASE ACCESSION NUMBER: AK071500
  ref <309>: DATABASE ENTRY DATE: 2001-12-06
gtaatttcttttataattttttttaatgcgcgtcggcgttaataaagcgcaacggcaggcagcgatctaggcgcccgtcgtccactcctcctcgccttcctcgccttcctcgcttttatcgccgccgccgccgccgccgcctccgccgccgccgaggagtaggagtagtaggaggaggaagccggtagccggaggaggagcggggagatggcggacgcgaagcagcagcagcagcagcagacggcggcggccgccacgggggtctggaagacggtgaagcccttcgtcaacggcggggcctccgggatgctcgccacctgcgtcatccagcccatcgacatggtcaaggtgaagatccagctgggagagggatctgcagctcaggtcacaaagaacatgcttgctaatgagggtattggttccttttacaagggtttgtcagctggtttactaaggcaggcgacatatactactgctcgtcttggatccttcagggttctgacaaacaaagcaattgaaaagaatgatggaaagccattgcctttagttcagaaagcttttattggccttactgctggagctattggagcatgtgttggtagccctgctgatttggcactcattaggatgcaagctgattcgaccttgccaattgcacaacgccgtaactacaagaatgctttccatgcgctctaccgtattattgctgatgaaggtgtccttgccctttggaagggagcaggacctactgtggttagagctatggccctgaacatgggtatgcttgcttcctatgatcagagtgttgagctattcagagacaaacttggtgctggagaagtttcgactgtacttggagccagtgctgtttctgggttctttgcatcggcctgcagtctgccttttgactatgtgaagacacaaatccagaagatgcaacctgatgccagtgggaagtacccgtacaccggttctttggactgtgccatgaagaccttcaagagcggtggcccattcaagttctacactggcttccctgtgtactgtgtcaggattgctccccatgtgatgatgacatggatattcttgaatcaaatccagaagttcgagaagcagattggaatataaggtcttcagttggaggttaatatgcggagttatcatttgctcgagtggagataataacgttccagctgcttacactatcggtagttggttttggtagacaaaagtttaaaccaagttatcctagcttaaatgttgccgtggtggtactattgtgtcttttacaataatcgaatcattgttgtaactggggcgatttttttggggtggacatactttatttttgttggctgggactcagccatgaggggggatacttcctgcttgcgccattgaattaaatgggaccatattttatac

SEQ ID NO: 21208 - DNA, 1686 bp, Oryza sativa
  ref <308>: DATABASE ACCESSION NUMBER: AK071501
  ref <309>: DATABASE ENTRY DATE: 2001-12-06
gatgtgcccgagagtccacacgagtcttgagaaccttgacgtctcgagctcgagccgtactgacctgaagtcctgaacacgccgcaagattcgaagccaaaccaacccaagctcccaggagaggagagcatctcctgcatctgcggcctcccccatcccactgctgctgctgctggtttgaaaccaaggcgacctcctcctgtagtagcgaggaggagaggagaggagggagaggcgggttcttggctcctggggggccgaatcgcgggggttcttgcctgcccggatcgatccggcaatggatgcggctgccggaggcgcgccgccgcggcccgcggccggaatccgcgtccgggtgccactggtagagtctgtgtcttgttactgcagggtagatggaggtcttaaaactgttgtgagtgctaggaagtttgtccctggtgcaaagctgtgcatgcaacctgacattaaaccaaacaagcgcaagtcaaggagctcacacaaagagaggtgccgaactcaggcaccacttctacctggccttcctgacgacctagctattacctgcctcatgcgggtccctcgacttgagcacacaaatcttcggttagtctgtaaacggtggaaccgactgttatctgggaactattattattccttgcgtaagaaacttggcatggcagaagaatgggtttttgtcttcaaaagggaccgtgatcggaagatttcttggcatgcctttgacccagttcaccaggtgtggaagtcactccctccagttccagcagagtattcagaggccgtgggctttggctgtgctgttcttagtggctgctatctgtacctgtttggtggcaaagacccagtccgagggtctatgaggcgtgttgtattttacaatgctcggataaacaagtggctccgagccccagatatgctacaaaagcgtcactgctttggttcctgtgtcataaacaaccgcctctatgttgctggtggggagtgtgaagggatacaaagaactctaagatctgctgaattttacgacccaaacaggaatagatggtcttacatcagtgaaatgagcacgggaatggtaccttttattggagttgtatatgatggcaaatggttcctgaaagggcttgattctcatcgtcaggttgtgagtgaggtctatatgccaacatccaacgtatggtcagtcactgctgatgaaatggttacgggctggcggaatccaagcatttgctttaatggacgtctttattcagcagaatgccgggacggatgcaagcttagagtctatgatagggacacacgatcgtggaccagattcatggacagcaggcgccatctgggcaattcacgagcttttgaagctgcagctctggtctccctaaatggaaagatctgcattatccgcaacaatatgagcatcactcttgtcgatgtctcaaacacaccaacagttatcgagattaacaatgctcacatgtgggatgtttttgctcggaagggccagcacaggtctttcatagcaaacttgtggttcaccattgcgggtcgtaatttcaagactcacattatccattgccaagtgctccaagtttgagcatggctccatgtgaagttggaaactgggaacattctcaaattttgaaagggccgatcaatcggaagctg

SEQ ID NO: 21209 - DNA, 1111 bp, Oryza sativa
  ref <308>: DATABASE ACCESSION NUMBER: AK071502
  ref <309>: DATABASE ENTRY DATE: 2001-12-06
gtaattgttgatgatggaggaaggagagaagcagagcagcggggggcggtggcggtgtaggtggctcgtcgacgtcggccggtggcgcccctcccccgccgagttccaagccgccgccgccgtcctcccgccgcacgaccgccccgccatccacaggttcgtcagagaagaagacaggaaacgagcgctcgtcagccgcctgctcaagtactcgctcgtgcaccatgcccttggaatgccattccaccaaattcgcatcaaccgcacgcttgaagggaagccctatctgaataaaaatgtcaaccttcctggcttcaacttcaacacgtcgcatcagggggagtacgttggcatagcatctgagcctctctgcctcgttggcctggacattgtgtgcatctccaagccccaacgagaaactgccctggagttcatcaacaatttcacttcctatctcacagatcatgagtggaactgcattgttactgcagacagtcatgatggtatgctaactgagttctacaggtattggtgtcttaaagaagcatttgtcaaagctacaggtgctggcgttggattcgggctgcaacgtttggaattccaccatatgaattggactaatatttctctctgtattgatggagaagaggctaggaaatggatgttttggcttttcaagattgatgaaatgcatttggcatccattgcgaaagggcatccagaggatgctattgacagcttcaggagaacattatctgatgtggttattcaggagggagaattgcatacggcaatagaaattccagaagaagctttcactctattgacagtggaacaccttatacagttacatgattaaatggtcttcttgaattttgcggtgacatactaatgcaggactaaaatcaacaaattgtgagtgtatcctgaaagttaaaatacatacatagcacaccaaaattaggaaaagtatccttgtatttgctctcggtgcttctgcagaaatgagagcttaagatgttagggcctgttttttctttcataacagaggagacgcttgatattgtaagctttgactagtttggtagtgtttgcaaaggcgcattttttt

SEQ ID NO: 21210 - DNA, 1293 bp, Oryza sativa
  ref <308>: DATABASE ACCESSION NUMBER: AK071503
  ref <309>: DATABASE ENTRY DATE: 2001-12-06
gaagcttctcgagccctcctcctccgccgccgccgccgccgcctccgcctcgccgccggcgcagagtcgcaggaacgatgagccgacgcaacagccgcaccatctatgtgggcaatctccccggagacattcgcgagagggaagtggaggatctcttctataagtatggccgtattgtggatattgacttgaaaattcctccaaggcctcctggttatgcttttgttgagtttgaagaccctcgtgatgcacaagatgcaatttatggccgtcatggatatgactttgatggccacaggttgcgggtggagttagctcatggtggcagaggcccttcttttgatcgatcaagtagctatagcagtgctgggcgccgtggtgccgctaaacgtactgattaccgagttatggttactggattaccttcgtcagcatcatggcaagacctcaaggatcatatgaggcgagctggtgatgtctgtttctctgatgtttaccgtgagggtggagcaatggaattgttgattataccaactatgaggatatgaaacaagcgataagaaagcttgatgactcagagttccgtaatgcattttcacgggcatatatcagggtgagggagtatgattctgctaagcgcagccgctctcgttccagaggtagaagccacagccgctctatctctagaagcagaagccgcagccgctcgatctccagaagcagaagccgcagttatagcagaagcaggagtccaagatctaggtctgcttctcggtctcactcacctgtgaaagaaagatctaggtcggcttcacagtctcgctcacctgtgaaggaaagatcaccatcaagatccccaccccctgctacttctcctcctcgtgaaaagtcagcaagcaagagccctgtcaagagcagaagtttatcccgatccccatctcctgtgaaatctgagtgaagatggatgcacttgaagcctgccagaaactatttcatgatttgtggagctgagtttcggaaggcagtagattgtggattatggtttatctgtttctgcgttaccattgttgttacttttcagaagagagccgtgttatttcactgttgcttggtcatgtcgtaatatctgtcagaaacattgccttacatgcttagcgttttacttgccatcaccaatctatcagacctcgtagcacatggtgctcgaacttcatgctatacatacagcactatgaactctgctatattctaaagctcaactatctgtagtaactgcaggaagcctttgcgctt

SEQ ID NO: 21211 - DNA, 2479 bp, Oryza sativa
  ref <308>: DATABASE ACCESSION NUMBER: AK071504
  ref <309>: DATABASE ENTRY DATE: 2001-12-06
ggctgcgttgcccccctcctcctccgccgccgcctcatcccaccactcgctagtccaatctcggtctctccccgcagcgacgcgaaggggagcaagggcaagaagcggaagcacaaggacggggagggggagaaggagcacgggaagaggtccaaggagaggaagggggagggcgaggcggcggaggcgaggcgcggggacgacaaggtgaggcgggcgatggaggacgagaggttcgcggcggcgcggaccgacccgaggttccgggcgatgcggcggaaggaggcgaaggtggagctcgactcgaggttcaccagcatgctgacggacccgaggttctcgtcgtcgtcggcgccggtggacaagcacggcaggaggcgccgcaagaagggtggcagggagaacccgatgctgcagtactatctcaaccaggaggaagaggaggaaaaggagaaggccaagttggttgaagaagaggaagaagagggggacgcagaagagcagcaaggggaagaagagagctccagtagcgacgacgacgacgacgatgaggacgaagaagaggacgatgacgacgagtactctgtcggcagtgacattgcgcattatttgatgggcaggcatgatgatacacctatgattgacaaggaaacccataggcttgctgttgttaatatggactgggatcatattaaggcagttgacctgtatatggtgatgacatcttgcctcccaaaaggtgggcgagtcttatcagtgtcagtctatccatcagaatttggacttgagcgcatgaaaattgagtcaactaagggcccagctgcccttgttgatgtcaatggtagtgatggtgaatatagtggtggtgatgatgatgacgacgatgaagaagaagaagatagtagtgacactgaacatgattctgaggctgaaaacaacaagctacgtacttatgagctaaacagactgaggtattactatgcagttgtggtgtgtgattccagtgcaactgcaaatcacctgtacatgaatcttgatggtacagaattattgaaaacatcaaatgtgttcgacttgcagtttattcctgactctatggaatttaaacatcctgctcgtgatgttgctacagaggcacctccaagttacaaggagcctaattttgaaactcgtgctttgcaacatagcaaggttaagctcacgtgggacgatgatgaaccagaacgcaaaaaggtcttgaggcgaaagttcactgatgatcagttagatgatcttgatatgtacttagcaagtgatgacagtgcatcagacgatgaaggtgcagataatcatggtgacgagtctctacaaagtggagccaaaagaaagttaacaagggaggagaggttggctcttctactacaaggtgacaaatccgaggaggaacaaactgatggcgaggacatggagataacattcaacacagagcttgaggaccttagcaagcgtatacttgacagaaaggtcaacaatgagaagactgtctgggagaagcaccaagagaaaatgaaagagaaacgtaaatctaggaagagaaggtcaaaggatgatgatgatgatggctatagcagcgaagatggcctggatgaacatgacgatttctttgatgatgaaatgtctgatgaagaaattaagccaaacaagaagcagaaggcaaaggccaaagataaaggaaaggggaaaggaaaggacaaactcccagaacaacatttggaggatgaagcaaccagagaagagttggagcttttggttgcggctgacaaggatgcaggcaacggtgcaaagggttataacttgaagcgcaaaaagggtacgaagggcaagaagggtaaagagcaatctgttgaggacgaacttcccgacatagatcttagcaaagatgagaggttctcagccatgttcaattctcattggtttgcggtggatcctactgatccccagtacaaaaggagtgcggcctttatgcgcaagcaagctgggataaagggagcacatgaaccatctctgggaggtagaggtagtggtagaggtacattgccacctgatgatgtgcctaccgatactcatgaccagaaacctgatggcacatccacggagaagctggaaacaatgtctgcagtcaagtcactaaaacggaagcttactgcattaaaaaacacaagcaagagtgaccgatagagaaaagctttgctttaccctgatgaccaatgaacaagctttttttttttatttgtctatgacgagagttattttggctttagaatagtttttaggtatgttatttatgtttgctacctacctatgaaaatgtgtcaaaatttgggttttgacaatgatcaagtaggacaattttgttatccttaatattttcgaatatagttctattattttcaggctataaaattaaattatgatggtggctttgtaccaacattagtgg

SEQ ID NO: 21212 - DNA, 1334 bp, Oryza sativa
  ref <308>: DATABASE ACCESSION NUMBER: AK071505
  ref <309>: DATABASE ENTRY DATE: 2001-12-06
gagccgcagatctccatcccgccagcagcggcgccggcatcctgcttccaccgcgtcctcgcagtagtagatagatctatttgcctggctctcagggaagagggtaggagtgtggcatgtcagggatcctcgcgtgggcggccgacgtggtcggcggggccggcgccgccaacgacgacgaagctgatgacgctcgggcggtggcgtccgcggccatgaccccggagcagcgcctccgtgccgctgacctggatgccaaggcagcatcgctgcggcgctcgatccacgacctccgcctccgggtgcccccgcctcatgtggcgcagcgcctgccgcacctccatgctcattccctcgcgtcctcagccgccctcgcgctccagctcaatgcccactcctccaccaaggaacaggcactgcagagagagataacacttcaagaagaaaatgcagcttatgagaaagctatatcaaattgtcggcagaaaattcaggaaaagcagatggaggttactctgcttcggagtaatttgaaggaaatggaaatttcagagcaggatttgaaggcacagctggacaatgctcagaatgagcaatatgcttctcaaaataaagcatcagctgctgcttctgacaatactggaaatgctttgatggaagctgaatcattgattaatctcaagtctaatgacttgaaagagaagaatgaagagctgaaattgttggaaagtagtgtgcgagtgctggagatggagtggtccgtagttgaaggggaatccttgaagaatccgactcctgcccagagggaaaaggtcctggagaaacaattacatagcctcattgagcagctgacagctaagcaagctcaagctgaaggcctaatcgtggatgttcatgccaaagaaaaggaattggaaaggttgaataatttacataaaaatcttcaaagtcgtaacaatgatggtagtgtagcacgaaatccattcagggctgtgcatgaagattctgatgccaaagctgttcggcgaccctatcaatttggtcttagaaccgaagggctgaaaaggttgatgattcttaggtctgcttctgttctctatattttggtacttcatattgttgttttcataaagctctcggtttcaaagcagtaagaaacttttgttcccatataaagaggaactatgtttctgatattaacgtgtgactattttcctatgtatttagttctaaaaatgtttatccccatacaaaggatctttgtttctactatcaaacatgcaagtacttgcaggatgtataaatcaagaagcgtcgtagcctcttccagcttc

SEQ ID NO: 21213 - DNA, 1666 bp, Oryza sativa
  ref <308>: DATABASE ACCESSION NUMBER: AK071506
  ref <309>: DATABASE ENTRY DATE: 2001-12-06
gactcgcacccacacatcacatgcatgcgaacacgatggagctcacgcctttgctcgccgtcgtgctcctcctgccgccggcgctcgcggtggcgcacatggcatggacggccgcctcccgccgccgccacacgcggtgctacctcttggactacgtctgctacaagccggaggatgaccgcacgctgacggcggagctcgccggcgagattgtccagcgcaacgagcggctcgggatggcggagttccgcttcctcctccgcctcatctcccgcgcgggacttggcgaccggacctacgtgccgcggaacctcctcgacggccgcgaggagctcgccgcggggcagcttcacgcggtcgacgagatggacgcctgcttcgacggcgccgttccggagctcctcgccaggacggggctccgcgcccgcgacgttgacgtgctcgtcgtcaacgtcagcggcttcttcccggagccctgcctcgcgtccagggtggtgcgccggtacggcatgcgcgaggacgtcgcggcgtacaacctctccgggatggggtgcagcgccacgctggtcgcggtggacgtcgcccggaacgccatgcgcgcgcggtcgccgcggcccgtgatggcgctggtggtctcgacggagtcgctggcgccgcactgatacgccgggaaggacaggaccatgatgctggggcagtgcctcttccggtgcggcggggcggccgtgctgctcagcagcgacccggcccaccgcggccgcgccaagatggagctccgccgccttgtgcgctccaccaccgcggccagcgacgacgcctactcctgcatcatgcagcgcgaggacgacgatggcctccgcggggtcagcatcagcaaggccctccccaaggccgcgctccgcgcgttcgccgccaacctgcagcgcctcctgccgcgcgtcctcccggccatggagatcgcccggctcgccgccgacctggcatggcagaatctgttgcagcgccgccgccaccgagggcagaccaagctgaagatcaacctcaaggcaggggtggaccacatctgcctccacgccggcggggtggcggtgatcgacgcggtgaagaagagtttcgggctggaggagcgagacgtcgagccgtcgaggatgacgttgcacaggtgggggaacacgtcggcgagcagcgtgtggcacgtgctgtcgtacatggaggcgaaggggaggttgaggcgaggcgacaaggtgctgatggtgacgttcgggtcggggttcaagtgcaacagctgcgtgtgggaggtgaccggcgacatggccgacaagggcgcgtgggccgactgcatcgacgcgtacccaccggagagcaagcccagcccgttcttggagaagttcgcttgggtcaacgatgaagtcgccgatgaatcctcctcgccgttctagaggacgggatcacgcgacacgcattggcagtaggagactaggagtaaataaagcgcaacccgcctcgagtataattttgctataacaaatagtatattcctaaagaataacgtggatttcttgacgacagatgtaggtgttataaaatctattttaacgtggatgatttaagatgtaagtaaaaagctcagtacagaaggaagcttacgccggaagaaaacttacat

SEQ ID NO: 21214 - DNA, 1200 bp, Oryza sativa
  ref <308>: DATABASE ACCESSION NUMBER: AK071507
  ref <309>: DATABASE ENTRY DATE: 2001-12-06
gatatcttttgtacacgggcgtactacgtgttacggctgaaccaatctatccccgtgctcgctgtgaggccattgaccagaggaaacggaggaggagagagcgatcgtggtcgtacgtacgttgggagagaagaagggacgcgcgcgcgcgcgccggagcggcagggcaggatgaaggtgcagtgcgacgtgtgcgcggccgaggcggcgtcggtgttctgctgcgccgacgaggccgcgctgtgcgacgcgtgcgaccaccgggtgcaccgggccaacaagctcgccgggaagcaccgccggttctcgctgctcaacccctcggcgtccggccgctcgccgacatcgacgacggcgccgctctgcgacatctgccaggagaagaggggtttcctgttctgcaaggaggaccgggcgatcctgtgccgcgagtgcgacgtgccggtgcacacggcgagcgagctcaccatgcgccacagccggtacctcctcaccggcgtgcggctctcctcggagcctgccgcgtccccggcgccgccgtcggaggaggagaacagcagcagcttctgctgcagcgccgacgacgccgtgccggccccggcggcgcccgccacgagccacggcgggagcagcggcagcagcagcatctccgagtacctcaccacgctgcccgggtggcacgtcgaggacttcctcgtcgacgacgccactgccgaggccgccgccgccgccgccgccacctcttccggcatctccgcgaacgggccgtgtcagggggtaacacggatcggagggctgcaagaatccgccggctaccctgcgtggatggcgcagcagcagctgtgctgcgacggcctcgtcgccggcgacgcgtcgccggctagccgggagcggtgggtgccgcagatgtacgcggatcagcttgccgccggcagcaagagatccaggacgtccactgcttcttcctactcctactggtgaaactaaagcaattgaggccatggtttgtacgtagtagatgttgtttcgggcttaattaatgactgcattttgcgcttccggacgggagtgtttgtgcgttatttttgaggcgcagaggaaaatctgagccttttgtatcccttcctttttgctcgtcacgactagtactgtatgttttttttctacgcaataacgagaatttttcctcttttccaatgc

SEQ ID NO: 21215 - DNA, 1080 bp, Oryza sativa
  ref <308>: DATABASE ACCESSION NUMBER: AK071508
  ref <309>: DATABASE ENTRY DATE: 2001-12-06
gacctgtcgccaccatccaaaccaagtatctcgtgcctcgcaaaggagaagggaaaaaaaaaaacctagtatctcgtgatatctgtctcctccaaacaaaaaagaatctgtgcaagatctctctccctcgatcgatctatcagcttgcagcagtgtgcacatggatcctaatgccgtgcacgtccaaatgcccgccgttgacaccgaagcgtgctgtgacgatgagaagaatccgcagcctgcacgggagatcatcagcgaccacgtcgccgttcggccgacaccggcggtgggcaagacgctgtcgggcgcgtcggacctgttgaagctcctgccgacgggcacggtgctggcgttccaggcgctggcgccgtccttcagcaaccacggcgtctgccacgccgtcgccaaccggtacctggtcctggcgctcatcggcgcctgcgcggcatcctgcatgctcctctccttcacggacagcctcatcggccacgatggcaagctctactacggcgttgccaccctccgcgggttccgacccttcaacttcgccggcacgcgggaggagcacggcaccgtgttcaaggacctgtccaggttcaggatcactgcgctcgactttgtccacgccttcttctcggcggtggtgttcctggccgtcgccttcgccgacgcagccgtgcagacgtgcctcttcccggaagcagaagcggacatgagggagctgctggtgaacctgccgcttggcgccgggttcctgtccagcatggtgttcatgatcttccccaccaccaggaagagcataggctacacagacatgacgccccactcgcagtgatgacatttcattcaaatgcatgcagccatggagtgtacaccatccgtcccaaaataaattaaatcctatgtacaaatctagatgtagtaatattatctagaatcgtaattaggatttaattcttttttgagatggagggagtatatataggataatatttctctcccaagtactacagaatgttctaattaacaagctaacaagctatatgcatgcaatacatctaacaagcccttcaagct

SEQ ID NO: 21216 - DNA, 1294 bp, Oryza sativa
  ref <308>: DATABASE ACCESSION NUMBER: AK071509
  ref <309>: DATABASE ENTRY DATE: 2001-12-06
ggcccctgttccgcggtgcttttccccagccatcacgagacctcccccaaaaaaaccaagcaaacgccacagccactccaccagaccaccaccaccaccaccaccccacccagctggtgcgcctccaagaattcctcctcctcttcctcggattccttccccctcttcggcggcgggctcccccaccggcaccggcgtccccgctcccggcgtcgccattggcctcctccctcgtctctgctcgacggaatatgaagttaaggccaaaaagacctggatggaagtcacttatgcctctgcagttgagcaggaaatctgcactgcgtttctttttgtttcccaaggttcaggctgcgggtcaatctccagatgacacaccagtttatcttaatgtgtatgatttaacacccatgaatggctatgtatattgggcaggccttggtatatttcactccggaattgaagttcatggtgttgaatatgcatttggagcacatgactacccctcaagtggagtatttgaagtagagcctcgtcaatgccctggtttcagattcaggaaatcgatatttctcggtacaacatgcttagatcccattcaagttaggcaattcatggagctacagtcagtgaactacaatggagatacttaccaccttatcacaaagaactgcaaccacttttgcaaggacatgtgttacaaattgactggtaacaaaattccaaaatgggtaaatcgcctcgccagaataggtgccatttgcaactgccttctgccagaatcactcaagatatccccagtcggccatgatccaaacagtcgacctgaagattgtgagaaaaggcggctgaggaacccgttgagctgcttctcttcgatctcgagccagaggcagctgcccccatcttccccgttcccgacatcacctgtgaaagagcctcttgcgtacagttcatcaaggaaatccagcgctccatcactgaagagtaggtagcctggcctcccttgtgtaacttttgataccaagttaggctaatttggtcagtggcaacatctggagggcactaccctgcatgctgccgcaactgtcagctaattctttttgctcggtatcagtcaaaatgcttggtggtgttgttgtatcatgtaagtggaactaatgcgagtgagtcacctggagaggtgtctctgtgtgggtgagagtgaatgcctctcaattctacccaccccctgtactgatcatgagacacgaaccgggatgtattttgtatattattaatccactattctttc

SEQ ID NO: 21217 - DNA, 1150 bp, Oryza sativa
  ref <308>: DATABASE ACCESSION NUMBER: AK071510
  ref <309>: DATABASE ENTRY DATE: 2001-12-06
gtcgctggcgtgggcgatggcgcagctggggtgggtggctggccccatcaccctcctcctcttcgccgccatcaccttctacacctgcggcctcctctccgactgctaccgcgtcggcgacccggccaccggcaagcgcaactacacctacaccgacgccgtcaagtcctacctcggtggctggcacgtctggttctgcggcttctgccagtacgtcaacatgttcggcaccggcatcggctacaccatcaccgcctccatctccgccgcggctatcaacaagtccaactgctaccactggcgcggccatggcacggactgcagccagaacacgagcgcctacatcatcggcttcggcgtcctgcaggccctcttctgccagctcccaaacttccaccagctctggtggctgtccatcatcgccgccgtcatgtccttctcgtacgccgccatcgccgtcggcttgtcgctggcgcagaccatcatggacccgctggggaggacgacgctgacgggcacggtggtcggcgtcgacgtcgacgccacgcagaaggtgtggctcacgttccaggcgctggggaacgtcgccttcgcctactcctacgccatcatcctcatcgagatccaggacacgctgcggtcgccgccgccggagaacgcgacgatgcggcgcgccacggcggcggggatctcgacgaccacggggttctacctgctgtgcggctgcctgggctactcggcgttcgggaacgcggcgccgggcaacatcctcaccggcttcggcttctacgagccatactggctggtggacgtggccaacgcctgcatcgtggtgcacctcgtcggcgggttccaggtgttctgccagccgcctgcgccgcctccatccagggcgtcctcgactcgctcaagacctacgtgcccttcaagaccaggtcctgattcgacctcgccgtagtgcgttagtgtatactctcggtttgattccatatggatatgggggaataatgatttactacagtcgttttggactctctgaggtgcagctttatctgaagattttatgagaaggatttagcttaagtgtggttcgtataagtattattatggtgttaacagctgggtaattttagacgatattataagggtc

SEQ ID NO: 21218 - DNA, 824 bp, Oryza sativa
  ref <308>: DATABASE ACCESSION NUMBER: AK071511
  ref <309>: DATABASE ENTRY DATE: 2001-12-06
gatcgtctcatccgccgcctcccctcgcctcgccgcgcgcttcctccgcctccgccgccgcgtcgatctcgctcgcgcagccggtttcttctctcgtcggtgggtggggtataggatggcgggacgcgggaaggcgatcggcgccggggccgcgaagaaggcgacgtcgaggagctccaaggccgggctgcagttccccgtcgggaggatcgccaggttcctcaaggccggcaagtacgccgagcgcgtcggcgccggcgctcccgtctacctcgccgccgtcctcgagtacctcgccgccgaggtgctggagctcgccgggaacgcggcgagggacaacaagaagacccgcattgtgccgcgccacatccagctcgcggtgcgcaacgacgaggagctcaccaagctgctcggcggcgccaccatcgccagcggcggcgtcatgcccaacatccaccagcacctcctccccaagaaggccgggtcatccaaggcgtcccacgccgacgacgacgacaactgagcccccttcctcctcctccgccgccgccgccgcctgcattcgtcatcttgtcttatgcactagtaggatatttagctgtttattttggaccaaggtgtgttgttgcgttaagcagtaggaagaaacaagaaaaaaattgcttagttcttggtttgttttggtggcctgattgatggctgtgaatatggtgaaatttttggctatttatctcagatgtaatcccggcgatgatcttgctgtgtttggcacttgagtggttgaagaaacgaggaacagactgaaactaaaactttgaatcgtc

SEQ ID NO: 21219 - DNA, 1499 bp, Oryza sativa
  ref <308>: DATABASE ACCESSION NUMBER: AK071512
  ref <309>: DATABASE ENTRY DATE: 2001-12-06
gattgatacatcaagtgatcatctcagtgttagctaagctagctagtagctttgatcagtggcagccagccatggggaacggcaaggtgtacgcgacggtggtgctcatcaggctgatatacgccgggatgcacatactcaccaaggcctccttcaacgagggcgccagcaccacggtgttcgtgttctaccgccacgccgtcgccgccatcttcttgctacccttcgcctacttcctcgagatcaggaagaagcaggcgccgccgctgacgtttcggctgtctgccaagatcttcgtccatggattctatgggatggccggaacgataaacctgtacagcattggcctgaattacgcgtcggccacctcgtcgtcggccatcttcaacatcgtgccggtggtcgccttcatcttggctgtcatgttcaggatggagactctgaacctgaagagcacccatggcatggcgaaagcatcggggatactcctctgcatcggcggcgtcatcgtgctggctctgtaccaaggcccggagttcaagtccttgaaccaccaccagctcctccaccatgcgagcgccgccgccgccgccgcggcgcattccaagaagaactgggcgctggggatcttcctgatgaccacctccgtcgtgatatggtcgttctggacggtgaagcaggggccgttgctgctggagtacccgtcgaagctgatgaacacgacgctgcagtgcgtgttcgcgagcgtgcagtcgctggtgatcgcgctcgtcctcgagagggacttctcccggtggatcctccccggcgtcgtcagcctcgtcggcgtcctcttcaccggcatcgtggtggcggcgatctcgtactacctgcagatatgggtgatcgagaagaagggccccgtgttcctgtccatgtcgatgccgctcagcctcgtcttcaccatggccatcgcctcgttcctgctcggcgaggacgtcagcctaggaagcattatcggcagcctgctgctcgtcgccggcctctacaacgtgctatggggcaagagccgggaggaacacggcggcggcggcgtcgtcgttgccggcgctggcaccgccggcggggagaaggatggcgcggtggctcccgccgcagccgacgtggtgatggccaaagtttgaccgacacggtggtgcaccacgtgtcgcggcggcgtggaagcgatcggaaagagcgaagctacaagtacaaaggatgggggtggtgatgaccggtgaatctcgaatatcttttgcggtggccggggcacgggcgaccggtggtggtgcggcggcggcggcggcggcagaaagggttaggctaggcaagctagactacccggtgaagtggtgtactcagctcgtgtcaactgataaatctttgtactattattcctgtttttttttaatactagtataagacacatgtgctttgcaactggatttttcacattttggtccttttaaaaaacttatttc

SEQ ID NO: 21220 - DNA, 1257 bp, Oryza sativa
  ref <308>: DATABASE ACCESSION NUMBER: AK099178
  ref <309>: DATABASE ENTRY DATE: 2002-08-28
ggcgtggagagcaacgctcgctgcgacctgcgacgccgccccgcgccaacttctctccctcccacctccaccacctcctcctcctcctcctcctctcctacagcgccacaatgccgcgcgcccgcgtcgtccacgtcatgctcctcctcttcgtcgcgctcggcgcgtgccgtgccacccacaacatcaccgccatcctcgccgaccaccgcgacctcgccgagttcggccgccagctcacggccacgggcctcgcggacgacatcgacgggcgcaacaccatcacggtgctcgccgtcgacgacgcccacatggcgcagctcagggcgcgcgggctcccgcgcgaggcgctgcgccacgtgctctcgctgcacgtcctcgtcgactactacgacgacgccaagctgcaccgcctccccggcggctccgcggtcgtgtccacgctgttccaggcgtcgggcgacgcgcccgggagcgaggggatggtgaagatcgccgtgcgccgcggcggccgcgtcgcgttcgtgccccaggacgtcgacgacgcccgggccaacgtgttctacgtcaagtccgtgcacgaggcgccctacaacatctccgtgctgcaggtcagcgccgtgatcacgtccccggccgccgaggcgccgtcgtcggcgacggagtcgaagcccaactctacggacgcctcgtccaagcacgggccgccgaatgctggtgcacacgctgcaccgtcgccggtggggcaaggttcgtcgtccgacgacggcgccgacgaggggaagaaatccggcgacggaggagatggtggcaagaagaacggcgccagcgtcggcgcggcaccgcgtgggctacccttcgctctggcgtttctcatggctgccagtgccatcctcgtggtgaattggtgatcgtgtgaaactgtgaagttgatcaccaacgttgtcttgtgaaattcattttgggtgaatttgcacgtttctgtgccacttttgttggggatttcgtgagtttttccactgttaggtaccttaggttcatggtgcattggtgcttggaaatgtgttgaattgtggtttgcaagttagtagtaccattttgtgtcgtcaacttaattcgcacgcgaacgtatgatcattcatcagctgtattctgagtccaaaactccaagtcgaattatgtaatgatctgatcaaactgaaatgcatctgttcttcagatatgcatatacgtgaacgggaaaatgactctgcatgc

SEQ ID NO: 21221 - DNA, 1064 bp, Oryza sativa
  ref <308>: DATABASE ACCESSION NUMBER: AK071513
  ref <309>: DATABASE ENTRY DATE: 2001-12-06
gctcgttccgctcatctctctacagttcccttcccaaaatccctcccctcgggcccctcttccccttcgattctggcggtttgccgccggcgagggttggaggaggggtccggccacctcccctccactagtattgtatagttagatttgtttttaggtcgtcaggtgtttcctgtagttagggtttgtccttagttggtgttctgccgacgagtctccatgggtgccgttgtggtcggcggcgacggcagttggtggcggtggaggtgcgagatccaaagacctgtggatgaatcgacggaaggagctggctccttgcggcggcggcggcggctgcatcgtcgtttgcggccgggaggttgccaccccgttcctagcgttgcgtgcggtgacttctcgtggcttgcatcgtctggatctgctgtcgcccggagcttgctgctcgtggtgcatgatgatagcccgtcgacgaggtggcggttcgagagcttccaatgccaaggttccatccgtcaagattcacaggatttctcttccccatccccgtaagtcgatccaagaagacaacagtctgtttgccaccaatcgagttattcagttggtttggggatttagatgtgggctccttctttctatgtgtttcctaccagcttgctccatgcagggtttgttgttcgggttgagctcacgctcctcagatttaatgacgaactctgtggacatctcttgctgagtccggttatgcttaatccaaaatctatggctcaacagcagacctccgtttttgtgcagtcttcgtagaggcaaccggatggggattgccggtttgtcgagcgtgctgcacgccgaaggaggcccaaggttgcattcgtcacggcattatcgcagctccctgtcgatgtgcaacttctctgttgtgtggtttcaatatgaagattgtagccctagtgcagttttccgttcattggaaacagatggttttatgctctctttatctgtttggcaatgtactgggatttattccagtgaactctgtcgttttatattaatggaggtttaagttt

SEQ ID NO: 21222 - DNA, 803 bp, Oryza sativa
  ref <308>: DATABASE ACCESSION NUMBER: AK099179
  ref <309>: DATABASE ENTRY DATE: 2002-08-28
tgaggcacggaggtggcacactcctctcgcctcgcttttcccttctagatctcgccgctctctctccgtctcttgcggtctcgccgtcgtcagtcgccctcttccctcccctccgacctcctgtcctctccagtctcccctttccctcccatctccccacggtagcgcgcaggacgacgcacgggcggcacgcggggaggcgcacaggcgggcgtggcgagggatgcggcacggcgcataggcgcgacggctggcaaggggacaggcgcggcgagcgggcgacacaggtgacaggcgaggtgaaacacaccgagagggtttagcgtcggatccagtctccaccggagcgcggggcggcggattccaaggcggcgatggagttctgcccggggtgcgggatgctgctgcagatccagccggccaccggcgggaaccgcctgcgcttctactgccccacctgcccctacgtctgccccgtcaaaaacaagatcgtgaagaaggcgagactagtgaagaaggaggtggagcccatcttcagcgacagcgacgccatgaagaatgcccctaagaccaccactacatgcccaaggtgccaaaatggagaagcatactacaggcagatgcagattcgatcagctgatgagccaatgtctacattttacaagtgttgcagagaagaatgccaatttgattggagggaggactgactttagtaatatttcttgtttaatgtgtgtggatatttttcctgctaaaactatgtaatcatatgaaaccttttgtaatcagctcatgccgcagcg

SEQ ID NO: 21223 - DNA, 2046 bp, Oryza sativa
  ref <308>: DATABASE ACCESSION NUMBER: AK071514
  ref <309>: DATABASE ENTRY DATE: 2001-12-06
gtgctcttatcgaaaattaaaaaaagagagagaaataaaaggggatcgatccgctcttgtagttgtagagcgttccattccacttccacagcagtggactcagtgagcaacggaggaagcaacgatgcgctcccgatctctcctcctcgtcgccctcgccacccttcttctccacgcctccgcctccgcctccgacgacgacctcgactacctcatcgacaacgccgacgacatccccgccaacgaccccgacggctggctccaggagggctcccccgacgacgacgacgacgacgacctcttccaccatggccaggcccaggaccatcccatagatgagacccacgtcttcctcctctccgccgccaacttctccgacttcctcgcctcccaccgccatgtcatggtcgagttctacgccccctggtgcgcccattgccaggcgctcgccccagactacgccgccgccgccgccgacctctcccctcttgcccatcaagtcgccctcgccaaggtcgacgccaccgaggacactgatctcgcccagaagtacgacgtccagggcttccccaccatcctcttcttcatcgacggcgttcccaaggactacaacggcgcaagaaccaaggaagccatcgtgtcgtgggtcaacaagaagctagctcccggggtgcaaaacatcaccaccgtcgacgaggcggagaagatactcaccggggaggacaaggccattcttgccgtcctcgactccctatcgggtgctcacagtgatgagattgctgctgcttcgaggctggaagatgctatcaacttttaccagacttccaatcctgatgttgccaagctttttcaccttgacccagcggccaagcgcccgtccttagtcctgctcaagaaacaagaggaggagaagttgaccttctatgatgggccattcaaagcatctgcaattgccgattttgtatctgcaaacaagcttccgttggtcaacaccctcacacaggaaactgctccttccatttttgacaatccaatcaagaagcagattttactatttgttgttgcaaacgaatcgtcgaaatttctgcccatctttaaggaagcatcaaaatcattcaaggggaagcttttgtttgtctttgtggagcgtgacaatgaggaagtaggtgaaccagttgccaactactttggtattactggacaagagaccacagttcttgcttacactgggaatgaagatgctaggaattttttccttgatggtgaaatatcggtagagaatattaagagatttgctgaggatttcttagaggaaaagctcacaccgttctacaagtctgaacctgtacctgaatctaatgaaggagatgtcaaaattgttgttggaaaaaacctagatcagattgttttggatgaatcaaaagatgcccttttggagatatatgcaccatggtgtgggcattgtcaggaactggagcctacctacaacaagctaggaaagcatctccgtggcattgactcccttgtaatagctaaaatggatggcactgccaatgagcatccacgtgcaaagcctgatggattcccaacgatcctcttttatccagcaggaaagaaaagttttgagcctattacttttgagggggaccgtacggtggtggagatgtacaagtttatcaagaagcacgctagcatccctttcaaactgaagcggccggattcgtcagcaacgaaaacagagaaggatcagagcacagcttcaactaatttgaggggggagaggagttccggtacaaatttcaaggatgagttgtagtcttgtagagcggcattggtgcaacctttgaacaaggcaacgacgctctctagaaaaggctgtttctttttatgtatgcgagggcctgaggggcagcagaaaggaatccaaagttggtttctactttctatagagagtattccggtaaggagttagcttggacgatgtgcatgttgagatgaacgaattgaatcgaatcgaatggaataaaagcaaacgaaacggcttcg

SEQ ID NO: 21224 - DNA, 1186 bp, Oryza sativa
  ref <308>: DATABASE ACCESSION NUMBER: AK071515
  ref <309>: DATABASE ENTRY DATE: 2001-12-06
gtcatcgactcgacgacgacgacgcattccgaattattcaagaaattcaagaagtgaacagaggaggaaaggaaacatggcttcgtttgcatccacggcggcgccttggggatgcgtcgccggagctcggcgtggcggcggcggcggcgggcggtgtggggtgcgcgcgtccgcggcgctggcggtggcggcgccggcggcgaggacgcactacgaggtgctcggggtcggggcgggcgcgagcaggggggagatcaaggcggcgtaccggcgtctggcgagggaggtgcacccggacgccggcgccacgggggacgaggacttcatacggctccacgccgcgtacgccacgctcgccgaccccgacgagcgcgcgcggtacgaccgcgccatggccggcccggcggcgtcggcgttccggcgggcgcccgcgtcgtcgttccggcggcggacgtgggagacggaccagtgctggtagggcagaagcacaactccggtgctccctgccctactgcgccgcgctctccgccgccggagctccgtcgggcacggcggtttgccggcgagtgacgtgggattctgtcggccgtcggatccatcatagaaggcccagatcgaagaggaaaagaggaagcggagcgagatatttgcaggggagccctccatttaccatctattgtcaacaaggtcctcccgcgaccatctcggccgttcgatcgacttgtgcggcgcagattgagccaaaaagagaggcgcagtgcggatgttttcctatgggaccctcaagtattcggtattatcaagcatacccccatcccgccgccggcggcggcggcggcggagcaaagtgttgccgcgccggcgagtactgcggtgatcgccggcgtttcgtggggataacaccgctaatgcatggttcttctcctgcaatcctgtgtatatgctgtaacacgaagagaggcaattttagagaactcttttgtgtgctgattagcttgtttatataataggttttagctctgtctctctcaactgtaaatgatcaagaaactattgtttcttctctttccttttcaaatcatcatcgttgagtactaatttgaagaacactcgaatgtgtatctttggtgattcaagttttttaatttttgcagttacctgaataagcatttctagtttttgcatc

SEQ ID NO: 21225 - DNA, 1766 bp, Oryza sativa
  ref <308>: DATABASE ACCESSION NUMBER: AK071516
  ref <309>: DATABASE ENTRY DATE: 2001-12-06
gtgggccacccccgtgcagaatcacacacgccggactctccccttctctctgtctcgctccttcgttcgctcgctttatcccccccgaataaaggcgagaagccgcagcggcggacgaagaagagggcagatagaaatggcggcggagacgttcctcttcacctccgagtccgtgaacgagggtcacccggacaagctgtgcgaccaggtgtcggacgcggtgctcgacgcgtgcctcgcccaggaccccgacagcaaggtggcgtgcgagacgtgcaccaagaccaacatggtgatggtgttcggcgagatcaccaccaaggccaccgtcgactacgagaagatcgtccgcgacacctgccgcggcatcggcttcgtgtccgacgacgtcggcctcgacgccgaccgctgcaaggtgctcgtcaacatcgaggagcagtcgcccgacatcgcgcagggggtgcacggccacttcaccaagcgccccgaggagatcggcgccggcgaccagggccacatgttcggctacgccaccgacgagacccccgagctgatgcccctcagccacgtcctcgccaccaagctcggcgcccgcctcaccgaggtccgcaagaacggcacctgcgcctggctcaggcccgacggcaagacccaggtcaccgttgagtacctcaacgacgccggcgccatggtccccgtccgcgtccacaccgtcctcatctccacccagcacgacgagaccgtcaccaacgacgagatcgccgccgacctcaaggagcacgtcatcaagccggtcatccccgacaagtacctcgacgagaagaccgtcttccacctcaacccctcgggccgcttcgtcatcggcgggccccacggcgacgccggcctcaccggccgcaagatcatcatcgacacctacggcggatggggcgcgcacggcggcggcgccttctccggcaaggacccgaccaaggtcgaccggagcggcgcctacatcgccaggcaggccgccaagagcatcgtcgccagcggcctcgcccgccgctgcatcgtgcaggtgtcgtacgccatcggcgtccccgagtcgctctccgtgttcgtcgactcctacggcaccggcaagatccccgacaaggagatcctcaagatcgtcaaggagaacttcgatttcaggcccgggatgatgaccatcaacctcgacctcaagaggggcggcaaccggttcatcaagaccgcggcgtacggccatttcggccgcgaggatcccgacttcacatgggaggttgtcaagccgctcaagtatgagaaggcatcttcctgaggaagaagataaagatgatgaccatgagaggggggtctctctctcgctatctacctccattgccggccgttgtcggcgccgccgccgcctacctgatgtgtctttgatcagtagtgactggttgctccatggaagaagaagaagatgggaagatgatgaaagggttgaaatcgacttgcgaagttgctagtgatatcggtgtagcagccagagttttagtgttcagatatcttcggcgttttatccttttttcatttttttgagtcagctgaaactgcaagagagctctgcagtttgctctatcagtttgtcttgttctttttttttttcaggttgttgtgtaaccgcatctgtaatactgtctctttcaatatgaaggaaccatatgtgatactggcaccataattcatccatcctcctggtcctggagtatacaattttcttc

SEQ ID NO: 21226 - DNA, 1977 bp, Oryza sativa
  ref <308>: DATABASE ACCESSION NUMBER: AK071517
  ref <309>: DATABASE ENTRY DATE: 2001-12-06
gagagtccacagcaggcgccgcgcgcgctatcgatctccgccgcctgaccgccgtaccaccgtctcccggcagctagcgtcgaccggcgtcatgtcgtcacggcgaagcatgggagccctggccgctgtctgcgtctgcatgttcgtcttcgtctcctccgcacgggcagaagatccgtatagatttttcgattgggaggttactactgggaacatcaatcctctcggcgtccagcagcagggtattctgatcaatgggcaatttccggggccggagattgactgccagacgaatgataacttgatcgtcaacgtgcacaaccgtttgtcggagccgtttcttctgtcatggaacgggcttcagcacaggaagaactcgtggcaggacggcgtgtccggcacgaactgcccgatcccgccgggccagaacttcacctaccaaatgcaggccaaggaccagatcggcagcttcttctacttcccgtcgctcgccttccacaaggccgccggcggctttggcgccatccgcatccgcagccgcccgctgatccccgtccccttcgatccgccggccggcgagtacaccatgctgatcggcgactggtacaagaccagccacaaggctctgcaagccatgctggacagtggaaagcagctgccttcccctgatggcatcctgattaacggcaaaggtccaaatggcgcaagcttcaccgttgagcaagggaagacgtacagattgcgcgtctccaacgtcggcctgcagagcacgctcaatttgaggatccaagaccacaacatgacgctggtcgaggtggagggcacgcacacggtgcagaacacctacagctccctctacgtccacgccggccagtcgctgtccgtgctgttcacggccaaccgcccgcccggcgtctaccaaatcaccgtctccacccgcttcgccaagcgtgcactcaactcgtccgccgtcctgcgctacgccggctcgagcgccaccatctcctcaccgccgccaccggctggcctcgccgacgacatcgacttctcgctcgaccaggctcgctccatcaggacgaacctgacggcgagcgggccacggccgaacccgcagggctcgtaccactacggctcgatcaacgtgacacgcacaatccggctcgccaactcggcggggcgcgtcgccggcaagcagcggtacgccgtgaacggcgtgtcgttcgtggaggccgacacgccgctcaagctggccgactactacaggatcagcgacgtgttccggctcggcggcatcccggacgcgccgcccgcgggcgccgcggcggctccgcggagcgaggcggccgtgatggactccgactaccggtcattcctcgagatcgtgttcgagaacagcgaggacagcgtccagatctggcacctcgacggctacagcttgttcgtagttgggatggacaggggagtgtggagcgagcagagcaggaagagctacaacctcgtcgacgcagtctcccggtgcacggttcaggtgtacccgagggcgtggacggcggtgttggtggcgctggacaatgtggggatgtggaacctcaggtcggaggactgggcgcgcaggtatcagggccagcagttctacctccgcgtgtacacgccgtcgcactcgttccgcgacgagctccccatcccgagcaacgcgctccgctgcggccgcgccaccaacgcgagcggcagaagccgaaccctgtcgcggtactagttgacaaaccggctggtgcttgtcaacgaccctaacacaacaccaggagttactcggccatgacaagttttggccaggtatatataccgtatacgcaaatgcatcaaagttttactcggccatatcacaagtttggctggttgggtttatttagcgtgagttcagtttgtaaggcgtaaatgaactccatataaacaaggggtgggaccaaagtgtagcct

SEQ ID NO: 21227 - DNA, 1724 bp, Oryza sativa
  ref <308>: DATABASE ACCESSION NUMBER: AK071518
  ref <309>: DATABASE ENTRY DATE: 2001-12-06
gatagtacctgtgggatcgaaaggcactgacgaactcgatcaagaaggagtagtcctatcatataattgctgattcagtgattcgattccgtcgagactcgagagggaggcgaagcatggggcgtcgtcgtcttctgttgagcgatctactgctgctgctgctcatcgccatcgcggtggcaggggcagcggcggcgatcgcgatcccaagagcggcgccggcgttcggagttgaaactgggtggccgccggagcactgcttgcgctgcttcgctccaccggatgcccccttcgtcctgggcgccgccgcggccatccatctcggcaacaccaactcctgcatcgccggctacgacgacgacgacgctcccctgggggccaagcgtagctactaccagttctgcatcccctcctgggtagccctcgcacacgacaatggcaccgtcatctccggcgaggccgctatgaaccgcgccgccctcagcccctccacagctgtctccgccttcatgcgcctcctacacagaagggtggaggacgatgtggtgaagagagagatagagcttgtgccgtacaagtttaccaagatgctgggatgggtctccgtccaactagacacagatgctgaattctctgtcgaccatctcgccggcatcctcatctcccacctcaagcacacggcggaggcgcacctgggccgccacatcaacaatgctgtcatcaccctacccagtcgactcagctactccgccgatggcaggcaggtcctcagctcggcggcgaaggagtacagcggcttcagggccgtcaaggtcgtcgacgagcacatcgcggcggccgcggcgtatgggcaccacaccaagcagggtgaccgcaaggccatccttgtcttccatctcggcggccgcacctcccacgcaaccatcttcaagttcgtcgacggcacggctcgcctcatcgcgacgcgagctcatcatttcctcggaggtgacgatttcacggcgaggatcgtggaccacatggtggagcacatcaaggagcagcatggcagggacgtacggcaggaggagaaggcaatggtgaggctaagggtggcgtgcgagcacgccaagaaggcactgagcgagcaacaagagaccctggtgcagatggactcgcttctggacgacggcgcggtcttctccgcgacgctgacgcgggccaagttcgaggagctcaaccacgacctgttggacagagccatggcgctggtgaaggaggtggtggtgacgacgggaggagtggaggtggtggacgaggttcttgtcgtcggcggcagcgcgaggattcccaaggttcgtcagctcgtcaaggactacttcaatggcaacggcaatggcacgcacccaaacagtcgcggttgcaaggggccggtggatgtggaaccagaggatgccgtgcttcatggcgccgcgcttctttcccgtcctctacctgttgcagagggaacagcagcagctcggtccatcggttccgtcggaggcatctgatctctctcgtgtagcttatgctttggctacgacgatgaaccaaggtgggtgcgcttcaggttggagcttacagtgagtgtgggtcattcttgccttctggagtcgttttactagttgtaacatgtagcactaaccactaaataattgttcatttccctgtgaaattctgaatgagacacctccttttgtcaagtc

SEQ ID NO: 21228 - DNA, 909 bp, Oryza sativa
  ref <308>: DATABASE ACCESSION NUMBER: AK071519
  ref <309>: DATABASE ENTRY DATE: 2001-12-06
ggtcgccattaccacactcgagcagagcaaatacagttcaggaatcaggagcaagcagaaacacacacacaaatccgaagatgtgcgggatcaagcaggagatgagcggcgagtcgtcggggtcgccgtgcagctcggcgtcggcggagcggcagcaccagacggtgtggacggcgccgccgaagaggccggcggggcggaccaagttcagggagacgaggcacccggtgttccgcggcgtgcggcggaggggcaatgccgggaggtgggtgtgcgaggtgcgggtgcccgggcggcgcggctgcaggctctggctcggcacgttcgacaccgccgagggcgcggcgcgcgcgcacgacgccgccatgctcgccatcaacgccggcggcggcggcggcgggggagcatgctgcctcaacttcgccgactccgcgtggctcctcgccgtgccgcgctcctaccgcaccctcgccaacgtccgccacgccgtcgccgaggccgtcgaggacttcttccggcgccgcctcgccgacgacgcgctgtccgccacgtcgtcgtcctcgacgacgccgtccaccccacgcaccgacgacgacgaggagtccgccgccaccgacggcgacgagtcctcctccccggccagcgacctggcgttcgaactggacgtcctgagtgacatgggctgggacctgtactacgcgagcttggcgcaggggatgctcatggagccaccatcggcggcgctcggcgacgacggtgacgccatcctcgccgacgtcccactctggagctactagagctcaatcaactgtacaattttgcctcttttttctctcttttctggcttccgatgccaaaattttggtactgtacggacactactttcggtaatgtgatggaacaagttgc

SEQ ID NO: 21229 - DNA, 1966 bp, Oryza sativa
  ref <308>: DATABASE ACCESSION NUMBER: AK071520
  ref <309>: DATABASE ENTRY DATE: 2001-12-06
gtggagaaaaaaaaagtaaataaaacgaacaggacgcgaagacgaaaacccccctcgcctctcgtctcttttcgtgctcctccgaatccggtgggtcccacctccctcaccacgcgtccccggccgatcacttcgcctcctcctcctccgctctattaaaccctccttcggccaccgcgcctcctcccctctccaccactcgcgcccccatcaccacccactccactccctcctcccccgagcccgagtgcctcaccgccactagctagcagcagcggcggcggcggcggagaagaggaggagatatggcggcggtggcggggacgggggtgttcgcggagatcctggagggggaggtgtacaggtactacgccgacggggagtggcgcgtctcggcctccggcaagtccgtcgccatcgtcaaccccaccacccgcctcacccagtacagggtgcaagcatgcacccaggaggaggtgaacaaggtgatggagacggcgaaggtggcgcagaaggcgtgggcgcgcacgccgctgtggaagcgcgcggagctcctgcacaaggcggccgccatcctaaaggagcacaagaccccgattgcagagtgcctcgtcaaggagatcgccaagcctgccaaggacgcgatctctgaagtggtgaggtcaggggatttggtgtcgtacacagctgaggagggtgttcggatactgggggaaggcaagctgctggtgtctgatagcttcccgggcaatgaacggaacaagtactgtttgagctccaaggtacctcttggagtagttttggcaatcccaccatttaactatcctgtcaacctagcagtctccaagattggcccagcactaattgctggcaatgctcttgttctgaagcctccaactcagggagcggtggctgcactacatatggtgcactgcttccaccttgctggtttccccaaaggcttgatcaattgtgtcaccgggaaaggttctgaaattggtgattttcttacgatgcatcctggagtcaactgcataagttttacgggaggtgatactggtatagccatttcaaagaaggctggaatggtcccgcttcagatggaacttggaggaaaagatgcttgtgttgtgttagaggatgcagatctggatttagtggcagcaaatatagtaaaaggaggcttctcttacagtggccagaggtgcactgctgtgaaagtggtgctgatcatggaatccgttgctgatatcgtggtagagaaggtgaaggccaagttggcaaaactgacagttgggccacctgaggctgactctgatatcaccccagttgtaacagaatcctcagcaaattttattgagggtttggtcatggatgccaaggagaaaggagcaaccttttgtcaggagtacaggagagaaggcaaccttatctggccgttgctactggatcacgtccggcctgacatgaggattgcttgggaggagccatttggccctgtcttgcctgtgattaggatcaactcggtcgaggaaggcatccaccattgcaatgccagcaattttgggctgcagggatgtgtattcactaaagatatcaacaaagcgatcatgatcagcgatgcgatggagaccggaaccgttcagatcaactctgcaccggctcgaggacctgaccatttccccttccagggcttgaaggacagtgggattggatcccaggggataactaacagcataaacatgatgaccaaggtgaagagcactgtcataaacctaccatctccatcctacaccatgggctgaggtgttccatatagatgatcagatttctataaccacatgagtacaatgtagagaattcaaatgttttgtaaccacgtgagctttgtacgctatttgcaccacagttctccctgtatgttgttggctcttttacaattaagaataatgcatgttgaagtatg

SEQ ID NO: 21230 - DNA, 452 bp, Oryza sativa
  ref <308>: DATABASE ACCESSION NUMBER: AK071521
  ref <309>: DATABASE ENTRY DATE: 2001-12-06
gatcaacaacacagctgcttaagagcttctgagccttatcccagggtcaggacagaacagagcagagaagcatcagaagaatggcttctctgaaggccgtgaaacctgccggacttgccaaggagccggctgccaagctcagtgagacggcgacgaagcccgcggccgccaagggcggcgtcaagaaggctgagcagaagccccgggagcccaagaagaaggtgaagagcagcaagccggcggcagccaaaaactgatagtggcaacaggagagatggagatagtacgagggtctccatcttacgctatgctatgggattatgaatcccgtctgtcccttcctctcgtcaccccgtgatgtcttgatcatgtagcagcaaccttagtcaagctggtcttgacggtgtgtgcagcccatgtgatgaatattacaaataagatggtacagttgg

SEQ ID NO: 21231 - DNA, 1531 bp, Oryza sativa
  ref <308>: DATABASE ACCESSION NUMBER: AK071522
  ref <309>: DATABASE ENTRY DATE: 2001-12-06
gggtcagcttcgaacccaggcaagtagaagaacccccaaattcccccttgtcggcctatccccacccaaaaccctcgcgtccacccgcccccgccgccgacgacctcgccagaggagctcatggacgacgccatcgccgcgctcccgccggagctcgtctccgagatcctcctccgcctccggccggacgagcccgagcacctcttccgcgcgtcactcgtctgcaaggcatggctccgcgccatctgcgaccccgtcttcctccgccgctaccgcgccttccacggatccccgccgctgctcggcctcctccacaggctccgggtcatagacggggaccccgccccgcgcctcgcccgcaccacggcggcgcccctctcccccgacccggccttcctccgggccctcgactgccgccatggccgcgtcctcctccacgcgtcgaacctcggcctcatcgtctgggaccccgtcacgggcgagcagcaccgcctgccggaatctggcatcccgtggctgatctacaccgccgcagtgttctgcgccgtcggcggctgtgaccacctcgactgccacggcggccccttccgagtggtcttcgtggccaccgacgacgacgacgaactcgtcaaggggagtgtgtattcatcggagaccggtgtgtggagcacgccagcaactcttgatgatggctatcaatcctgggaagagcgttggcaggcggcccgcagtagaggcgaatactaccgcacaccttatgtccatcctaagcgatgtgcccttgtcggagatgaaatctacttcacacttcggaacggcaatacgatcatcgagtacaactggggaaagaaccgcttatttatgtttgacccgccgacatcggacttgtactacattgccctcacggtgatggagaatggttcactggggtttgccggcattgagggatccagccttaatgtgtggtcgaggaaggtgaatccacaaggggctgcagaatgggtactatgcaggatcatcgaactggagaaaattatacctgtagtcgatctcagtgatgaagcatgtgtggttggctctgcagagggtctgggtgtcatcttcgtgagcacaggcgttggcttattcacgatcgagctcaagtcaaggcgggtgaagaagcttgaagagcctggtgtctactttagtgtcttaccctacatgagcttctacactcctgatcgtggcacattgttatcgctagcaaggactcactgatctttgatctcatgctcaagagtaacatgttgcaaaatggacaaatccatcgtcttggatctgctgcgattgacatcttccagagatactactatgaagttgtttattttctgttgggcaatgtaggtatgagcaattcgagtcatcatgttcgaatatggtcatcgtatcaaattcatcaaccatgaactgtattcggtttaacatgtctggcatatttcagttactttttggtttatattgggctaaggtacatgaaacaaaaattatattc

SEQ ID NO: 21232 - DNA, 1808 bp, Oryza sativa
  ref <308>: DATABASE ACCESSION NUMBER: AK071523
  ref <309>: DATABASE ENTRY DATE: 2001-12-06
gactccgctgacccttttgttcctcgaacccaccctccccctcccggattcaaaccgtcgacgccgtcgccgcgtgactctcctccgcggcggcctgagcctgaccacccccaccctcactcgcctcgtcgccggaaaattgcattcgcgccgctcgccgctccccccccctcttggaggccccggagctagctgcttggggggatcctcctccgctcggcgggcggcgatctcgcggcggtcccgaggaggtggcgaggtcctggctgcgacgagatgccgtgatcccagcagtgatgcgcggatcggagcatgggtgtgagccctccagggtgtacctgtaggcggcgggcgaggagcgggagttgcggccatggcggtttacatcgctcgggaggctaccaagctatggaggaaggtgtgtgcggagatagcggtggagctgcagcttcttttcgagaagtggcgcttgctccttgccggattggtgtttcagtacattcatggactggctgctcgaggagtacattacttgcatcgacctgggccactgctccaggacttgggattcatggctcttccggaacttggacaggacaaaggatatgttagtgagagcgtgttcacattcatcttcatttccttcctgttgtggagttttcacccttttatttatcatagcaaacgtttctacactgttctactctggcgcagggtgctggcctttttagttgcttcacaatttttgcggattattactttctattccactcagctcccaggtccaaattatcactgtcgggagggctcaaaaatggccactcttccaccgccccataatgtacttgaagtgctcctgatcaactttcctcgtggagtgctttttggttgtggcgacctgattttttcatctcacatgatctttacacttgttttcgtgcgtacatatcataaatatggatccaaaaggttgattaagattcttgcttggctgatggctataattcagagtcttcttataattgcttctcgaaaacactacagcgtggatgttgttgttgcttggtatactgtcaatttggttgtattctttattgacaataagctaccagaaatgccagatcgcacaaatggatcatctttgctcccagttacagcgaaagataaagatggcagaacaaaggaagagctccataaactagagaaggattgcaagatgaaggaagagttccataaattgttaaatggaaacactgtcgattctactgatcggcggcaacgtgtgcagatgaacggaaaacatggcgaggacatcaaccacacactctcagatgccactcccaatggcacatgatcagctgcttttcatcaggcggcttgtctagttgtctttcacattgacaggggaatctgctaggagacaaagaatgcttggtttcctctgtatgatgactggcttctcaggtgcctctgcccctgcattttgtctgtccgccatggcaatatgttcacggatgaatgagacagagccaggtgccatagcaccagcattgctatggactgcaaaggaatcagagtctcaactctcaagtctcccagcgacttttctcaggctgccattacagttttgcacccttgtatcgaatctctagttctcttccctcaatttcttaggttatggaatgaacactttcaggttgatttgagaagcatagcttctcccgctgtatatatattgtcacattgatgaacttagcttaatcttggcatggatatactcatatatctatcgccgattggtcattttc

SEQ ID NO: 21233 - DNA, 1061 bp, Oryza sativa
  ref <308>: DATABASE ACCESSION NUMBER: AK071524
  ref <309>: DATABASE ENTRY DATE: 2001-12-06
gactcgcagcctctctccctctcctctcctctccgatcgatccttcccctctctctctctctctcaatccagataggaaggcggcgagcgagagcgacacgatgcaggcggtgagggaggaggaggagcaggtggtggaggaggtggtgagggcgggggcggtggcagaggaggaggaggggccggaggagaaggaggtggcgatggtcggggaggagatggcggaggcagagcacgacgaggaggaggcggaggccggggcgtcggcgaagaagaaccggatccaggtctccaccaacaagaagccactctacttctacgtcaacctcgccaagaggtacatgcagaactatgacgaagttgagctctctgcactgggaatggcaattggcacggtggtgactgttgctgagatcctcaagaacaatggcctggccactgaaaagaagatcctgacatcaaccattggcaccaaggatgaatcgaaggggcggcttgtccgtaaagccaagattgagattcttctttgtaaatcagaaaacttcaacagtataatgtccagcaagaaatcagaccgcccgaaatccgccgaggaagagatcaaggtctgatgatgaacaccaacttctgatcgatcagagcctccatgtccagaggttaacaaaccatgcttgagacagtgggaggcagcagcaatgatctgattttagtagtaactagggggtaccttagtccttgtcaaaggaggaatagatcataatattgtcaggcatgcatactatgcaggcaaaattatgtcctttcctcttccttgcagctctgtccaactgaaaccttcaaaagaaattaagcaaaatttgcaactgcgtcagtacggggagatgatgaaattagtggatgtagaaatagagtttatctcggtcagtccctaaggctgggactggaggagtcctataattaagctcttactttttcagtttgatgttcctttgctcatgtatgaagcttttggacagagacagacaggtcactgtcataatggaaggctgaggtttcatgtg

SEQ ID NO: 21234 - DNA, 1610 bp, Oryza sativa
  ref <308>: DATABASE ACCESSION NUMBER: AK071525
  ref <309>: DATABASE ENTRY DATE: 2001-12-06
ggtctcttctcccgactcctgagagaagaagaaccgctgcttctccacccgtcgcggagccccgtgtccatcctccggcgcggcggccgccccccagcgatccgcctcaggttgctaaaatggataagctcagtggttctgcacgtcttattatcgtttcagatcttgaccacacgatggttgatcatcacgatgaggagaacttatccttgcttagatttggcgccctgtgggagtccgtttactgtcaggattctctactagtattttcaactggaagatcccctactctttataaggaattgaggaaagagaagcctatgctaactccagacatcactatcatgtctgtggggactgagataacatatggtgaggcaatggttcctgatgatggttgggaggaatatctgaacaataagtgggacaggaatgtagttgtggaggagacagctaagttttctgagctgaagcttcagccagagacagaacagcgtccacataaggtcagcttttttgttgataaaaagagtgctcaggaagtgataaagtctctctccggtaatatggagaaatgcgggcttgatgttaaaataatctacagtggtggccaagaccttgacatattacctcagggcgctgggaagggtcaagcacttgcatatttgcttaagaagttaagctcctgtggaaaaccaccaaacaatactcttgtttgtggggactctggtaatgatgcagaattatttagcatccctggtgtacatggtgtcatggttagcaatgcccaagaggaattgcttcagtggtatgcagaaaatgcgaagggtaaccctaaaattattcatgcaactgagaggtgcgccgctggtattatcgaagctattggacacttcaaactaggacctagtgtttctccaagagatgtggggtttccttatgttaaggaggaccatatcaaacctacagatgctgttgtaaagttttacgttctctatgagaagtggcgcagggctgaggttccaaaatcagattcagttgtacagtacttcaaaaatatcactcatgcaaatggtgttatcattcaaccttctgggcttgaatgttctctccatgcctctgttgatgcattgagttcatgttatggtgagaaacaagggaaaaaataccgaacatgggtggacagactatttgtctcacagtctggttcagacagttggctggtcagatttgacttgtgggaggcagaaggtgatgcgcggttgtgctgtttgacaagtcttgcgctgaatgtaaagcctgaaacccctgctggcttcctgataacacatgtacacaaaacatggctcaaaggatactcttcagcggatgagcagtcctccaagctttaaaccctttttcacccctgtgcacacggaatgaatttacttgatgataaatgaaggacctgctcgtctgagaatctcattttcttatttaatgtaatataaatgatctgtctcgtgactcgtgcgatgataaagtgaacgatctcagaaggcaacttcaacaaatgttggatatgattttacagagagttcagaattagatttcatgacacaagtaccgct

SEQ ID NO: 21235 - DNA, 1794 bp, Oryza sativa
  ref <308>: DATABASE ACCESSION NUMBER: AK071526
  ref <309>: DATABASE ENTRY DATE: 2001-12-06
gactcgcctccgtcgcggtgagcgagcgagcgcgagcggcgatggaggagacgaggaggaggggtggtcgaatgtgagaggcgaatccacgtcttgccgctgagaaggcggcgggagggagcaacgtcgtgagacccaccacgcggtcgctgacgggtgggcccaaccacccggccgccgccactcccgcgcccttatcatctatctgcctcgtcttctccgccccctcaagctgttcgacggaatggcgcagtgggacgcgctcgtggacgccgcgctggcgaggctggcgtccaggagcctcctgcgcgccacgcgccccatcgccctcgcgccgccgcccgcgccgccggagaccttcccctgcccaggcccgtgggaccgcgcagccgtcgagatccggctcgaccgcgcaacgctccaccaatggctggctgaaggtggtgaggggagtggccaagaagagaaagtggacgagaaactgattcttttctccgggaatgattacatgggcctcagctcgcatcctgcaattcgccatgccgcagtgaaggcagctgaagagtacggcatgggccctagaggatctgcgttgatttgtggatatactacatatcacaaaatggtggaggaatcgttggcagagctgaagaaaaaggaggattgccttctttgtcccactggattttctgccaatatggctgtaatgacggctctgggaaacatcagctctctgttggctgctgggagaaaacctgcggaggacgaaagaatagcaattttctcagatgctctgaaccatgcttcgatcattgatgggattcgccttgttgagcgacagcaagaagtggtatcatttgtgtacaagcactgtgacatgtcccatcttgaacttttgctatccagttgctcaatggaaaagaaagttgttgtcacagatagcctgttcagcatggatggtgattttgctccattgcctgagcttgtcaagttgcgcagaaagtatgggtttttgttggtgatcgacgatgcacatggaacacttgtttgtggtgagaatggtggtggtgcacctgagctgtttgaatgtgagaatgagattgacataagtgttggcaccttaagcaaggctgctggctgccagggtggttttatagcatgcagtacccgatggaagaggctgattcaatcgcgaggtcgttccttcatattttcaactgctttaccagtgccagtagttgcttctgtgtatgctgccctctatgtatcaagggaggagagatggcggagatcagtgatctggaggcatgtgcagtattttgcctctttgacaaaactcaacataacaagtcccataatttccattgtagttggaagtgaaaaagcagcacttagagctggaagggatatgctaagatctggatttcatgtcacgccaatccgaccacccacagtaccgcccaactcatgcaggttgcgaataactctcagtgcttctcattcttcggatgacatcaaaaggctggtggatgcgctgacgccgtggctccctcacaaacatgatattcagatatatgctgtggcatcaaagctctaaacaatgattcatccgagtgttcagctcatcaagcttcaagaagtaacattagctgagatcccaccggatgatatgggagaaaaggggataagttagtgctggttgacgcgattaatactgggatatctttgtattacagcacaatcaatatgaatatgaaacataactgatgaaacagtactacatcttttgccctc

SEQ ID NO: 21236 - DNA, 1796 bp, Oryza sativa
  ref <308>: DATABASE ACCESSION NUMBER: AK071527
  ref <309>: DATABASE ENTRY DATE: 2001-12-06
ggcgacccacctccacccccccaaacccgaagaccttccctttccccttcctctctctctctctctctccctcttcccccgcaacccccacctcctcgtcgcgggggggcccgtctcggctgcggcggcggcggcggcggcggagtaggccacggtggtggtggtggtggtgagtggggggaccatcgccgctggtggtcggttcagtcgggcgggcgggcgggctcaccggtcgttgacgaggagtttggttgaggggggccctgcggcatcagcggcggcggcgggatgtacgtgccgcagccatctcgctccgatgcggccggccgcgacgccggcgaccagcctagggtttaccaggtttggcggggaagcaacgaattcttcttgcgagggaggtttatatttgggcctgatgtgagatccatatttctcactatgttcctcatcgttgcaccagtggtggccttctgcgtgtttgtcgccagacacctcattgatgactttcccggtgattggggtatctcggtgatggttgtggtggttgtcttcaccgtttatgatttgacgctgcttctccttacttctggtagagatcctggtattatacctcgtaacactcatcctcctgagcctgaaggctttgatgggagcaatgattctggagttcagactccacaacagttgcgtctgcctcggacaaaggatgtcattgtaaacggaatcagtgtgaggattaaatactgtgacacatgcatgctttaccggccacctcgatgctcacactgttcgatatgcaacaactgtgtggaacggtttgatcatcactgtccatgggttggccaatgcataggacttcgtaattatcggttcttctacatgtttgtattctcgaccacgttactctgcctctacgtatttgctttctgttgggtgtacataatcaagattagaaatgctgagagtttgtcagtttggaaggcaatgctaaagacaccagcctcaatcgttttgatcatctactgcttcctttgtgtatggtttgttggtggtctttctgtcttccattgctatttgatgagcaccaaccagacaacttatgagaacttcaggtatcgctacgatagacgggctaacccgtataacagaggcgttctgaacaactttctagagatattctgcagccgtattcctccttcaaagaacaatttccgggcaagggtcacagttgagcaagggctacagcaaacccgtgtagcatcaagaggttttatgagccccaacatgggcaaacctgttggggatcttgaaatgggtaggaagccggtgccttgggatgaaccgaggacagcagctgatatcagggacttggaagcaggtctcgggggctttttggatgagaaagagggtagactaacgcatgcatccccagatctgagcagggacgaccttccagctgatctcatgaaaggacgagctggcacacattcaaggcggtcaagttgggttaatagaactggaacttcagaatcagagtgaccctgtgcattgaactaccatgaagtacaatttgtttaccatgtgcgccagggtaaaggtcctggatcatctgtgtaattccaaacacgcttcctgttgctttgtctttggtagtgcatgatatcacacgaagcttccatgcgctgtatgtgtgtctggtgttttaagaaaagtagcccaagagcttccggtttggatggggtatctgtatatatatttgttggaacagacgtattttggttttctcttgatgcttc

SEQ ID NO: 21237 - DNA, 806 bp, Oryza sativa
  ref <308>: DATABASE ACCESSION NUMBER: AK071528
  ref <309>: DATABASE ENTRY DATE: 2001-12-06
gggcatccatctgccaacaaactcgctagctaccaggagaggaccattaacgatttaatacactgacacacacacacatatgtgcaagttcgatcgatacaagacaggaagagatcaccatgtctagctagctaaattaataagctagctagagctggttgcatggttgattagctacgacgtgcagttgattagagatggaagagatcgccggtggtggctcgccgccggcgatggaggaggaggagaggtatgtggaggtggcgtcgaggttctaccgcgtgaagcccggtgccggcggcggcggcggcggccgccgtctccacttcctcgagtcgtgcttcctctgcaagagcagcatcgccggcgaccgcgacatcttcatgtacagaggggatgcagcgttctgcagcgacgactgcaggcaggagcagatggacatggacgaggcgctgcaggcggtggcgcgccgccatcgcctccgttcgtcggcggcgccggcttccgccgaggcagcagcggcggcgccggcgaggtctccgatgatgcaccgccggccgaccatcgccaacttcgcggcacgcactccagtggccgccaccagctagtgttgtgtactcctatactaacatggtcgagagatgaatctgccgctgcgttcatgatcaactgcatgcatgcacgcatcgctcatcatcatcaaacgccaaagttaaattaaacagtgtggattggcatatatatatgtatgtagcctaggtagttgtagatccatggaatattacatagatccgtgtttttttgcc

SEQ ID NO: 21238 - DNA, 1438 bp, Oryza sativa
  ref <308>: DATABASE ACCESSION NUMBER: AK071529
  ref <309>: DATABASE ENTRY DATE: 2001-12-06
gatgtgagacccctttcccgccgcccccgccaggggcggatcgggttgcgcctgcggcctacatgtgtcggtgggttcttctggtccggtgattcctccagcctctctgttcgtgcttgccgtcgccgtcgccgacgcccaattcgggggcggtgcgggaggcctgcgatgttttggaaggacagcggcggacggagcagcggcggcggcggcgggctggagcagaacggcgtgggccccttcggccaagtgcgcgtcctcgtcgtcggcgattcaggtgttgggaaatcctctttggtgcatctcattttaaagggttctgctattgctcgacctgcccagacagtaggatgtgcggttggcgttaaacatattacttatggaagtgcaggcggttcttctaataacatcatcagcgacgttcaaaggaacttctttgttgagctttgggatgtttcaggacatgaacgctacagaacatgccgttcaattttctatacacaaattaatggtgtcatatttgtttatgacctctctcagaggaagaccaaaacaaatttgaataaatgggcagttgaagttgctgaaactggcaccttttctgctccactcggatctggtggaccaggtgggcttccagtgccttaccttgtaattgctaataaagtggatcttgttccgagagatggttctagagttagcagtggaagtcttgttgattttgctcgtcagtgggttgagaaacagggcctgcttcctagtagtgaagaacttccactcacagatagctttcctgggaactctggtctcctctcggctgccaaagaagcaagatatgacaaagaagccgtgatcaagtttttccgcatgttgattaggagaagatttttctcaaatgagcctgctgccccgagtccctggtctctcactccgagagaagatagcatccttcctgtagagactctcaaagacgaagtagatagctttcaaaggaaaagcggcgaggacttcatgtacaagggagtaaacccgctgcctgcacagaggaacctcgcatcgccaccagatctcagtccacagtaaccggtgttctctttagataactacagatatcacagatactcctcgccgtcgcttcctgatgtgagcagcagtagaacaagccgagaggatatcgatgtatagtacagattacacaggccaccacagtagtacgtcgaacgccgacgtgggagcatatgctgtgccttgacgttggattccataataccttgcttgcagcacagcgaaggtaccaaatactatttgtcgtcacccctaatcttttatctgatagcagcgagattattgttttatttggttttctttaaatatgtatattcatttaacagacatgagattgatgtgagtaaaatatgtcaaatatagattttttttc

SEQ ID NO: 21239 - DNA, 686 bp, Oryza sativa
  ref <308>: DATABASE ACCESSION NUMBER: AK099180
  ref <309>: DATABASE ENTRY DATE: 2002-08-28
gcgaggaagaagagaagagagaaggggaggaggaagaaatggctgccgtccaagcagcaatctccacctgctgctcttcgtcttgcctgtcccggccgccaccgccgttcgcgaggaggcggcgcttcaaggtcacggccatggctccccagaagaaggtgaacaggtacgacgagaagtggtcgaagcagtggttcggggcggggatattcgcggaggggagcgaggaggtggaggtggacgtgttcaagaagctggagaggcggaaggtgctgagcacggtggagaaggccgggctgctgtccagggcggaggagctcggcgtcacgctctcctcgctcgaggagctcggcctcctctccaaggccgaggacctcggcctcctcagcctcgtcgaggccgccgccgccgcctcccccgacgccctcgcctccgtctcgctcccgctcctcgtcgccgccatcgccgccgtcgtcctcgtccccgacgactccgccgccctcgtcgcgctccaggccgtcctcgccgccgtcctcctcgccgccgccgccggcctcttcgtcggctccgtcgtcctcgccggcctgcaggagtccgactgatcgtcgccgcagggtttgatgatcactaggacatgtacgtattaatcaccgtatttatacagtgcttagtgtgttactagtatc

SEQ ID NO: 21240 - DNA, 943 bp, Oryza sativa
  ref <308>: DATABASE ACCESSION NUMBER: AK071530
  ref <309>: DATABASE ENTRY DATE: 2001-12-06
tcccccttcttcccctcatcctttgatttgggtggttgccattcatctccatctctcgatccatttctccccccaaattcttctccaatcagctcgattccgtcctcttcgagcagatcagctcccgctgatcgaatcggtgtcgaattttggttgtggttgctgttcttgggttggatcttggtggtgagaaagatcgtgatttttgttgttgggatttgggaggaattgtttgcgctggagggaggagttgagctcgctggccatggtttgccgaggcgagcagagaagaaatctctgagctttatgaagatcgccactcacctgcgccgctcctgcttcctccactccttctcggttgtcttcctctactggttttatgtgatctcataattctgggggaatcatcttctccgcgtcaatccgccattgttactagtagtagtagagctctcttgttgttgttcttcttcttcgtgttcttcttcggttgattaaataatcgtagcagcagaagaagcagctgtttgtagacaaggtgtttgtggaaatgtcgtcgtcgtcgctgtcgccggcggggtcgtcggacggggactcggcgggggtggtggtggcggcggaccaccggagggagaagcggcggctgtcgaacagggagagtgagctctgagctaagctgtggttggcatcaagaagtcttcatcttttttcttctcttggctgctttgagaatttcaaggctttaatctgctgctgctctatggtcttcttctactactcttctgatgatgattttgtgtctgaataagtgatggtcttttgtctgtgtccatgtggtgttttgtaagggttaattatgttgtttgtgttatgtaatgttataaactatgtcattatatcaattcctcttgtgatcatcaatgtaaaattgcgttggaaattc

SEQ ID NO: 21241 - DNA, 913 bp, Oryza sativa
  ref <308>: DATABASE ACCESSION NUMBER: AK071531
  ref <309>: DATABASE ENTRY DATE: 2001-12-06
gggagagcaattctgcgagacgatgagggctcaacgaccatcgttggcagctgctggcaatccggtacttgctcttctgtttctatgggttcttagctggggacatgtaacggcggaaattgatatcgccaacatgacggcgctacagaaacatgtttcgttcttcgaccggaacaaggatggcattattactccgtcggagaccattgaaggggttgttgcaatcggttgtgacttcgcatttgctagagaccttgccgccagtgtgcatgctggtcttggtcctaaaacaagccccaaggatgcaccattacctcacttatcgatatacataaacaacatctatagaggaatgcacaggagtgacacaggtgcactagatgctaaaggaaggtttgttcctgcaaagtttgaggaaatattctcgaaacacgcaaaaaaatagaccagatgcattgacatccttggaggtcaaagagatgattctagcaaatcgagatccaaatgacccacaatcatggggtgcagctataaaggagtgggggctaatttatggtcttgcgagtgataagaacggatattttcacaaggatagtgtgagaggtatatacgatggtagtgtgttcgtcaagttggagaaagagagggaatcttcacaaagtacagtttgccggagcttatcatttcggagttctgtataaagtaattgggaaatgaagttataatcacaaatacattgtattgcatcataggtattgttcgtgtacatgcaaaatgccatatttggagaagcactggtatggtagtagagttatggttgcatgactttaatcgttatgattcaaatctcgatttatatgaacattatgtatacatgggtgcactcttaataagatttgagaaaactaatttt

SEQ ID NO: 21242 - DNA, 1157 bp, Oryza sativa
  ref <308>: DATABASE ACCESSION NUMBER: AK071532
  ref <309>: DATABASE ENTRY DATE: 2001-12-06
gagttaccctcaattcccatcctagcaagcatggccggctcctcctctcttgcatcgcctcactcactgctgctaccactcctccttcttttcctcctcgttgccgctgccataggcagctacgaccccaaggcgttctgctccaagacgacagacatagcatcgtgccttagggtgttcccgacactcccagacatcgtcaccaaggcgcaggacaacaaagagttgtacaaacggctggtccgctactgctctttcaagacctacgaggccacgtcgctcgcggaatccatgattgccaccaccaccgctgccgaccccaagatcagcgcccccttcttcccgcagtggaaaagggacgaggcgatgacgacaaaaacacctccaggcaagtgcctcctgagctgcaacaagaccatcggcgaagttgacgccatcctaacctgcggacacacctacatggaagacaggccccccatcatccaccagaacctcaccgtcttgttccatggcggccacccgccgtcactctgcaagagtggatgccttgacggctcgtcgtcagagggtgaggccctcctcgccaccaagttcaactatatatggagcttgttggatctcatgaaagctgtcctaccggaatatctttctgagactgggactgcgacgacgacggtaccatctccctacgtcgctgctgcggcggccccggcgccatgagcaactacaagcatgcagtcccttcgattcgatcgaccagaccacaacagtgcagtgctcttggaatccctatatacacgcatatactatgtatctaagaaataatcaagatttcacagagagcatttaagaatcatgtttcactaattgttgcagtatatagtagcccatttaatttcatccatcagttagtgttctaattcttacagtggaattggatgttcacccctcaagtacatacacatacttgcttccctatcactcaaatagttacaaaatgttctgaaaaataattaaagcatttatacagcaagcatatatcataaccaaacttatgttttttttttggcatgtaaagattgaatttagttttttaggcataattgtattcttgcctttaattacttgctgcaattgtgatttttcctttgcttttt

SEQ ID NO: 21243 - DNA, 1307 bp, Oryza sativa
  ref <308>: DATABASE ACCESSION NUMBER: AK071533
  ref <309>: DATABASE ENTRY DATE: 2001-12-06
gaccgtcaccttcgcggccgcgccggccgccgccgccgccagccggtacacaccaccgcagggttaggatgaggcgacaaggacaggggcagtacggtggaggagcagacataaactccatggtggctgctcagttgcatcactaccagacacaacaaagggttcagcaacaccctgataataactaccctggaagagatcctgggaaagctgctgaggagcagcagtatagcgccccaaaggtgaggcagagtcaatgggatcgaggtggtccaaatgccccgaatcagattccagcgtatgcatacaatgaaggtcaaagtgctcagggtgcacaaaccttttatgatggacagagatctgatttaaaggttggtctagaaaagcagcccaataaagaatcgagggatcggcctcgtaatgataggtttgaagcaaggcgcgaggattataatctccctcgtacatttgaaggtctagagcagaattttcatgaagacattgtgatcctatccaaggaactacatgatgcagaggatgctgaaaacgccaggcacagggagagattgaatgaaataaatgcacaataccaggagaaactgttggcacttcgagctcgccaagcaacctatagagaagaattcttacgcaaggggtctcaggcacgccagcagcaataccaacaggctagcatgagcagttatgcaaacaatgtaaggcccggggagactcacggctatactccaattgcagcaaaaccgccgccgcctccacctgctgctgctgctacagctggtggtacttatggagaagctcatcggggttatacttctgcccagtatgacaacttcagggagcgtccagactacccagagttccgtggtcgtggccgaggtgaaggtcatgttcttgagcaccgtggtcaattccctggtggtcgtgcttataattctggtggccgaagattctagagatggcttcttcaaacacagccaattggctcatctttcttgatctcagcttggtgcgaaatgcgaattgcattagatgcttggttgcagtctcgtttaaacctatatacatggaaaagctgtttacaatttaaactgctggtatgcaaccatcaaacaacaccagatgtcaccggcactgttgtgcttgttgtttccacctacaaccctgtaattctgcttctttgtaacttggtagagaaagatgagaataatttataccatactcccatggcttctctgttgttcatccatatcatgcaatgaggataatatcagggaggcaattctgcgagc

SEQ ID NO: 21244 - DNA, 1566 bp, Oryza sativa
  ref <308>: DATABASE ACCESSION NUMBER: AK071534
  ref <309>: DATABASE ENTRY DATE: 2001-12-06
gacccgtcgtcttcctcctcctcctccccggttcgccggcgacgccctcaccaccggtggccggtgggcggtggcgccaacccccatccatggaccctccacggaggcaacgccgcgtgtctaggagggctcggatggccccgccccctctgcacgtcgaactgcccttcatggatcggcaaatactagtctcacgcaattctcgcgggtatttcgccttgggatacagtcttcccggcgagccgttcccaagcttgcatgagctcttgggcgcaatctatgaccactatcacccccagagggagtcccgtgatccagccccgccgcccctgcttccacagtgtgaggagcatgttgaaggcaatactcagctttcattagaacaaacgcttgaagaaccagaagttgcaaccatggaggagtcgcctgaacctacaacattaggagatccatttactgctactacctcttccttaccatccgcaccacatggcactagcgaggtctcaccatcatcaaggctccgccatcacacttctcctgaatcaaccatttggacaagagaccctgctgactggccatggatatatcacattaggatggatcgtggaggatcttttcacacatatcctgctctagatggaccatttctgaacttatatgaagctgaggatgctatcaatcgtcatcttgagagcctgaagtgtccaatgttcaaggagcaagatggagtttctcctgtggagaggatgatacaaaaatcactttattggcctgatggtactagaaagaaatattccagatcacaagctagtcaaaacgttgataagagaagacgtcaaatggttcaagtgctattagacaagtataatgatgatcatgaccttgttgaggatcttgcttatgagcttcaagatgttgttcactatcaattgattgttgagggaattaagtggttcaatcacttcaatttcacagcaaagaccagtggagctgatattgacaatttattttttgctgaagtgatgtcttcgcaaggggaggaagattgggtagtgacttgttgctgcttgattaaatctgctgataatggtatctgctatggttgcaagaacgatcgaaatctggatatgaagcacccaaatgatagcgatacatatgtgggcggtcacaaggacatagttatgccatttgaaactgaaaattggactgaatctgaatctgatgatgatgaggatgaggaagaggaagtgaaggcgagtaggataagaaggatgattgagggtcttgatgattcagatgaaccagaagatatttttgatccagttttcgagccatgagttggaactgcatctttacatttctacactattaacctatcttaagtttatttaaacataaattttgagtttcaaattttagaatagagtaacggaatgtaaattctcatgtatgcgttgacatataaccttacacctcgtcgtccatttctgcctaccgtggctttggttcttaatggatggtcgtaatggtgtagtgttttatttgaaatgttttttttcttgg

SEQ ID NO: 21245 - DNA, 1821 bp, Oryza sativa
  ref <308>: DATABASE ACCESSION NUMBER: AK071535
  ref <309>: DATABASE ENTRY DATE: 2001-12-06
gtggaagaactgactcattggcctcaggttgcttgcatggggaccctaatgaggatgtctggactgagctcaatgatgtggttaaatctaatttgtctaaaagtgtcgcgtcgcttagtttgcgcaatggagacacggtcttatttgcatgcacaggtgtagctgtagaccgccaggggcgtcttacaaagttcctcacttctgcaagtttggtagagcttttggttagagctctcaatgatacaaacaaaaaccatggtgacttagagctcgaagtgtaccatgaaggcaatgaagtatgccagggttatttgactgattttgatttggatcacaatctggccatcgtcgaaatctggactgactttgatgttcatgttggacttctccaacatgcggtggaatttctgccccattgtaaggtaatagctatagggcgtgaaatcactggcaaactgatggccaggagggtgcagttaatggatgatttaagtgtatctgaagatagtgaagatcttgactgtaaaatcaaagaggcttgggaaggtgcaccacttttttcttttgatgggaactttgttggcatgaacctttttttggctatgggaagagcctttttcctgccatggggcactattcagaagcattgggcatccctgcaaaacaagacgggacttccagagtcaaacagtttgaaggtttataggtttggaacaagttccacagctgagaaatctaacagccatccagaagtaaacaacgatattctcgacccggagcagattcatatagactctatgggctatccaaagtttccaacacacatgtttgctgatgggatgattttggttaatactttcgaagagactttcggcgatctacgtggtgaaggtgtatggagtaaactcagtaaaaaatcttgttctaacatagaccgcagtgttgtcgcactagcttcattcagtggagagagaaggttttttgcatgcacaggcttttttgttgaatggaatggttctacagttattttgacatcagcaagcttggttagaagttctggcgatgagaacaagattgttgacaacttgagggtgatgctgttagtcatcattgtatcatttgcagattgaagtgttgcttccaaacaaacaacgcgtagaagggatgttacagcattgtaatcttcattacaatgttgctctagtcagtgtgggttaccgtgctcttcgcccagcacatggtcagcttgattggtggggcaagagtagtaaggtagtggctgtagggcgttgcttcaagtcaggtgcattgatggctgcaagtggaacggtaaccccctggacaggcacactcgattgcgacttcctcgaacgttcgtcatgtaaaatcacaaaggctgggattggaggccctgttgttactcttgatggggattgtattggtatgaacttctatgatacgagaataggaacccctttcctgtcgtgggaggtgattgttgatattgtagcatcctttgaggaaaaaaggtggccagtgcctatgccatattgatgccacccggactgtgtgtaggatgagtctgaagatgatgaagagttggggttttcatccacatttggctgcaagctgaagtacaattacataaatggagagaaaagcgtgttcttttagttgctgttagatgtagaagaaacctaacctgaacttgttgtcaatctcactatatcctaaagcctgaacttttatataggaaaaacaagtgaagccagaacttgttgtcaatctcactatatcctaaagcctgaacttttatgtagg

SEQ ID NO: 21246 - DNA, 651 bp, Oryza sativa
  ref <308>: DATABASE ACCESSION NUMBER: AK071536
  ref <309>: DATABASE ENTRY DATE: 2001-12-06
tgttcttcctttgctcttattcgtcggtgatgcgaaatgccttgttcaggtgggatcggggcatgggcggcggcgacgccggcgtcgtcggggaggtggaggaggaggggactggaggtggtgtgcgaggcggccaagaccggcaccgcgaccgggaggcgcccggactcggtcaagaagagggagcggcagaacgaccggcaccgcatccgcaaccatgcacgcaaggccgagatgcgcaccaggatgaagaaggtagtacataaaatgtggtgctgccctttctcgcattgcctatgatccagagctttccaatggttccatcccactgtaaaaaaaaatgatataggagtacttagttgcacattgcacgatacactgtgcagagagaatgggaaattaggcgtaattagctgcgtcagtgcgtcaatcagctcatgagcagagtttcttgttagtacgccttcttggaaatgtagatggatttatgtaatgtccactgtccactgtcaagctccaaaaatggagtgaatgtgattttaaaaggtgctgcttatttgaattatagtatcaaactagtaatgtacccatgctaacgctacggcgatactatgtgataatgtaaatcatacaaccaaaagatagtagatt

SEQ ID NO: 21247 - DNA, 1055 bp, Oryza sativa
  ref <308>: DATABASE ACCESSION NUMBER: AK071537
  ref <309>: DATABASE ENTRY DATE: 2001-12-06
gtctcggccaccaaacctccccgttgttgcaatcgatcaatgctgctatatataagggacatgctttccgtcgcgtctcgtcttctcatggttgcaactctccaagaatcatctcaagtgtaaacacgtacgcgctgccaaccttatttcccagattatctgatcagtgactccatcgcaatggcttcttgcggcgcttcctgcctgacaattgcggcgctgctgctagcggcgtgcgcctcctccgccgccgccaccagctacaccgtcggcgacgcgtccgggtggacgatcggcgttgattacaccagctgggccggctccaagtcgttcaaagtcggagacagcctcgtgttcaagtacgcgagcggagcgcacacggtggtggaggtgagcgcggcggggtacctggcgtgcgcggcggccaacgcgctcggctccgacagcagcggctcgaccaccgtcgccctcaagacgcccggcaagcactacttcatctgcaccatcgccggccactgcgccggcggcatgaagatggaggtggacgtctccggctcctcctcctcctccagcggcggcggcggaggtggaggtggcggtggctccaccccctcctcgccatcgtcgccaacaccgaccacgccgaatccgtcgaccccgacgccgaccacgccgtatccgtcaaccccgatgccaaccacgccgtatccttcgaccccaatgacgacgcccaccacgccgtacacgactccgacgtctccggcgtgctctggcggcgccggcgccacgccggtaaccccggtgacgccgggcaccgtcccgttcatgtcatacaatggcgccggcgggctcggaccggtggcgctggctaccatcggaatggtttgcttcgtcgtattcgtgcagcttggactgttgtagagtagtagccaggatggaggcagtgcaaagtgatcgtatatgtagtatttagatgtacgtacaaaggtcgcgtcgtgtactgcaatgctaaatgtaatgtgttcattgtattcattgttgtagctgtggagccg

SEQ ID NO: 21248 - DNA, 1384 bp, Oryza sativa
  ref <308>: DATABASE ACCESSION NUMBER: AK071538
  ref <309>: DATABASE ENTRY DATE: 2001-12-06
ggcaaagcgtaaaatgcattgacgccttccccgtcctcgatgctcccctcctccgccgcctcctcgccgccggcgccgccgccgtcgccatgggacgacgtctcctgggcggaatccacctcctcgactgttctccaacactacaactctctcccaaagaagggcaagccgcaggggcgggagtccaccgtcctcgccgccttcctcctctccactccgcagcaggacccccggaatctcactgttctctcgctggccaccggaaccaagtgtctcggcgccgctcgcctcaaccaccacggagacctcgtccacgacgcgcatgccgaggtcgtcgcacgccgcgcgctcctccgcctcatctacaccgagatcggccggagcggcgcttccgattggttggttgcttccggtggggtcatgcctgttccaccatctccctcagagttgctcagggaacagctggatagtgttaatggatgcgatgatgttgggtttgttcaaaggaagcctgggcgtggtgacactacattatcaatgagttgttttgacaaaataactcgctggagtgttgttggaattcaaggtgcattactgtctcacattcttgagcccttgtacctgtccaccattactattggacaatcacctactggtgcttctgatgggttttctgttgaaaataatatcaagaaagttctcgatgctcgactgtcctctctatccagcaaactgctgttgccttttaaattgaacaagccactattttatgaggcacctatccctccaaaagagtttcaacagacttctggagatttgcaacctttgacatgcgggtactcgatatgctggaacaaatccggttttcatgaagttgtcttaggaacaactgggagaaaacagggtacatcttcaaaggcagcatgctcaccatccactgagtcattgctctgcaagagaaggttgctagaagcctttgtgttgattgaacatccattagtcaaaaagttccatcgcgaggaaatgtcctaccgtcaaatcaaggatatggctcatgaataccagcagacacttgagcttctcaggaaggctccattttttagccggtggagtgctaagcctgcatccctcgattcattcacggtttcacggtgagattaacccccaaatggctctttgagttcccccagaatgatgttttcagtgctagttttagtgttgaggtgtgttaactctgaatttgttcagaaaatgtatgctcttcagccgatgcagctctgaactactgtacaagctgtcactgtaacaaacctacaaaacttttggcgttattaggttaagatatggataactcatgctgtcttgctcaaatttgtaagggggt

SEQ ID NO: 21249 - DNA, 1210 bp, Oryza sativa
  ref <308>: DATABASE ACCESSION NUMBER: AK071539
  ref <309>: DATABASE ENTRY DATE: 2001-12-06
gttggtatctatgtcttctcatcacacatggtttcttgtcctatattctacctttgtcaattttatttgaaggttcattttggtgccaccaaggacgcgctatctcgccatttcaacaagtttggtgcggtgctcaaagtagttattgttactaatgcagcaacagggcagccaacaggatctgcttacgtagaatttttacataaagaatcagctgaacgtgctctttcattgaatggaacatcattcatggcacgcatcctcaaggttgtcaggcgaagttctcatgaagctgcacatttttatggttggcctggtggtgggcgaacatcaatgtatgccaggcatggtagaatggcatacccaaggggtggcctccctggtagcaccttcagagggcgtgctccaatgatagctggtgctagaagtttacaatggaaacgggagccttcagttactgattcaaatacaggtgcaaccgtggcactgccttctgctgaacaggtgcttcctcctgccacataggggagatgaattatagtttatatgatgagaaccaaattggtgcctagcccatcatacagcatattagaatcagcataataagcttggaagatggtttatggaaaaaaatgctgctttgtaaaaaaggctaaaagcaggaaaatacaaaaaaagagaagaaaataagaaaagaggaaggagtttggagccagaatttgataaaccaccatgctgatacttggaggtggttgtattggagatcaatgaactgtcgtcacattgagcaaacagttttcttcagtcatctgaaaggacttgctgagatttgaaataacttccatggatgaggatcaattgtcaaatagagcatttgagggctagtttttggacatggcatttagtcggtagtctgggctcttcatcattgtaagctccgactgtacagcagtctatctatttgtactcttcttagaaccagtccctttcccaacaaaaaaaacagaaaaaaagaaaaggaaaaacatctctctttgtttcttttttgtttttttattgaacatagtactgttttatacttttattccttaatgtattgatataattttttagttagactttagtttctgtgttgaactttgcattacttagaacaatctgtcctatgcataaagaaattgatcaagctagttttattcaagcattcatt

SEQ ID NO: 21250 - DNA, 683 bp, Oryza sativa
  ref <308>: DATABASE ACCESSION NUMBER: AK071540
  ref <309>: DATABASE ENTRY DATE: 2001-12-06
gacaaggaggaaagcctcgagcatcatcatcagtaggaagaagaagaagaagaagaagaagaagagcaacaggaagaagcaagcaagaagaggaagaagaagaaagcaaggagaagaagatgcaggactggggtccggtgctgatatcttgggtgctgttcatcctgctgtcgccggggcttctgttccagataccaggcaagtgcaggttgatcgagttcggcaagttccagaccagcgtcgtctccatcctcgtccacaccatcctcttcttcgccctagacgccatcttcctcgtcgccatcggcgtccagatcaaccttggctcctctccctgattctctctctttgtttcttctagggcagcatcagtacagtagcagcagggtcccaaggaggaagaattttggtggcattttgcgtggcacaatggtaatggaaagcatgaagtagttgccccatcgccattcacagcgactgccctggacctggacctggaactggatggatgtcaaattaagttgagctacaaaacaaaagctacacattatgtgcacagtacaaccgactgaccatccatatatccatcctattctattcctgcaaccaagcttcaggatatatcacacatctatagagtgtagtatttcacaatctatattgaacaaatctccaagaatttt

SEQ ID NO: 21251 - DNA, 1811 bp, Oryza sativa
  ref <308>: DATABASE ACCESSION NUMBER: AK071541
  ref <309>: DATABASE ENTRY DATE: 2001-12-06
gactcccctctcctcccgcctcgccgccgcaaccaccgccgcctcgccgcagcatcacccgcagccgccgccgccgccgccatggactccgtcgcgtcgtgggggctgaccccgctcgccgcggccgacccgctcgtccacgacctcctcgagcgggagaagcggcggcagcggagcggcatcgagctcatcgcctcggagaacttcacctccttcgccgtcatggaggccctcggctccgcgctcaccaacaagtactccgaggggatgcccggggcgcgctactacggcgggaacgacgtcatcgacgagatcgagaacctgtgccgcgaccgcgccctcgccgcgttccgcctcgacgccgcgtcgtggggcgtcaacgtgcagccctactccggctcgccggccaacttcgccgcctacacggcgctcctcaacccgcacgaccgcatcatggggctcgacctcccctccggtggccacctcacccatggctactacaccgcgggcgggaagaagatctccgcgacgtcgatctacttcgagagcctcccctacaaggtgagcgccgccacggggtacatcgactacgagaagctggaggagaaggcgctcgacttccgccccaagctcatcatctgcggcggcagcgcgtacccgagggactgggactacgccaagctcagggccgtcgccgacaaggtcggggcgctgctcctctgcgacatggcgcacatcagcggcctcgtcgccgcgcaggaagctgcaaatccttttgagtactgtgatgtggttaccaccaccacgcacaagtccctccgaggaccaagagctggcatgatcttctacaggaagggccctaagcctcccaagaagggccagcctgagggtgctgtctatgactacgaggacaagatcaacttcgcagtgttcccgtcactgcaaggtggtcctcacaaccaccagattgcagcccttgctgttgctctgcagcaaaccatgacacctggattcaaggcctacgcaaagcaggtcaaggccaacgctgtcgccattggcaagtatcttatgagcaagggctacaaaatggtgactgatggaactgagaaccaccttgttctctgggatcttcgccctcttggcttgactggcaacaaggttgagaagatgtgtgacctttgcagcattacacttaacaagaatgctgtctttggtgacagcagtgcattggctcctggcggtgtccgcattggtactcctgcgatgacatccaggggtcttgtcgagaaggactttgagcagatcggcgagttcctccaccaggccgtgaccatctgcctcaacatccagaaggagcacggcaagctcctcaaggacttctccaagggcctggtgaacaacaaggacatcgagaacctcaagctggaggtcgagaagttcgccacctccttcgacatgcccggcttcaccctcgacagcatgaagtacaaggagtaggaaaacaaaacacacacaaaccatggtcctaccgccgctaatcgtcgaccagctgtgctctcgtggaccgccgtcgtcgtcatcttcttcctcggcacaagctggccctgtgttacggattttgtctgcccatcgagatgataggtttcataaaacgctctctcccccaccctgctgctgcctctggtttggttgccaacctcatcccccatcggtttttttcctcctcttgtttctaatttctaggagctgtgccttttggaatcatggaatgtcaagtatttgccaataatcaatccgtttgatttctgccg

SEQ ID NO: 21252 - DNA, 1850 bp, Oryza sativa
  ref <308>: DATABASE ACCESSION NUMBER: AK071542
  ref <309>: DATABASE ENTRY DATE: 2001-12-06
gatggtacaacaaccgagagctcgctagtcgtcgtcctcgaaacgctcgcggcgactccggtggctgccgcgccgccgcctccggccgccgtaccagcctcacctcgcttcgatggaggatggagtgtctacttatactgttgatgaggctcttatttccatggggtttgggaaatttcaagcatttgtgcttgcgtactccggaatggccaagatatctgaggcaatggaaatgatgcttttgtcatttgttggacagtcggttcaggctgaatgggagctttctgcgcaggcagaatctctcatcacaagtgttgtttttgtaggtatgcttgtaggagcatattcttggggcatagtctcagacaactatgggagaagggttgggttcaatttcacagcccttgtaactggtggggctggtcttcttagtgcatttgcaccaaattacctttctttgatcgtgctgaggtttatggttggtgttggactgggtggtggaccagttttatcttcctggtttttggaattcattcctgctcctaaccgaggaacttggatggttattttctcagcattttggaccattggcacaataatggaagcttcactagcttgggctgtagtgccaagtttgggctggaggtggctgctagcgttctcatcgttgccatcatttgctctactactgttctatccactgacactggaatcaccaagatacttatgcatgaagggcagaactgctgatgcggtgcaggttttggaaacaatggcacgattaaaccgtgtagctctcccttctggccatcttatgtctggccatcgaatggagctccatgagttgacagattcctcagagacgtcacagttgctttctgctaagaaaaccaaccctgctgctcattctagcaaaccgagattgggggccgcaatgcgattttaaagcttctgtccccaaatttaattagatctagtcttcttctttggactgtctttcttggtcatgccttcttatactacggtcttgttctactaacctcggaattgagtcatggaaataagatttgtggatcagaggggatagtaacaatgcaaacaaaccactcaaacgatgctaatctgtacagaaacgtgttcatcactagctttggagaggttcctggccttatactatctgcggcaatagtggacaagattgggcgcaaactctcaatgtcctctatgctttatatcagttgcctgtgcatagctccccttatggtccctcaaacagagtccctgacaactatcttcctgttcggtgcacgcatttgcatctccgcaagcttcattgtcttgcacatctatgctcctgagatatacccaaccgcagtcagggctaccggagtcgggtttgcgagctcaatcgctcgtttcggtgggatcttgtgccctcttgtggccgttggtttggtgcacgcgtgccatcagactgcagccatcctgatattcatcacggtgatgctcgtctcaggtgttgcagtctcatactttcccctggaaacaagcggccggaaattgagtgaccacatcgcggcgtaagagctaagttgcgagcagaatctgacagtgttgcaagtgctagtttctttagctatacaaagttacaggattgagctcctagaggccattcagattttttttttctttcagttcgtttaaagatcatatatatagaatagaaatgaaagatggtggatttcagattttaaatgtcattacattgttttaaccagacatatgtaaactgccaaatcgagatgcttgctttgctctcttgaaatgggatgatcaatatgttttgaagg

SEQ ID NO: 21253 - DNA, 1063 bp, Oryza sativa
  ref <308>: DATABASE ACCESSION NUMBER: AK071543
  ref <309>: DATABASE ENTRY DATE: 2001-12-06
gattccccttcctcatctccgcctcgcctccaccggccgtgatctcgccgccggcgccgccccgccgcccctgaggcctactagtagcgacctacaagtaccctgttttgtaccatcctaggagcgaatcctccccctgcggcagcggtagcagatcgcgatggccgcctcggcgcctcctccggcggcgacgaatccaccggcttcgaccgcgcccacggaggacggggaggtggaggagggtgccacgccaccgagaacttctgcgttggggacggcgaactggggtaccgccaccctcgtcggcgtcttcgccgggctgctctacggcgggagcaaggaggccagcgcctctgtcagcaaagacgctgaagtgatgttgaagatggggagcaccacagacaagcgtgagcagtatagattgatgagagatgcaatggagaaaagattcatccgggttgccaaaggatcgctagttggtggtgttcgccttgggatgtttactgcaactttctttggcatacagaaccttcttattgagaaacgtggggtgcatgatgtatttaatatagctggagctggctcggctactgcagctgcatttggacttatattgccaggttcaccaatgtggcgtgcaaggaatgtattggttggatcagctcttggtgctggagtctgctttccccttggttggatacagttgaagctggcagagaaagccaatcttgagatggcaagttcgaaaccaacagatttggtggaggaacaaggtaatcaaagcggcgttggtgccgctatagaacgacttgggcgcagcctaaagaagtaaaaatttggaccatcgaaggacctttttttttctcataatctgtgtgcgttcctgaagaccgcaggaggaacctgtttcatgggctgcactacttcaattttttcttctttcatgtgcctcacgctgtagtgctgtcaaactttgaagcagtaacagcaagggccacacggagcctccgttgtgggggaaaaaagagcatttttgataaaaatatcgtattcgttggatgtg

SEQ ID NO: 21254 - DNA, 1503 bp, Oryza sativa
  ref <308>: DATABASE ACCESSION NUMBER: AK099181
  ref <309>: DATABASE ENTRY DATE: 2002-08-28
gctcgatcggagcggagaaattccccaactctgctcaccctcaccgttgccgacgacttcgtgcggcggcgaagaggagaggcgatgggagggggagacgccagcggcggcgacgggccggagcaggagctgaagcgggctgctgcggcggcgtacaactacgagggcgacgcgcgctgggcggagtactggtccaacatcctcgtcccccctcacctcgcctcccgccccgacgtcgtcgaccactacaagcgcaagttctaccagcgatacatcgatcgtgatttggtggttgagccgatgtcatccactggttccacccagccaagcggaccagaagtaaggtcttcgtccttctcatccagtgagaatgtcagggcccgtagttcaggatcaagttccagatcagctgcaccaccgcccccaccgccacaaacagacagtgctacaaatcccttacggtttgatgcacggaccatacacttctccattaatgcctgggtacttgttgttgctggtctggggatgcttccaattttgccaaaacatcttgcagatagagcctgcaaactttcattgctgggaacaatactctcctctgcatactctctatacagcacttatgggaaaccaagagcatggaacatgcctgcagtccagggttggttgcaagctgtacttggaaccaaggattttatccatttgatgttctctcttatgctcttcacgtctcagttgcacttaaaaattgctgcactacctgtgttctgctgggcacttgatcatgttgctagattcctaaggcgtaattttgctcgctcatccttctataggagttacttggaggaaccctgtctttgggtagagacaaataacactacactcagtctcctcagttcaaatgctgagattgccttgggttttcttctgatcatatcacttttctcgtggcaacgtagcataattcagacattcatgtactggcaggtgttgaagcagatgtaccatgctcctgtaaccgctagctaccaccagagcgcgtgggcgaaaattggccggattgtcaacccgtacatccatcgctatgcaccattcctcaatacacccatttctgcagcccaaagatggtggttcaggtagcaaggctgaggacagaatcacgatatttgcagatctgatcatgcggagaacttatctacaatgtgttttgaagagctattacaaacttagcacgccgttgctctcgtcatgatggagctgtgcatcataaaaactcctgcaagtagttcccttttgtattggcttatactttgaggttaacattgatgcaagaacggtgttataaaccctggagggctttttcaccaccgtaatgctcgatcagtgatcacgacgatgttctatataattcctgccaaactcaggctgacctgtatacaatggattgctcttagattgcatcatctattcatgagtggctatgaaatactccatccgtttcgc

SEQ ID NO: 21255 - DNA, 1901 bp, Oryza sativa
  ref <308>: DATABASE ACCESSION NUMBER: AK071544
  ref <309>: DATABASE ENTRY DATE: 2001-12-06
gatctttcacaccaacaactaatccatccccccctccacctccacgcggtcagcgctcgctcacgcgacacgcaccaacccctctccccgccgccgccgccgccaccaaacgccgcctccgaagaagaagaagaagcctccctcgcaggcagcagggtatttaatacgccgccctgctcgtctcggttcctgggaacttctcttctcctccgatttggcctgtcagtgcgctccgctccgctcgcgcctatccgcggattatcatgggatcgacggcgctcggtggcggggctcctgctcgcctcggcttggcccccaaggatggagtctttggatctaatctgaagcaatgcggtggtttcatgctcaaaacaacccctaaggttggatcctcttcagtccgtgtgagggcatctgttgcttcttcaccgcagaaacagcactctcccaagacatcaggagttaaatcaggggaggaggtgcgcattgcggttctaggtgccagcggttatactggagctgagattgtcaggcttctagcaaaccatcctcaatttcgtatcaaagtgatgactgcagatagaaaagctggcgaacagtttggatctgtatttcctcacttaataacacaggacctgccaaatttagttgcagtaaaagatgcagatttttcaaatgtggatgcagttttttgttgcttgccacatggtacaacccaggaaattattaaaggtttaccgcaggaactgaagattgttgatctctctgcagattttcgattgcgtgatatcaatgagtacgctgagtggtatggccattctcatagggcaccagaacttcagcaagaagctgtgtatggcttgactgaagttcttcgcaatgaaataaggaatgcacggcttgttgcaaatccgggatgttatcccacatctattcaacttcctcttgttcctctaataaaggcaaaactgatcaaagtgagcaacattatcattgatgcaaaatctggggttagtggggcaggacgtggagctaaggaagccaatctctacaccgagatagctgaaggcattcatgcttatggaataaaaggccaccggcatgttcctgagattgaacaaggactttcagaggctgctgagtctaaagtcactatcagctttactccaaatctgatttgtatgaaacgtgggatgcaatctactatgttcgttgaaatggcacctggagtgactgccaatgatttgtatcagcatctcaagtctacatatgagggtgaagaatttgtgaaactgttaaatggtagcagcgttcctcacacacgccatgttgtgggatcaaattactgcttcatgaatgtctttgaggacagaattcctggacgtgccatcatcatatctgttatagataatcttgtgaagggagcatcaggtcaggctgttcagaaccttaatctgatgatgggtctgccagagaacactgggctgcaatatcaacccctatttccttgatcctctatgtctgtgttccgtatgttctttgtcgggatgatactttggagttcagctacccatttccctctgtttactgttgagacaaggtgctcaacatcagagtgtaaccaagacaaattttctcaaagagtagcttggtttgtgctgttgtagtttttatagagataaatgacaatttagtagtttaatgagaatattagctcggtggatttgggcattgaaatcctacgggtatatcctgtactgctttgtggttatgaaatcaaataaaagtgtaaacctcagtcaagaggcatcaatcaccccgccttcattggatgtagatagggatatatattcatatttttactcgatggaatttgttttgcttgctaatgctttatgacg

SEQ ID NO: 21256 - DNA, 865 bp, Oryza sativa
  ref <308>: DATABASE ACCESSION NUMBER: AK071545
  ref <309>: DATABASE ENTRY DATE: 2001-12-06
gtggtgtccggggtggcgttctggtggacggcgttcctgctggcgcgcggcgccttccccaagcgctcctacgacttctgcaaccgcgccgtctccgccgcccacgccgccgccgccgtctccctcgcctgcctctccgtcgccgactggtcccgccccctctcccccctcgccgccgcctcctcccctccccagatgaaggcgctggcggtgacgctgtcgtacatggtgtacgacgcggcgtgctgctacctcaacgacgacgtcagggtggacaacaccgtgcaccacctcgtcagcatcgtcggcatcgccgccggcctcgcctaccggaggtgcgggacggagatggtggccagcctgttcgtcacggagatctccagcccgctgctgcatctccgcgagattctcaaggagttcggcatcaaggacaccgacctcaacctcctcgtcgatattttattcgccgtgatattctcggtggcacgaatgggttttgggccatacctcacgtacgtcaccgttacggcagacaaccccatcctcattaaggcgatggcgacaggcttgcagctggtgagtgcctactggttcctgaggatcctaaggatggtcaggcacaagctggggaagaaaagaccagcgccgaaagttgccggcgattgatgcaaaatcttgtttgggatcgagccgtgcttgtaacatagtattgtttcatggcaagaaatcaagaatgtctcaaacaatggatatgatgatttgtactactctagtaatttaattagttttaccatataattgcccactgaattaattaggaacgatttcttttgtgggttcataaaacaagtgtttagagatttgg

SEQ ID NO: 21257 - DNA, 1750 bp, Oryza sativa
  ref <308>: DATABASE ACCESSION NUMBER: AK071546
  ref <309>: DATABASE ENTRY DATE: 2001-12-06
ggccaagcaaaactgccaagtaaacctactcaccaataatccatcctcgaatcctcgatttatcatggagataaactcggcagccaccctcaccctcgtctctctcctcaccctccccattcttctggcgttgctgacccgcaagtcgtcgtcaaagaagaggaggcctccagggccatggaacctccccttggtcggcggcctcctccacctcctccggtcgcatccgcaggtcgcgctccgcgagctcgccagcaagtacggcccggtgatgttcctccggatggggcagatcgacacggtcgtcgtctcatcgccggcggcggcgcaggaggtgctccgcgacaaggacgtcatgttcgcgtcgcggccgagcctcctcgtctcggagatcttctgctacgacaacctcgacgtcggcttcgcgccctacggcgcctactggcggatgctgcgcaagctctgcacggtggagctcctcagcaccaaggtggtgcggcagctcgcgccggtcaggaatgacgagacgctgaccctcgtcaggaacatcaaggccgcctcctccggccatggcggcggcggcggcaagaagccggtcaccctcgccaggctgctcacgacgtgcacgaacacgatcaccgccaaggcggcgttcgggcaggcgtgcggcgtcgagctccaggagcagttcttgacggctctggacgtcgggctcaagttcagcggcggattctgcttcggcgacctcttcccgtcgctgcggttcatcgacgccatgaccgggctgaggagccgcctgtggcgagcacgcgggcagctggactccgtcttcgacaagatcatcgctcagtgcgaggagcatcagggtgattcccttgtcaacgtccttctcaggatcagagatcagggcgacctcgaattccccttcggcacaacgaacatcaaggcaattatactggatatgttcacgggagggacagagacgacgtcgtcggccgcggagtgggtcatgtcggagctcatgaggaaccctgaggtaatggccaaggtacaggccgaggtgcggcgagtgttcgacaacaagagcccacaagaccatgagggcctgattgacaacctacgctacatgaagatggtgatcaaggagactatgaggttgaatccagtgttgccgctgctgatgccccatctctgccgggagacctgcgacattggtggttatgaggtcgtggaggggaccagggtggtgatcaattcgtgggcgatggcgaggagccccgagtactgggatgacgcggaggagtttaagccagagaggtttgaggatggcatggcagactacaaaggctcccgttttgagtacttgccgtttggaaccgggaggaggagatgccctggtgatacatttggtatggtcttgttggagctcatcgtggcacgccttctctactacttcgattggagcctccctgccggaatgcagccggatgatgttgacatggacttcgtcgtcaccgccacaactaggagaaagaaccatcttcagctagtggcgtcgccatataagttggctcctatccaaatctgatggatatacggctcctacccaaagctgatggatgtatcagtgtgtttgttcttttcttatcataggtgtatttgttattcgcgtgtttgtgtaccttgtaagggtgcacgtaatgtttgtccccggataatggacaaacaaataataattgtgaacaatatc

SEQ ID NO: 21258 - DNA, 1478 bp, Oryza sativa
  ref <308>: DATABASE ACCESSION NUMBER: AK071547
  ref <309>: DATABASE ENTRY DATE: 2001-12-06
gatttcggtgcttaaccaaactcaccataatatcagttcatccacaacaatgtcggcctactgcggcaagtacaaagatgagctcataaagaatgctgcctacattggcaccccgggcaagggtatcctcgctgcggacgagtccactggcaccatcggcaagcgcttcgccagcatcaatgttgagaacgtcgaggataaccgccgtgccttccgcgagctcctcttctgcacccctggcgccctccagtacatcagcggcgtgatcctcttcgacgagaccctctaccagaagaccaaggatggcaagcccttcgtcgatgtcctcaaggaggccggtgccctccccggcatcaaggtggacaagggcaccatcgaggtcgccggcaccgacaaggagaccaccacccagggccacgatgacctcggcaagcaatgcgccaagtactacgaggccggtgcccgcttcgccaagtggcgtgccgtcctcaagatcggacccaaccagccctcccagcttgccattgatctgaacgcccagggccttgcttgctacgccatcatctgccaggagaacgggctggtgccgatcgtcgagccggagatcctcgtcgatggccctcacgacatcgatcgatgcgcgtacgtctccgaggtggtcctcgccgcgtgctacaaggcgctgaacgagcaccatgtcctcctcgagggcaccctcctgaagcccaacatggtcaccccgggttccgacgccaagaaggtggcgccggaggtcatcgcggagtacaccgtccgcaccctccagaggaccgtccctcctgctgtgccggccatcgtcttcctctccggtggacagagcgaggaggaggcgacgctgaacctgaacgccatgaacaagctcagcgccaagaagccgtggtcgctgtccttctcctttggccgtgccctgcagcagagcacgctcaaggcctgggctggcaagacggagaacgtagagaaggccagggcggccttcctcgtcaggtgcaaggccaactccgaggctaccctgggtacttacaagggtgatgctgtcctcggcgagggcgctgctgaaagcctgcacgtcaaggactacaagtactgatctgcatcaggcgctggcctgctatggcttggctacctgatcgatttcccattctggggccgttacataatgcggttttgatatctagaggctctaacaggattcacaatttcggatcggaatttcagaatttttccctttccgatagatcgaaccctggagcacaatatatctgtggttatctaaaagccttgtcttaataatccagaacctttttttttcttgtaaaatatttgctgatgaacatcagctggcccggagtttttatttttatcaatcactttgtaactgtctgatttgcccggtgctgtgtgattttgttgaatgaaattaacttcacttctttgagttt

SEQ ID NO: 21259 - DNA, 1109 bp, Oryza sativa
  ref <308>: DATABASE ACCESSION NUMBER: AK071548
  ref <309>: DATABASE ENTRY DATE: 2001-12-06
cctcacttcgctctctcctctcctccgcatcgcgatcacctcctcctctcctctcctcgcctcgcctcgccggagatcgcctcacccacgcgccgcctccctcccatggacgcatcctaccgccgcgacggccgcggaggcggcggcggcgggggcggcggcggttccgcccctcgctccgtcgaggacatcttcaaggacttccgcgcccgccgcaccgccatcctccgcgccctcacccacgacgtcgaggatttctacgcgcagtgcgatccagagaaggagaatctgtgcctgtacgggtacgcgaacgaggcgtggcaggtggcgctgccggcggaggaggtgcccaccgagctgccggagccggcgctcgggatcaacttcgcccgcgacgggatgaaccgccgcgactggctcgcgctcgtcgccgtccactccgactcgtggctcgtctccgtcgccttctactacgccgcgcgcctcaaccgcaacgaccggaagcgtttgtttggcatgatgaatgatttgccaactgtttacgaagtcgtatctggttcaagacaatctaaggagagggacagatccggcatggacaacagcagcagaaataaaatttcatcgaagcataccagcgacgtggcgcgtgtcgaaaataatatcaaggaggaagatgaaggctacgacgaggacgatggcgaccacagtgagaccctatgcgggacttgcggtgggatatacagcgccgacgagttctggatcggctgcgacgtgtgcgagaggtggtaccacggcaagtgcgtcaagatcactccggcgaaggcggagagcataaagcagtacaagtgcccgagctgcagctccaagagacctagacagtagtagcatatgccaccctcctccggcgagaggaggtgtcgccggcgacgccgccattgacagaggcgtcaggctgtgggttactgtacctttcgtttttcgacttacatatgatgaagatgatgccaaatgtgaggtaagaagatcacaagacattcatgtgaggtggagatatgaggctatgtatgttgccagaggaataggggtaacgtaatatatgtaactttgcg

SEQ ID NO: 21260 - DNA, 1134 bp, Oryza sativa
  ref <308>: DATABASE ACCESSION NUMBER: AK071549
  ref <309>: DATABASE ENTRY DATE: 2001-12-06
ggccgcgccatctctctctcttgcgccttctccgactcggacgccgacccggagctccacccgcagcagcttctcgccaaggatttgaacactaaagatcttgaaaccaacatcattgttcttgttcatggaggaggttttggtgcttggtgttggtacaagactatagcacttcttgaggatagtgggttcagagtcaatgctattgacttaacaggttccgggattcattcgtatgatacaaacaagattagcagtctcacgcagtatgctgagccgcttacatcttaccttaaaagcctaggtgacaacgaaaaggtgattttggttggacatgattttggcggtgcttgtatatcctacgcaatggagatgtttccatcaaaagttgcgaaggctgttttcctttgtgcagcaatgctgaaaaatgggcatagtactcttgatatgtttcaacaacagatggatacaaatggtacactccaaagggcgcaggaatttgtatattccaatggcaaggagcagcctcccaccgctatcaatatagagaagtctttactgaaacatttgttgttcaaccaaagcccctctaaggatgtatctttggcttcagtgtccatgagacctatcccctttgctcctgtgctggagaagctggtcctaacagaagagaagtacggatcggtgcggcgattctacgtcgaaaccacagaagacaatgccattccacttcatcttcagcaaggtatgtgcgacatgaacccgcccgagaaggttcttcggttgaaaggctcggatcatgccccattcttctccaagccacaagctctgcacaagacccttgtagagatagcaaccatgccaccagtcaaggcatcatgagagctggggtttctcccttcaggtttcaaggctggtgactggctgattgccattgttgtgcagttgcttcttgtatgtaatatgttgagaatgggggtgtaatgcttgagccaagatgttatggcttggaggtcgtttatacaggatgtttgtcacagaggctcactgcgtagcagcagagtaggggagctctgattttctatacatggtgaatcacatcctcccagtgcagactgacctggagaaattgct

SEQ ID NO: 21261 - DNA, 654 bp, Oryza sativa
  ref <308>: DATABASE ACCESSION NUMBER: AK071550
  ref <309>: DATABASE ENTRY DATE: 2001-12-06
gagcacaggggggacgccgtgagcagcctggtgtacgaggcgaacgcgcgggtgagggacccgatctacggctgcgtcggcgccatctcgtcgctgcagcagcaggtggaggcgctgcaggcgcagctggcgctggcgcaggcggagatggtcaggctgaggatgagcaacgactacatcggccgccgcctccgggcgcgcggctgcggcggcggcggcggaggcggaggcgggagcaccaccaccaccaccggctcgccgtcgtccatgtcgtcgccggccaagacggcggagccggagccgctctgcaagcccacgccggagctggacatggtggtggaccagccggacttcggcttctggtcctactagggctttgatcaaggtagtactactagctgattgtagctgtgatgatgatcaggtgatgtttttggagttaagtgacagatggtatggtatggtatggtatagtagtagttcatagtagagtcaagcgagtaaagtatatggcaatgtgtgcgcagtagcagcgtgacactgggagggaggtgaacataggcagagaggcctcctcctaaaccttcttctactgggatatatcaggggctttttttttggctgtccttctatgagaaggtagaacactgttac

SEQ ID NO: 21262 - DNA, 1512 bp, Oryza sativa
  ref <308>: DATABASE ACCESSION NUMBER: AK071551
  ref <309>: DATABASE ENTRY DATE: 2001-12-06
gagtgtcttcctccgcggcggcggcctcctccgccgcgtggcggtcgaggaagccgtctccccgtcgccacctcctccaccgccggggaaaccgcctccccctcgctccgtggccgccgaggagagagcctctccctcgcctcctccgccgcggcgcaagaaggactccctcttccgccgggtcgcggccgccgcggacccgcgcctcccgctgtcccccgtcctggagcagtggtgcctcgccgaggaacgccatgtcgcgaagcccgaggtccagtccatcatcaagtacctctgccgccgccgccgcttctctcaggcgctccagctttccatgtggatgactgagcggctgcacctccatctatcccccggcgacgtcgcgaatcggctggagctgatcaccaaggtctatggcctcgatagggccgtggagtacttcgacagcatgccggatcagctgaagcaacagcagtgctatggctccctgcttaaatgctacgccgaggccaattgcgtggagaaggcggaggagctcttcgagaagatgcggggcatggggatggccagttcttacgcttacaatgtgatgatgaggctttatttgcagaatgggcaggttgagagggtgcactccatgcatcaggctatggaagagagtggtattgttcctgatgtatccactactcacactctggtggcagttctaagaaaaaaaaagactctggtggcagcgtacgtggttgctgaagatattaaggcgattgaaaatgttctcgagaaggccaattcgtgcaactcaatgtacatgtgcaggattggtgtcctacttaagatgaatgacatggttggggctgagaaagcatatgaagagtgggaaagtaagcatgtttaccatgattcccggttaatcaacttattggtggatgcttactgcaaagaaggtcttatggataaggcagaagctcttgtagatcaattcatcaagaaagggaggatgccttttgccaatacttgttataagttggctggtggatatttcaaggttggtcaggtgtcgaaggcagcagatctcacaaagaaggcacttgcttctgcgagtaatgaatggatacctgacctgacgaatgtgctgatgagcctgaactatttcgcggagcaaaagaatgtcgaagcagctgaggagatgatgagcttattacagagattggttactccaacaagggacatttaccatgggttactgaagacatatgtcaatgcaggaaaaccagtgtcagacttgcttcatcgtatgaaaaaagatggtatggaggctgatgaggagacagagaaaatccttgcgggagaagtccactaggtacacaggattgaataaaacatatcactgaccaattccttttctttgcttattttgctgtcctttttcttgtttctggggcaatgaagttcaaacccactagcccgtggatttgagtatttgataataaaccactatacaactgcttatat

SEQ ID NO: 21263 - DNA, 1803 bp, Oryza sativa
  ref <308>: DATABASE ACCESSION NUMBER: AK071552
  ref <309>: DATABASE ENTRY DATE: 2001-12-06
gtggaggatcccaaatacaccaatcgtgtcttggattttcccaaacacagcgcgcactctcgcccttcacctctcctccctctcacccttccattacatggatcagggagggaggaaggaggcctgaagtggcgcagagtaggcgcttgtaaacaaatccccccatttgcttcttttgcactgaagaatccctgaagaatccagcaggatggagaagaaggcgtccatcctcatgaaccggtatgagctcggccgcatgctcgggcaaggcaccttcgccaaggtgtaccatgcacggaaccttgcatccaaccagagcgtcgccatcaaggtcattgacaaggaaaaggtattgcgtgtcggcatgattgaccagatcaagcgagagatctccatcatgcgcctcgttcgccaccccaacatcgtccagctgcacgaggtcatggccagcaagagcaagatatactttgcaatggagtatgtccggggtggtgagctcttcagcagggtagccagggggcgactcaaggaggatgctgcgaggaagtacttccagcagttgataggggctgtggacttctgtcacagccgcggtgtctaccaccgagacctcaagccagagaacctcctcgtcgacgagaatggcaacctcaaagtgtcggactttgggctgagcgccttcaaggagtgtcagaagcaggacgggctgctccacacgacgtgtggcacacctgcatatgttgcaccagagataatcaataagaggggctatgatggagcaaaagcagacatatggtcttgcggtgtcatactctttgttctgcttgctggctacctcccattccatgactcaaatctaatggagatgtaccggaagataagcaaaggtgatgtcaagttcccacagtggttcactactgatgtccgaaggcttctgtccaggctgcttgatccaaatccaaacattaggatcaccgttgagaagctagttgagcatccatggttcaagaaggggtacaaaccagcagtgatgctatcacagccaaatgaatcaaacaacctcaaggatgtccatactgctttcagtgctgatcacaaggacaatgaaggcaaggcaaaagaaccagcaagctctttgaagccagtgagcttgaatgcatttgacatcatctccctctccaaaggatttgatctgccaggcctgtttgagaacgacaaagagcagaaggcagactcacggttcatgacacaaaaaccagcatcagcaatagtgtcaaagctagagcagattgctgagacagagagcttcaaggtgaagaagcaggatggactggtgaagctccagggatccaaagaagggaggaaagggcagctcgcgatcgatgcagagatctttgaagtgacaccatccttctttgttgttgaggtgaagaagtctgcaggggacacgttggagtacgaaaaattctgcaacaagggcctaagaccttctctcagggacatctgctgggatggtcagtcagagcatccatcactggcacagtcatcaactctgactcagtcctctaagtcaatctcgagacatgccatttaagtgcaacctcataagagatgcagtaacaatccattttcctctctccttttccctttcatcaaagtgctgagcctgagagtattctcacttgagcatcaggcttagggctctttgatgataatttttgccagttttccttgtatagtagcagtttgtctacatggatctcctgttctttcaccaatagaaacagggagattgacaacagc

SEQ ID NO: 21264 - DNA, 1526 bp, Oryza sativa
  ref <308>: DATABASE ACCESSION NUMBER: AK071553
  ref <309>: DATABASE ENTRY DATE: 2001-12-06
ggaagaggaacagaggagggaagtccaatcggaatccaccccggccccaaccggggtcgcctcccctcccctctcgatccttcttcatccagcttcgcggccggcgcggcggaggagagatcgatttcttgctcctactcgattcggcctccggcggcggatgggggtcgcggcggcggcgggccggctcctggcggcggtggactgggagcgggaggcctacccggcgtaccgcgacttcttcgcgctccccttgttcgccgtcttcttcctcgtcgtccgctacctcctcgactgcttcgtcttcgagtggattggaagaaaacttatatttggaaaggaaaaggttgattatgagaaggaggaaacaagaaagaagataagaaaatttaaggaatcagcttggaaatgtgtctatttcctatctggagagattttatctttgtcagttacatataatgagccttggttcacaaacactaaatatttctgggttggacctggtgaccaggtttggcctgaccaaaagataaaatggaaacttaaggctgtctatatgtatgctgctggattctacacatattccatatttgcacttatgttttgggaaacaaggcgttcagattttggcgtgtcaatgtcacatcatgttgcaactgttgcgctgatagttttatcttatgtgttcaggtttgctagagttggctcagtagtattggcaattcatgatgcaagtgatgtgttcctggaagtagggaaaatggccaaatatagccattgtgatttgcttgccaatgttgcatttcttcttttcgtcgtttcatgggttcttctccgtctcacatattttccgttctggattctcagaagtacaagctatgaagtcttgttgaccttggacaagaagaagcacaattttgatggtcctatatattactatgtgttcaattctctcctattttcactacttgttcttcacatatattggtgggttctgatatatcggatgcttgtgagacaaatcaagacaagaaatgttggagatgatgttcgatctgactctgaaggtgaagacgagcatgaagattgattgctgaaccatctggtttctatcttctcatgatgctaggaacgccaatatctcagcttatgatgaattcttttcctggatgagggaacatgtgcagattgtttggatatgagtattattgttcatgcgaattcgctacagagccgagcaatcatttcctctgtcccggtaggatatttgtgtgttgatgcattgtatgcacgagaggtcgcactccgaaccttccctctggctgatcatcacagaagatattctttgacttctcagttcttgtagagattgaaatgtaccgaaaggtgtaccagtagcgaaaatgtagtatataattccagaaatgcagtctacatatactaaaaccctttcttggtcatttgtgtaagatacgtataccatatgaccattatatgaaattgtgtactattactatcgttctatc

SEQ ID NO: 21265 - DNA, 1164 bp, Oryza sativa
  ref <308>: DATABASE ACCESSION NUMBER: AK099182
  ref <309>: DATABASE ENTRY DATE: 2002-08-28
gatccccttttcccttctcctccaccccccccccccaaccacctcaccgccgacgacctcatcctcgtcggcgccgtcggattcaccagcgagggaggttgcggcggcggcggagagcgcgagggaggaaagcgggggaggtgaccgccagcgatggggcagcagtcgctgatctacgcgttcgtggcgaggggcacggtggtgctcgccgagtacacggagttcaccggcaacttcaccaccatcgcggcgcagtgcctccagaagctccccgcgagcaacaacaagttcacctacaactgcgacggccacaccttcaactacctcgtcgaggacggattcacatactgtgtagttgctgttgaatcagttgggcgacaaatccccattgctttccttgacagagtcaaggaagatttcaccaaaagatatggtggtgggaaagcagctactgctgcagcaaacagcctcaaccgagaattcggatcaaaacttaaggagcacatgcagtattgtgtggaccaccctgaggaaatcagcaagcttgcaaaggtcaaagcacaagtctcagaggtcaaaggagttatgatggaaaacattgagaaggttcttgaccgtggtgagaagattgaactgcttgtcgacaagactgaaaacctgagatctcaggcacaagatttcagacagcagggtacaaaggtgcggcgaaagatgtggttacaaaacatgaagatcaagctgatcgtcctgggcatcatcatcgcgctcatcctcatcatcatcctgtccgtgtgccatggcttcaagtgcaagtgagggtgttggcttcccagtcctccacattcaccttgccccccataataccgcctattcctggcgaaaaaaaagaccatatgtttttttttgttctgttagtcatgagtcctgccccgattcttgggtgttcgagtgtccctgatgtcgcgcttgattggtgtcggatagtgactgggtttatgggtcggagtcccgtgtatttttggacgctattcatgtatagcctgtatgctaccctcttttcgctctgctatatgagtagtaggtgttactacgtttgttcccccactttatatcttctcttactccacagctaaatcttagtaagaaggaacaacttgcatttcc

SEQ ID NO: 21266 - DNA, 926 bp, Oryza sativa
  ref <308>: DATABASE ACCESSION NUMBER: AK071554
  ref <309>: DATABASE ENTRY DATE: 2001-12-06
ggcagagcaccaatcaatccttcctcccagccaagatctttcttcctcctcctcgtcttcaggactcaattcgtcttctgatagcttagcttgattggggtgggtgacaatgggaggtggcaaggacaagcatgacgagagcgacaaggggctcttctctaacatgatgcacggcgttgccggcggccatgggtatcctcctcaccagggataccctcctcagggctacccgccgccgccaggagcgtacccgcctcctccgggggcttatccccctcctcctggggcttaccctccaccacctggggcataccctccacagcatgggtaccctcagcctggtggctaccctccacctggtggttacccccaacatggtggctaccctcctgcgggctaccccggatcatctgggcaccagggcggccatgggagtagcggtggaggacacatgggagcaatgctggctggaggcgccgctgcggctgctgcagcctatggggcacacaagatctcttctcatggccatggtggacacatgggctatggaggccatggaggctttggtggttacggccatggctacggcggtcaccacggcggcaagttcaagcatggcaagcacggccaccatggcaagttcaagcatggcaagcatgggcacggcatgttcggtggtggcaagttcaagaagtggaagtaatgcgcatgatctgatcatgctggaactctgtttaggctttaactgaagtgcttgcgcttggctggttaaaagcctaaaaaaagcctctcgaatgtatctaagcaggatggagctttgctcagttgctgctcccatccttcctctatgatttggtactctagtatgtggctcagtgacaatatggcttgctaataattaattaaataccttctgacgcttatgc

SEQ ID NO: 21267 - DNA, 3762 bp, Oryza sativa
  ref <308>: DATABASE ACCESSION NUMBER: AK071555
  ref <309>: DATABASE ENTRY DATE: 2001-12-06
ggtaaaagaaagtctcccgtctcttctctcccgctccttgcgccatctcgcggctgaaccggggaggggcgccgatctctatccgacgagcagaccaagggaggggaggggatcctgggttcacccaaatatttgaagacccaagcgtttggtgattggcaaagatgggttgggggatatcccggttgattggactgaaagcagctgtgttcctctctgtggcttatttcttccatagattggacatgacactgctttcttttcccctcatatatgcctctgtgattgcgatgcttgtttctattgcttcacatccatcaattgaccttcctttgctccttggcaaggggtcgaatggaagctttcctgtgtggtcatggatcatgttctcaccatttcttcttttcatccatctgtttgttctgttacgaagatttgtgaaaaatgagcccttgtacactgagattgctgatggagtgtatgttggagggtggccctcttcagttgagcgcctgccccctggtgaacctgcagtcatagactgtacgtgcgagctcccaagaagctctactatatccgagaattcatatttgtgtgttgccacctgggatacaagggctcctcaaccatcgcagattgagtctgccgtgagatgggcactgagaaagcgttcgcagaacaaagctgtgtatgtccactgtgcctatggccatggaagaagcgtctgcgtgatgtgtgcacttcttgttgcattgggattagctgaggattggaaagctgctgagcaaatgattcgtgagaagcgaccttctattagcatgaattctcttcatcgtaaaagtttagaggaatgggcaaaacacttgctcactccctcaaaaagaagtggggaatcagatgtgagttatgcgattctttcggatcatacccgaaaaaggcattgatctcgcaagaaaactaacttgctcagtggctgtgataattgagatgaagtttaaatgctctggcattatctactgttatcctagtcatgtccaaggcatttcattctctaagttaattgtttgggagtatgttgtaaaacttctactactgtggcttacaacgccagctcttttaggcgctctgttggctgcgtttgttgccctgacttgggattagggttcacagatggaatttcgcgaaaaccaatcggatttcttgaaactgctaggtctcggtttatgaaaaccggaccagttttgtaccgcattgaccgaaagtcatcggtttttaccggtttttggtcggatttcggtaaaccggtgaggagcggtttttacttcgaaattgaaaagtaaaacccttgttgggaacctttccttccccttcggcacaaaaaatagagcaactcattagcgcttgagcaattaagtattagctcaaactaacttaaaaaatggatttaatatgatttttaaaacaactttgctatagaagagttttgcaaacaccatttagcaatttgaaaaacgtgtgtgtggaaaattgagaggtataagttgggaaagctcgttgccgaacgcagcctaagaacaagttttataatagagccaactttaagtttatagcttatattagaattaacatgtatagtgatgagctataaggttatctctctatttttctcctctctctatctctctcatgcatatgcatttaatgtatttatcttgaagtatgtgaatagctatctcttgcataataagagccaatctttttcattttctaaattctctttcctccacataagtttatttgccttatagtgtactattaaacttgctctaatgatcttccctgtcattgaatgcttgccagagacgtggtattgtcggatctctctttctgaaaaagaggggcctctgctagcctgctagattctcatttatagcgaaatgtggtatgtttttcatttttggtagtttgcatctatctctctgttaggttcttttcatctggcctgaaataaatgctcaactattcaccactttgctgtacccctgtattctgtgggcatttcatacttgactcatgaaaattttcatgtttgtatctcatgttttgtgtgtaatgatcgtggctaagctgtagtgtactcatcccatcatgctatcttgtgtggagtatgctcttctggccttttcataatttttgccatttttctgcccttgtctcaagcaccagtttgccagttgatggatcaaaatcaagagctgcactattggaacaatctacatcctacggaaagtcgcatgcctggcaagaaatatctcaaatggtcttggtagatgtcacatgacaaaagggttgcttttcacctttctagttctttgatcttcttatcagttgaattcactgatctgccctttcttccatttatttggtctttgaaaaaagggacttccatctatttgtttcttgttttactaataagcattgtgacattccttgtgacttgcgttgtttttctgtgtcctgttttttacatgtatttcagatgtacctcttagtgacaactattttgtctgtcaattgatggtattagatttgtcctccgtgatttcagagttcagacagttatcatctctcttccatcagtgccattagtgccaggttgggaaagccttatttgctggcacgttttcttttttcttttttttttttggtagtgttgatctgcgtcatgttctgttgttatctgtagatgtctattttcaaagtaagcttgggaacatcctacctttaaaaaaaatggcttgttcagcagaaatattagaggttgttttatgcatcgtcttttgggaggattttgtctgctcaagtcatgagcagccacgcatctcctgcctttgcattgctctggtctgcaacaattatttctgtgctaactcttcagcctgttcaagagccattggaagtttggaacaagtgagccagtgaccagcattgcattgcacctcaacaaatttttgcctcttccttttcctagtgatgttgctttctcaatactttaataatagaacattacaacccctctccctctcccaccctctctttctaacatcacttttggccggagtttacatcctccaggagaagctctcaaaatcctgagtactgattctgctgaggctgattatgcatcggttgcagctcggttcctgtgggactgacgctctcggtgccaatgaagttcctgttgcaagagaaaaaagagtcaatgccagccatgttcatctgtttctccgactagaagagatattgcacgaatatctgtcctcgatataacacatcaaatgatcaaatcaaccatccaccctatgaacactagtataattcatcgcttatctaatgactcgctggagataagcagttctgagtcttactcgcgaggacgtgaagaccagaggttgctgagagcacggaggcggcggtaatactccccaatggagaggaaacaccgagccgcctgccgggttgttagaatccgccgcagctgatgcaacgtttgttgcctcagattgtcagcctgcacatttgccaggttagtcacctaaaagctggaattgaatagcattcctgaaagaaaacgacatgtcgaattgtatagtaattctgtatcttgtctgtcttagctagaaattttacacggtatggttctgccattatcttttgaacaatgaggcatcttcagataatctaactgtatattctaatgtc

SEQ ID NO: 21268 - DNA, 2018 bp, Oryza sativa
  ref <308>: DATABASE ACCESSION NUMBER: AK071556
  ref <309>: DATABASE ENTRY DATE: 2001-12-06
gacaccaaaacaactcgcatccgtttcgttcaagtccccccccgaaaagagcttagtagaagcgcgccacagagccttctcgacctggctctcctctagccacctctgcttcttcttcttcttcttcttcttcttcgtctgatcgccaccgaggctaaagccaccaggaggagcaggttgatagctcggcaggcaagatggtgctctccaaggccgtctccgagagtgacatgtccgtgcactccaccttcgcctcccgctacgtccgcgcctccctcccaaggtaccggatgccggagaactcgatcccgaaggaggcggcgtaccagatcatcaacgacgagctgatgctggacggcaacccgcggctgaacctggcgtcgttcgtcaccacgtggatggagcccgagtgcgacaagctcatcatggccgccatcaacaagaactacgtcgacatggacgagtaccccgtcaccaccgagctccagaaccggtgcgtgaacatgatcgcgcacctgttccacgcgccgctcggggaggacgagacggcggtgggcgtgggcacggtgggttcgtcggaggccatcatgctggccgggctggccttcaagcggcggtggcagaacaagcgcaaggccgaggggaagccgttcgacaagcccaacatcatcaccggcgccaacgtgcaggtgtgctgggagaagttcgcccgctacttcgaggtggagctcaaggaggtgaagctccgcgacggctactacgtcatggaccccgagaaggccgtcgacatggtcaacgagaacaccatctgcgtcgccgccatcctcggctccaccctcaacggcgagttcgaggacgtcaagctactcaacgacctcctcgacaaggagaacaaggagactgggtgggagacgccgatccacgtggacgcggcgagcggcgggttcatcgcgccgttcctgtacccggagctggagtgggacttccggctgccgtgggtgaagagcatcaacgtgagcggtcacaagtacgggctcgtctacgccggcatcggctggtgcatctggcgcaacaaggaggacctgcccgaggagctcatcttccacatcaactacctcggcaccgaccagccaaccttcaccctcaacttctccaagggctccagccaggtcatcgcccagtactaccagctcatccgccacggcttcgaggggtacaggaacatcatggagaactgccacgagaacgcgatggtgctgaaggaagggctggtgaagacggggaggttcgacatcgtgtccaaggacgaaggggtgccgctggtggcgttctcgctcaaggaccggagccggcacgacgagttcgagatctccgacatgctgcgccgcttcggctggatcgtgccggcgtacaccatgccgcccgacgcccagcacgtcacggtgctccgcgtggtcatccgggaggagttcagccgcaccctcgccgagcgcctcgtcctcgacatcgagaaggtgatgtaccagctcgacgcgctcccctccaggctcatgccccccgtgccgccggcgccgctgctggtggtcgccaagaagtcggagctcgagacgcagcggtcggtgacggaggcgtggaagaagttcgtgctcgccaagaggaccaacggcgtctgctagtctcaattagcgacagcgccacggcctacaaatccacaaatcaagacgctgctgattgatatgattaattacattcatggtgtgagctaccattactgtattttttttttaccgtgctaatttgagtggagccttcgattctaggtccaaggtactagtagagttcataaccaaaagccatgctcttgcttttgtttctccttctgataatctgtgcagctgcgctgcagcctgcactcatctcccgagagttgtaagttgaaactgtacgattttgatgttccctgttctagtgtaagtgccaattattgagtggtatggaaaatatttcttcaagaaacc

SEQ ID NO: 21269 - DNA, 1411 bp, Oryza sativa
  ref <308>: DATABASE ACCESSION NUMBER: AK071557
  ref <309>: DATABASE ENTRY DATE: 2001-12-06
gggacacacagacgcactcacacattcagcttaagcgagcgagcgagtgaacgagagagagagacagagatggcgagtgttgcctccttcccggtgatcaacatggagaacctggagaccgaggagaggggcgcagcaatggaggtcatccgcgacgcctgcgagaactggggcttcttcgagatgctgaaccatggcatcgcgcacgagctgatggacgaggtggagcgggtgagcaaggcgcactacgccaactgccgggaggagaagttcaaggagttcgcgcggcggatgctggaggccggcgagaagggcgccgacgtgaagggcatcgactgggagagcaccttcttcgtccgccaccgccccgtctccaacctcgccgacctccccgacgtcgacgaccactacaggcaggtgatgaagcaatttgcgtcggagatcgagaagctctcggagagggtgctggacctgctgtgcgagaatctgggcctggagaagggttacctgaagaaggccttcgccgggtcgaacggcccaacgttcggcaccaaggtgagcagctacccgccgtgcccgcgccccgatctcgtcgacggcctccgcgcccacaccgacgccggtggcatcatcctgctgttccaggacgaccaggtgagcggcctccagctgctcaaggacggggagtgggtggacgtgccgcccatgcgccacgccatcgtcgccaacatcggcgaccagctggaggtgatcaccaacggcaggtacaagagcgtcatgcaccgcgtcctcacgcgccccgacggcaaccgcatgtccatcgcctccttctacaaccccggcgccgacgccgtcatcttcccggcgcccgcgctcgccgccgccgacgcggcggcggccgcctacccgaggttcgtgttcgaggactacatgaacctgtacgtgcgccacaagttcgaggccaaggagccacgcttcgaggccatgaagtccgccgccgaggtcgtccacgcggcgcccatcgccaccgcttgataaggatcagacttcactagctacggctgcgcgtgccatgatccagatatatgggatgtgtacggtagtgtacgtggtgctgtacatgccgtcccgtgtttttctgcgtaatgtttttacgtactagactactactagtgtgtgtacgtaacctggggatgtaagtatcgcgtcaagtactcaagtgtgtgtaacgggcgctctaatcgtattgttctgtgcttcaatggctaccacgttagatgggccttgtgctaatgttgttttatgctacttccgctgtcgccttagatgggccttgttgtataatgtctcgtcgacacatctgtgcttttctgggtgtgtttagttggggaaaatgaaattcttggctgtc

SEQ ID NO: 21270 - DNA, 1668 bp, Oryza sativa
  ref <308>: DATABASE ACCESSION NUMBER: AK071558
  ref <309>: DATABASE ENTRY DATE: 2001-12-06
ggctcgctcgtgctggcccacatatcagtgtatgcacatagagtgggtgggaatctccatccgtttgggaacacacaacacaacaactaccacccccactccgctccttccttccttcccgcatttggatttacccccaaatcttctccaagtccaatcgacctcatttcattcgattcatcgatcggtcggcgcggcttagggtttttggcggcagcgatggcgtcggagaagcacttcaagtacgtcatcctcggcggcggcgtcgcagcgggatatgcggcacgggagttcgccaagcagggtgttaagccaggggagctcgccatcatctccaaggaggccgtggctccttatgagcgccctgctctcagcaagggatacctctttcctcagaatgctgcaagactcccaggatttcatgtgtgtgtcggcagtggaggagagaggcttttgcccgaatggtactcagagaaaggcattgagttgatcctgagcactgaaattgtcaaagctgatcttgcctccaagactttgactagtgcagttggagcaacctttacatatgagattttgatcattgcaactggctcctcagtcatcaagctatcagattttggtactcaaggagctgattccaacaacattttatatctaagggaagtagatgatgctgacaagctggttgcagctatccaagcaaagaagggtggaaaggcagttattgtaggaggaggttacattggtctagaacttagtgctgcattgaagatcaatgattttgatgtcacgatggtgtttcctgaaccttggtgcatgcctcgtctcttcactgctgatatcgcggctttctatgagagttactacactaacaaaggagttaagatcgtgaagggtacagtagctgttggttttgatgctgatgctaatggtgatgtcacagcagttaacctgaagaatggcagtgtgcttgaagctgatattgttgttgttggtgttgggggcagaccgctgactactctctttaaaggtcaagttgctgaggagaaaggtggaattaagaccgatgctttctttgaaacaagtgttcctggagtctatgctgtcggtgatgtggccaccttccccatgaagatgtacaatgagttgaggagagtggaacatgttgaccatgctaggaagtctgcagagcaggctgtaaaggcaatcaagggaaaagagtccggcgagtccgttgtggagtatgactatctgccatacttctactcccggtcattcgacctgggatggcaattctacggcgacaacgttggcgacaccatcctgttcggagacagtgacccgacctctgccaagcccaagttcgggtcctactggatcaaggacggcaaggtgttgggtaccttcctggagggtgggtcacctgatgagaacaaggccattgccaaggtcgcgaaaactcagccgcccgttgccaacatagaggagctcaagaaggaaggcctccagttcgccagcaaaatatgagatttttgtagttttgatgtacatttccacatggtactccccctattggttttctgattgtgatgcgtctgtactctgtactcctcttaaatatgggcacttgctatagctgctgagatttgaataaagaagttttctact

SEQ ID NO: 21271 - DNA, 1255 bp, Oryza sativa
  ref <308>: DATABASE ACCESSION NUMBER: AK071559
  ref <309>: DATABASE ENTRY DATE: 2001-12-06
gattgaattgcctcaagttgtggagacaagtgactgggttgggtggctatgatcaggtgacatcgtgcaaactgtggcggcaagtgggagagtctttcaaacctccgaagacatgcacaactgtttcatggaccttccgtaacttctatgagaaggcactccttgaatatgagaaacacaaaatcgaaacgggcgagtttcaagttgctgcatctaatttaacagagaggattacttctgaaagtcaggttggcatccatgcttctggttctggaagagctagaagagaatctgcaacccgagctatgcaaggctggcactctcagcgcttgcttggcaatggtgaaattgctgatccaataattaaagataaagggacggtgtctgtcttaaaaaaggataaaactcctaaaagcagcggttctgccaagaggaaaaggacaccgaccttggaagatgacaggattgtaccatataaacctgacaagctacaaaatgactcaatggttcttgaccttggccctccagctgattgggtaaagataaacgttcggagaaccaaagattgctatgaagtctatgcattggttcctggccttctgcgtgaggaggtacatgttcagtcagatcctgctggccgtttgatagttactggagagcctgagcaactagacaatccttggggtgttactccattcaagaaggttattagtttgccctcccgcattgatcctcatcaaacttcggcagttgtcactctccatggacagctatttgtccgtgcaccattcgagcagtcaaagtaaatggtgctctacaagatgaagcgcaacatgcaaggttgcttttgtaggtgggggtttatgtgattgacttgggcctgttcatcctgatcttcgttgcaaactagttactttctgcttcattactcctgccatgttgtctattctgtattgattaattctagttaactagatggtctagttatgtatcttgtagttcgttaattgtgatatgtagcttaagttcagctctattagtttagaatgttaatagcctgatgctaaacatgttcatggtttctttcttccttttttttttctcaactaaagaaaaggtgataatttgtagcatgtagcttgtgaggttattcctaatactcagttctcatactactcagaacatgaagacaagatagattcttggatgtaactgttgccttgtgcattgctgttgtatctgtataactgaattg

SEQ ID NO: 21272 - DNA, 1567 bp, Oryza sativa
  ref <308>: DATABASE ACCESSION NUMBER: AK071560
  ref <309>: DATABASE ENTRY DATE: 2001-12-06
gattttccctcactattttttttatcagaaccgcagatagattgtacagaaacttgttgagtattgaaagtactctgtatggtcaacaattctcatatgaaatatgtgcaatcattcctgtatgcaacaaaagttttaaggaaaaaatggtttggttatgctgtcaggctgtttcttgactgcttgcaagatcggaaagctttacagagcaatttccctctttctatagctacatctaactattttgaattgatccagatataatacagaatagagtacaactacaggagaagacttatggctcttcttcgggaagctacaagcaggaaatttgctggttgactccaccagttggcaccatacgacttgtgcagtggcaagacattggaatagagctgagcaatgcattcaccacctcgactgagggatttctcttgagcaagcacatggcatactccatctctcagcatcaaaaggcaacacgattctgccgtcgcttgtgaaaccgaactcctcctgggacatcctcaggagttcactgaagaccgcggtgccaaggtacgtcaacgggacctcgaaccgcctcccatcagctgtgtacatgacgcagtggccccttgactgctacagaagtggagcattcttcagtttctgggcccttttccatgatcctctttcttccaagggctgccatcctctgccactttgccaattgaaccagtctcttggcgctgatcatggttggttggctggttttttcagctgaaaatatgaataggtatgctataaggtgtgattctcagtttctgtctctggaggagctgatgaactgatgatattgagatagctagtctgaatttatagatgggggaaatgatggtgtgcgagtgtctaggttggccagaagtatcagcaagggacagggccatgataccgcaacatgcaaatgctgagtgcaactggttgaattagattttgatagggacaagtgtttgctacatgcatgtcttagtggttgagttctgcacacaccgctatatgcacttgatgccagagtgacatactgacatgtttagtgaatgaggaacacgaggaccccatgtttaattgggtccatgttgtgacggcgtgaggggcagttccatcaactattgtgcaatgagataatagcagagaagtatggtgagggcacctctggtccagctttttattggcggattccatcatgcttggcatattttttttgacttggaaaactgccagggctttgcgtagcagtgtattttcattaaagcagaaaatatttacagaggtttacatacagcaagatcttaaagctacaaagtttgtaaccaatcaaaaacagattgctttaaaggatccttcattctacacagatgtagaagaatttgtttggcgaacaaggccttccaagattgaaatgatggaataatattataaaaaatgagcccatttctctgcttccatatgcctggcatattttgtgggagtaaaaattatttgcttgtgtttattggagctaataaatatttcagaattcagattg

SEQ ID NO: 21273 - DNA, 1568 bp, Oryza sativa
  ref <308>: DATABASE ACCESSION NUMBER: AK071561
  ref <309>: DATABASE ENTRY DATE: 2001-12-06
ggtgagaagagctcaaatcctccaaactttttttcctcctccatatccatcgatcgatctcgccatcgtcctcgagcgagcgggcggctgcggcgagctcgatccgatccccgccggcggagatggggagcttggcaggcggcggcggaggcggcaaggtggggctgccggcgttggacgtcgcgctcgcgttcccgcaggccacgacggcgtcccagttcccacccgccgtatcggattactaccagtttgatgatttgcttactgatgaagagaagacacttaggaagaaagtccgtggtattatggagagagaaattgcacccattatgacagagtactgggagaaagcagaatttcccttccatgccattcccaaacttgcaactcttggcttggcaggagggacaacaaagggatatggttgcccaggactctcacttacagctagtgctatttctgttgcagaagttgcacgggtggatgccagctgctccacatttattttagtacattcctctttggcaatgagcacaattgcactttgtggatcagaggctcaaaagcagaagtacttaccatcattaacgcagtttagaacaattggttgctgggcattgacagagccagattatggaagtgatgcaagttcattaaggactgcagcgaccaaggtgcctggcggttggcatttggatggccaaaagcgttggataggcaacggcacttttgcagatgtgctcatcatcttagctagaaattcagatacaaatcaactaaatggatttattgtcaagaaaggagctcctggtttgaaatgtacaaaaattgaaaataaaattggactcagaatggttcagaatgccgacattgttctgaataaagtatttgtccctgacgaagatagattaactggaatcaattcatttcaagacataaacaaggtccttgctatgtcgcgcattatggtggcatggcagccaattgggatatccatgggggtcttcgacatgtgtcatcggtatttgaaagaaagaaagcaatttggagttccgttggcagcttttcagctcaaccaagaaaagcttgttcgcatgctaggaaacatccaagccatgcttcttgtcggctggcgcctgtgcaagctgtatgaatcaggcaaaatgacaccaggccatgctagtttaggcaaggcatggacatccaagaaggctagggaggtggtttctcttggccgtgagctactgggtggaaacggaattttggctgactttctggtagcaaaggcgttctgtgatctggagccaatcttctcgtacgaaggcacctatgacatcaacagcttggtgaccggaagagagatcaccggaatcgccagcttcaaacctgctgcattgacaaaatctcgtctttaattttttttcctttcaaatgtatatagctgcaatagacaaaataatatacgtccaccctatattttgatgaaagcaaatgggcaataaaaggaatagaaaaaccatatttgttcttgaaaagaaaataaaagctctgatatgcttcgttttgct

SEQ ID NO: 21274 - DNA, 1300 bp, Oryza sativa
  ref <308>: DATABASE ACCESSION NUMBER: AK071562
  ref <309>: DATABASE ENTRY DATE: 2001-12-06
gatggtgtctcccacgaaaaagaagagatgtttaggcaaagggatggacggtggcgccggcgatggcggctggtccaccctgagctacgacgccgacgtgctccacatccaccaggtttgcgcccattggcgcgcctccacggcccccttggctgccgcccggccatggatcgtggccggccacgagacgtcgcgcattgtcagcgccatcggcgaggactactccttctggctcccccatggcggcggccagaggatcatcccctgcttcggcgacgcgccgccggcggggctcccgtactgctgcggcacgccgcgcgggtggctcgccctggcggacgcgccgcgctccccgacgcggctcgtcctctgggagccgtctccagggcggagatcgcgatgcccccgctgccccgcgcggggttcgccccgcagatcttcctctccggcgaccccctcgccgccgcggcctcgccggggtggatggcgatcgccagccagcccttcagcgtcgcgggcaagtggcagacgctcttcttctggcgccccggcgacgccgcctggacgccgcagcgcgagccgccgatggacaggatcgacagcgcggcgttccacggcggcttcttctacctcaccgtcaggtactggtacctctacgcgtacgacctccgccacggcgccggcgcgccatggccaccgccgcgcgtccgctccaccttcgtctacctcgacgccgaccgcgcgtgcgagctgtccaggcaaggccgcagcctgcgcgccgcgcacgtggtcgccgccgccgacggcgtcgacctgctgctcgccgtgctctactgggaatgccaccgccggagtgtacagatggtcgccaaggtgttcaggatggagtgggcggcggcggcggcggacctcgagctctcgccggtgacggacctcggcgagcacgcgctcttgctgggccgcggcgacgcgctcgcgctctccgctgcggagttccccgcgatcaggaggaactgtgtctacttcgtcgagcacgacaatgccccgcatcggcattgggctatcgccatggatttaggggcaaatgcttcggagctgattccgcatccacaatttcaggaagatgagccaagcgaagaagatggcaaatgcgccgccgatcgctccttgttgccgtattcctggttttgcctcaaacaacccttcttcaagcataagtgacatggccttcgccatcaataattgacatcattgactttactgtatacttcctctgtttcacaatataagactttttagc

SEQ ID NO: 21275 - DNA, 1358 bp, Oryza sativa
  ref <308>: DATABASE ACCESSION NUMBER: AK071563
  ref <309>: DATABASE ENTRY DATE: 2001-12-06
gtactgcgacgcgctgcctccctctactgctgccgccgacgaatcccagcggcgccgcgacgccgccggtgcgccgccgcagttagcatggcagcgatgaacaatgatctgggaggactgggaggcagacctgctacttcacaagctaatccttttgaaagtgctttatatggagctggacctggactcatccgaagtgggttaggagcatacggcgagaagtttttaggttcaagctctgagtttatgcaaagcaatatcactcagtatctgtccaatcctcagtactactttcaagtcaacagtcagtatgtgagaaacaagttgaaggtgatctttccctttcctgcaccgggggcactggacaaggataactgaaccggtgggaggaaggttgtcatacaaacctccaattcaagatatcaatgctccagatctttacattcctctgatggcttttgggacgtatgttgtaattgctggatatgctttgggtgttcttgggaggtttaccccagaggcactcactctacagttcacaaaaggattacttggctggtttctgcaagtaatcctgatcagagttctactgtacacgctgggaagtggtgaagcgccattgctggacattgtggcctatgctgggtatggatttgctggtacatcacttgcaatgcttgtccgcgtcttctggagcccgtcatattattttgtactgccatggttctcaatctgcaccggagttttccttgtcaagacgatgaagagggttcttctgggcgcaccaaggagctatgagagacaccccagccggaatcactacttccttcttttcctcgcggttgtgcaatttcccatgctcttctggctaggcaacatcagcgggtgatatttcagccttattttagaactacataactcgatttattcggtattactggaataggtttgagatttaggcatatatgtcgttcatattcttgtggaagtggtaaattgctggacaagaagttgcataccaaatgtctgtccttcgcccttgtctgtccggcattaactgaagaccaatggatacacgaatgttcttatcgtacatcatcgctattttgccttctgtatctcatttttgttacttagtcaccgcgatcgccttcaagctgtcttacgacctgagacatgtctgtataaaatcagatgataatgttccttgtcgtgcacttcaattgcttctgaaatgtgattcttcagtggactggggatatgggagtacataggaccaagagagtgttgtgtaattccttacaaactccgtctgaaattttcctacttacaagtcaatacataatctataattagcg

SEQ ID NO: 21276 - DNA, 795 bp, Oryza sativa
  ref <308>: DATABASE ACCESSION NUMBER: AK071564
  ref <309>: DATABASE ENTRY DATE: 2001-12-06
gactacccgtgcccgtcgcacccgattgccatccctacaagcgaggtaacgcaagaatcccccatcaccaaaacccagagacttctctcctcttgctcctcctcgacgccatggcccccagatcggacagcgccaccggcggcgcggccgccgcccaggcccacggatccgacttcgactccatagatcccctcttccacgtcctccgcgtgctccccttctccttcctccggccgccgcgcacccgcctgaggctgccctccaacctggcgctcccctcccccatgaccgtcttcgccctcatcctcctcacctacttcgccgtcgtctccggcctcgtctacgacgtcatcgtcgagccccccggcatcggcagcgtccaggaccccgccaccggcgccgtccgccccgtcgtcttcctccccggccgcgtcaacggccagtacatcatcgaggggctctcctccggcatcatgttcgtcatcggcggcatcgggatcatcctcctcgacctcgccgtcgaccgcaacaggccccggagccttcgcgtctccttcggtggctccggcgtcgccgccatcgtcatcgcgtacgctatggccatgctcttcctccgcatcaagatcccgggctacctatggtgaggaacaagcttctttactttgatcgttagatcagatctgtaacaagattctctacctctagatctgtttgctgttgctgaggaactattgcgcttcctaatgatgttattgtaaaattctggatgattttgagtttaaattagttatctgg

SEQ ID NO: 21277 - DNA, 2133 bp, Oryza sativa
  ref <308>: DATABASE ACCESSION NUMBER: AK071565
  ref <309>: DATABASE ENTRY DATE: 2001-12-06
gtcgtttgctccaatctctttctctctcctcctcctccacctgaatctccctctctctcctccaagaacaggggcggcgaagcagctaagccggatttcgtggttggtggcctctccccttccaccaccaggctcgccccgccgctgccgcgaggtgcccggccgcctgtttcttctctccggtgcatttcgatctgattcccccgtccgatttcgtgtccgtcctgcttcacacccggatggttcgaatcgattcttaaggaggtgaggcgtttaatttgttgttgagctacgtgtaaatccccccctttacatatgcgtggagagattggagcgggcgtatggagcttcgctgagctcacggcttcttcgggataggcgggggaggagggggtgatggtgccatggttggcatgaagcttcgtttctcattttccatggtgttggaatgcagcttctcagcttgagcaatttgagggaaatattgtcaaacccagggagcgttttctcagagcagtgattataatttttcggtttattagcattctttttttaagtatacaacttcctattttcatgtaactatatattttcaaggattgttactgtttaatttgacatcacggctgcatggatccatttcctcctagatagttgcagcttcaactcaatctgcttacacgcctttcttgttagtgctataggtttatcgagaacctcataaatcagctgtattttgttcaggtaatgaccttcccccttatcaaatgtctcacctggaatacctaccagaacgttatggagctggataactatgatttctcaacaattggattattctaaagcgttagtggcgcctgttttcttgtaacggtgtgacctgttgcagattggttgctttagattaactttgtctgtggtgatgcaccatgcatctgattagtcaaaactagcatccagtaagcgatgccaaagtgattgaattggacatagcatggaagctttagagtgaatgtgttaattgataagtgtagtccctcctttcatttgttaaaagtctcatctgtttatttggacaaaaaaaaatctttggttgttataaaatggaatacttatgtgttgaaagatgaaagccattaagcatatgtcatgtcaagttgatctatatgtcaacaaacaatttttaatgtcaagttgagaggctctgtttttaacttgatcttaaggtgagttgtttagctacttgctgaaaacataattagtcgtgcattgtctgcccataccatatatagctgcaacaaggttatcttactgtgcaactgcacaaattacaatgactagtagttgttcattcctcagtattagtaactttatttaagtgaaagttttataatattctatcttttatttcagaaacaaatgaatcgtggcgaatgaagagtttagcgatgtgccttagttgaatggttccattgccaccctgtttggctgattttgttcagacgaactcatcttcaagcttatatgggttgctgcataggtaatttgagcaagtcccagccacttccagattataaaccaaaaacatctgtaagaaagaagcctcgccatttatctattggaaaaagaaggcaatgctcatcaggcctagaagcaatggagaacaatgttagtgtatccgtgtcccttgaggggaatatatcatcacttcccaactctatcatcaatgattctaatgggaaagatacctcattcatcaaccatgcggctatagcatgggccgagatgagaaggcgatggaccggagaccaggagaaagttcctaaagaggcatcacaagagccaataataagctggtgcacaacatatgatgatctgttgtcgacaagtgagcgttttccgcagccaatcccgttatctgagatggttgattttttggttgacatatggcatgaagaagggctctatgattagttgggtttgactgtttctaatagttatcctgaaaaaaaaaaagaaaagaaactacaaattagtaagcaggattaatctcaaattgggtattggaaaagaaaactgtaattgtaaaagctacaaaatggtgttgatatgattttgtgctagttggacctc

SEQ ID NO: 21278 - DNA, 998 bp, Oryza sativa
  ref <308>: DATABASE ACCESSION NUMBER: AK071566
  ref <309>: DATABASE ENTRY DATE: 2001-12-06
gacgcacgtcagagctcgcctcgccgccgcctgacctcgcctcgccgtcgcgccgccgcccacagacacagatcgattccctccggctccgatatggaagacgctgccgcccgccgcgagcgcttgcgtgcccttcgcgctgccaaggacctcctctccacccccgaccccgccgccgccggacaaggacaacaccaccaaaatgggaaccgtgagacagcaccagaacaagcggagcatccaactttaccagctcctctggacgcacctgaggaggcctcaaaggagaacattaaccccactgacgaatctgaggaggttcaaaatgatggtgatatgccagccatgaagttcagaaactaccttcctcatgatgagcaacttcggggtggtaaggtggctccagtgtccctcccaaagtttgaggatccaatttctgctgaaactacagagccaaagcaagttgagaacccctttggaaacatagctccaaagaatccaaattgggatctgaaaagagatgtgcagaagaggatggacaaacttgagaagcgcacgcagaaagcactggctgagattgcattggaacaacaaaaggagaaagaagcacttggggaaggaagcgatgcagcccaagattgagggagggctcaggggagatggatatgaagtagctgaacctttgatatgttaagaatgctcaaggggtgcactgtgaactgatgaaaagctaatggtaacattcggggtctagcaattagtgtgcgactatacgtttgtaagcatggaaaaccttaataaacctgattcaggttgctagacccgtgtgctcactgcttgattaagtgtagttaggggactcgcattgtactacccccaccaaaatgtatgtttgtgttgtgcttaattctcttgtaagtcaactgtgcttagattctgatgctgcctgccatggaaaccagttaaacgtattaatttaacatatgctttaatttcct

SEQ ID NO: 21279 - DNA, 1055 bp, Oryza sativa
  ref <308>: DATABASE ACCESSION NUMBER: AK071567
  ref <309>: DATABASE ENTRY DATE: 2001-12-06
ggtccctctctcatcatcatcattcatcaatcgtcgcctgatcgcctccagcgaaattcttcctccatttctctctccatcgaatctcatcccagcagcagcagcagcagcagcagccgccatggattccaaggcggacgcggagtcagccacggccagggccgcccgtcgtgtcgccgcccgtctccgccaacccctacgtggtctccgccccctccgctcagccgcccgccaagagcgccagggagaatctccgggagaagctcgacgtggtcgggaggaggttcggggacgccgcgcgcaagaccgagggcatcgtcggcgacatctggcaacatctgaaaactgggccaagcattgctgatacggcgatggggaggattgctcagatatccaaggtgatagctgaaggtggatatgacaaggtgttccaccagacgttcgagtgcctgcctgatgagaagctcaagaaggcgtacgcatgctacctttcgacctctcatggcccgatcatgggcgtcttgtacatctccactgccaagattgcattttgcagtgacagtcctgtggcgtatgtcaccgaggataataagaaccaatcttccatctacaaggtagttgtacccgttgctcagctaagatcagtcactcctacggcaagccagcagaacccagcagagaggtacatccaggtggtttctgtcgacaaccatgacttctggttcatgggcttcgtcaactacgacggtgccgtgaagagcctccaggaggccgttcgtggcggcaaggcttcacttcaccatcacatgtattttttgtgaacatcgccgttacatgtattgatctgtccgtcgttcgtcatgcatcactgggaattcgcatgtgtcggtgtgttaaattgtctgtacagatcgctccccttgctgtgtatattggctgaaatttgtgttgcatatgcattcatgtattgtatgtagtgtgtggactagatgtgtacaaatactggattgattgttggcttgatgctccattaaagcctttctgttcgttgttcc

SEQ ID NO: 21280 - DNA, 1696 bp, Oryza sativa
  ref <308>: DATABASE ACCESSION NUMBER: AK071568
  ref <309>: DATABASE ENTRY DATE: 2001-12-06
ggtttttgcttccttcagatccaaaccaaaccaccacctgcggcgcgcgccgcccgcggcgagagcccggcgccgatgaagcaccatcatgtggcgcgggggcgcgccgagccgcggcggatgggcaacgccgccatggtcatcaccatgctcctctccctctgcgtcctcacctacatcaaggctcgctactgctccacccccttccccaaggcggcggaggagatggaggtggtggagatcgacgaggattacgacagcacgaggtacaagatgacggggccgataggggaggaggacttcgacccgaccaggccgacgtgctacgtcacgagcaagcggtcggagcggtgcgccgccgtgggcgacatccgcgtcgacggcaaccactccaagatctacatcaacccgctcgacaaggagtggagaaccaagccgtacgcgcgcctccacgacgccgtcgccatggacgacgtgcgggagttcacgctcgtccccttcggcggcgccaaccacaccgccgtgccgccgctctgcacgcgcaaccactccgtcccggcgttcctcttctccagcggcggcttcgccggcaacctgtaccatgactacaccgacgtgctcgtcccgctcttcaccagcaccaaccacttcggcggcgaggtgcagttcttgctcagcgggatcaaggattggtggctcgacaagttcacgccgctgttccggcagctctcccggtacgacgtcatcgacgtcgacaacgaccaggaggtgcactgcttcccgcggatcttcatcggcgccacgttccaccgcgccatgggcatcgacccggcgcgctccccgggcggcgtcaccgtcgccgacttcaagcgcctcctccgccgcaccttccgcctggagcgcgccgtcgcgtcgcgcacgggcgcgccgcggcgcgacaagccgcgcctcctcatcatctcccgcaagagctcgcgccgcttcctcaacgagcgcgccatggcgcacgccgccgcgctcgccaggttcgacgtgcgcatcgccgagccggacaaccacaccgacatgcccaacttcgcgcgcctcgtcaactccgccgacgtgatgatgggcgtccatggcgccggcctcaccaacatggtgttcctccccagccgcgccgtgctcatccaggtggtgccattcggggggctcgaatggctcacccgtgtcaccttcaaggatcgagccaaggacatggatgtcaactacatggagtacaatgtctccttcgacgagagctcgctgagagagctctacccgagagaccatttctacatccagcatccatacgatgtgcacaagaaaggctgggacgccatcaagacggtgtacctggacaagcagaatgtggagctcaacctcaccaagctcaccaacacgctggaacgggcgcgcgacttcttgccagagccctgacaccatggctggggatcttgatgatgctgatggtagataggagagctcttctgtttttgattcgctttttttctccttcttcttcttgtggtgagattcatttctttcattgttttttgataaaaaggaggagacgagtaagatcgtgtcatagacaagtgtccaaaggttaatttacacttgcacactttgtaaattggttgttgtcgataaaatgtcaacatgaaaaatgctaatt

SEQ ID NO: 21281 - DNA, 1519 bp, Oryza sativa
  ref <308>: DATABASE ACCESSION NUMBER: AK071569
  ref <309>: DATABASE ENTRY DATE: 2001-12-06
gcccagaggcttatctgttgccacatggccacaccaagtccaaaccctcacctctccatgtccatcaatggaggagccaccgtttcggctggttgggcggccacccaacctcgccggcgacgaacagtggatcacagtagcagaagctgcttacttcgaccatcatatggatctaccagaggcttcggtacgaggagaattgcagttcgttctgcctcccagaagaactcgtctcctccattgatgaccactgagcaagaagccgaagacgaggtggtgctagagtcgccggcgcacttccgcatctacaagagcggcaagatcgaccgcctcaaccggccacccgtcctgcccgctggtctcgacgaggccaccggcgtcacctccaaggacgtcgtcctcgacgccgacaccggcgtctccgtccgcctcttcctccccaagcttcaggagccctccaagaagctccccgtcgtcgtcttcttccacggcggcgcgttcttcatcgagtcggccggctccgagacgtaccacaactacgtcaactccctcgccgcggcggccggtgtcctcgtcgtgtccgtcgactaccggctcgccccggagcacccgctccccgcgggctacgacgactcgtgggcggcgctccagtgggcggcctcggcgcaagacggatggatcgccgagcacggcgacacggctcgcctcttcgtcgccggcgacagcgccggcgccaacatcgcgcacgagatgctcgtgagggcggccgccagcggcgggcgcccgaggatggagggcgcgatcctgctgcacccgtggttcggcgggagcaaggagatcgagggggagccggagggcggcgccgcgatcaccgcggcgatgtggaactacgcgtgcccgggcgccgccgccggcgcggacgacccgcggctgaacccgctggcggccggcgggccggtgctggaggagctcgcgtgcgagaggatgctcgtgtgcgcgggggggaaggacgtgctcgcggcgaggaaccgcgcgtactacgacgccgtggcggcgagcgcgtggcgcgggagcgcggcgtggctcgagtcggagggggaggggcacgtgttcttcctggggaattcggagtgcgagaatgccaagcagctcatggatcgcatcgtggcgttcatagccggtggatgagctgcttggatcgtatataagtcaacattgaagttgaatcgagttatttgtttcactcatcattcactgggttgaaatcgaatcgaagtaaatagtgtacaaacactactaagctttcgaaggtgaaactgaaattgattgcgtgccacaaaattgtgatgtatttgtaatagtacatccctagaagggtcatcgatagatttttttttcttgcataatcaaaagtggcaactattaccttacaatgaaccatcgcatggactagggaacataagggtatgttaaatgatagagacgagtatggtctcttagacaatacaagattatttag

SEQ ID NO: 21282 - DNA, 1744 bp, Oryza sativa
  ref <308>: DATABASE ACCESSION NUMBER: AK071570
  ref <309>: DATABASE ENTRY DATE: 2001-12-06
ggctcccgtccgaggggcggcacggacggcgcctcatcctcctccgccgcctcctccccttcgcctcgccgccgcctgagcggcgcgtcggcaaagccggccggccacaaggacggcggcggtggggccctctcccctcctcgaggaagccagcagcggggacaccggggctgctcgggagcggcggtccgcggcgcgggaggcggcaccggggggttggcgtggcggatccgtctcctcggcggcggatctggcctctccgtgtccaggggccgagcaacggcgagcggaggtcagcggcgcgggaggcggcgccggggggtcgtcgcggcgaatccggccacaccggaggtggatccgcctcccccggcggcggatccggtctccccgcatccaggggccgagtgacggcgagcctcgcggcgacggcggccggaaggaggcgacagatgcgcgccgctgtggacggatgtggcgaaggcgaaggctcgagggtgaggctggttccggtcctcccagggcgacggcggtggcggaggtccacagccccggtggcggcgacggcgacggcggcagcggcggtccacggccgcgatggcggcagcggaggactgcagatgcggtggtggcggagggcgatgaggcagcagccacgttggcggtggcggcggctggcgacagcggctgatgacagcagcggcgacagcggcaggcttgcggcggctgtgaatgtggaggcagggtggtgaccgtggctgcggtgggaggaggcacggcggtgaccaccgtggctgaggtgggaggatgcatggcggccttggacggctagccgagggcgtaggagacgactgtatcttgccggcgcggcagcgtttggaggaggggtcggagaccggcttggcgcagagagacgcagccgatggcagcggaggctggctcggcgcgagaggcgcaggcggcggagatggaggccggcttggcgcaagaggcacggccgatggagggaggccggattggcgcgagagacgcatccggtggaggaggccggcttggcgcgagaggtgcggccgacggtggagaaggcgatctcggtacgaggaggagctgctggtggatgtggcgcggtcttcggcgctcgaaggctggccggcgaggggcgccggtgcaggggtcccacatgtcagcagaggttgaggggtggtgggagcattggtgcgttagtcgtagattcgcaggtggtgaacagcgggtgaaaacccagcccggccatggccggaccgacaacgatggttaattccccttcctgagggcgttgtcgtgctgtctcatccctcaagggtggttgcctggcgaaagcccagtcctgactcctttgagccccgacagatggcggcggcggtttaccgtcgcttctcttcttgaagacatcgttttggtatcccctagccgaagcctctcgatcgattggtgcaagcacactctaggagttggctttgtattggttgtgagggtgttcttttgggcgatctcatatgtgttcctttgttggtctagcggcggtcgctcacgcttagcggcggccggtccggtgttagccttcttccggtcttgtgtgttggagctgtcggtgtgtggatggtggtatatttttcctttttcctggttacgaccctccagggttgtaatcttgtaattttttcctgttctatcaataaaacttcgccccgtctcgtgcgagtcgtcc

SEQ ID NO: 21283 - DNA, 789 bp, Oryza sativa
  ref <308>: DATABASE ACCESSION NUMBER: AK071571
  ref <309>: DATABASE ENTRY DATE: 2001-12-06
gaccggcgcgacgacgacggcaaaatctaggtgggcatctccatcgtcggtggctggtttgctgatcgccaccacgagcggcgtacccctcgtcgactctccacgacgtgcaggatcatggtcggggcaacgagacatcaggcgctggtgacatcctggcactgcttgtagcagaggcaacgggagttcaccccgatcgcagatcagagcagcccatccaagcggtggagaaattataagtagtgagggcaactccccacaattgtctcgatgatggtaagaacaagactttccagtccgatatttcatttcatattcatcaatggcggcgacgacaacacggcatcgatcgatttgcgaagcctatgcatcacggcatcatggtggcggcgacggcaccgccgcagcaatcgaaggagcagagaggcggctgcaccacagtgcgccgctacgactcctcgctaccgatgtggaagaagaatgatgaagctcctaattaactagttctttgctccatacagatgcatgacaaatacaccattgatggtggccaacaccgggcagtattcgcatagttgcatcgattagctgatgtagatgcagaaaatgtggatttggcagtatgaaaattctgtccaaagcagcttgtgcaggtcaagaattgggtgtactgtacattcatttttcttctttttcagaatggctaaatatgtatgaatccatatactgcctgcattattgcaagttctcttgtgatcagactatgcttcaatttaatctaaatcgagg

SEQ ID NO: 21284 - DNA, 1577 bp, Oryza sativa
  ref <308>: DATABASE ACCESSION NUMBER: AK071572
  ref <309>: DATABASE ENTRY DATE: 2001-12-06
gtgtgcgagccacgaaggttggcgtcgtctcctcctccctctcctcctcgcgcgcggctgccgtcgagaagacgctcggcctcccttgtgcggcctcacctcctcgcgctgaatcccctactccccgtgttagatttgaccttcataatccaaaagaagaggttttagttcaagcgaacgataatggggatatccaaggtgattggcatcgctggaacaactcttctagtcacgtctgttggtctgtggaagatcggcttaagaattgtcgcggttccttttctagcaaccagtactattgcctatatcatcgctgttgcatcccacaattccatcaacataccttggatcttgggaaagaattcaaaggggaggtttccaatttggtcaagtgtactttttggtcctttcttgatacttgcccgggtatatgcaactgtgaagagacatatgaggaagaaggaggctgtgtataacatgatcactgaaggtgtttatctgggaggatggccgtttatgttgaagcatttgcccccaggagacccgtctgttattgattgcacttgcgagttgccaagaagtgattttgtcccaacaaatgagtatctttgtgttcctacttgggatacaagagccccgacgatatcccaaattgaatttgcggcatgctgggcatgtgaaaagagagccaaaggaaaaccagtttatgtacattgtgcatttggtcatggaagaagcgcttgtgtcgtgtgtgcagttctagtagcattgggcattgctgaaaactggaaggatgcagaaaacatcatccgagaaaaaagaaagataaaaatgaatgctgttcaccggaaaaccttagacgattggtcaaaatatagagcttctcagaagaaggataaataactgacattaaatcatttgacatctcaggcaaattaccatgtgagttctatgcaatctgggttctgagaaatcttcctagttctggagcttgcattgtttcccagctcatatcagtgtttcccacacgtgtcagattacttccaaaatttgttcccagttttgcttacttctgctcctatctgaaggtaggaggcttatcataaaataaagaaaggaaaagaattaattgcaggtaggactagagcatggtgcttactctcggggacgagaagcccagagggagctgagggcacggaggcgattatggtactcgccaattgccaagaaacatcgagctacctgcctagttgtcagaattctgtgcatctgatgaagagtctgttgcctcaagttatcagcctggaaatccaatttgacagttgcagttttagtacatgatgaaaggatctcactcttggcactagaaaattgaaaactagagcagatactggtagtaagtttgttttactatgccatactatagttaatcagataagctccaaagtccaaaataaggataatgtcacatgtttaggtgaccattcttttctttgtatgatgtagagataacatctctacatgttgatgccatagcatattactgtaggaaaatttgttccttttcactctttatt

SEQ ID NO: 21285 - DNA, 1590 bp, Oryza sativa
  ref <308>: DATABASE ACCESSION NUMBER: AK071573
  ref <309>: DATABASE ENTRY DATE: 2001-12-06
gactgtaccccgcgcgccatatcgccaccgccaccgcccacccgaaacctcccgctcctctcgaacctttccgaggcggcgaaacccccactccccgccgcgctgcgccgcgccgccgcgccctctcctcccggatctcgccgccacgcggctgcggggtggtcgggggttcaaggcgtacgggtggcgcggctaaatccgcggcgccgcatttggttggggggatatgcccaattctgtatgcggccgccggatttgagcgggcggaagcggtgggcgggcgagccggcgaaccactcctcgagcggggcgccgacgcaggagaaggagcaggtggatgggcgggcgcggtggattctccagttcaacgagcttgcttcaccttcgtctggttgcgtgtgcgcgcgcacacgctatgtccactatgtttgcaggtaacaaacacctttggcaatgtggtgttcgcaggtaacatatattttcccctcgcaagcaaaatttttaaaagaagctaatggctagttttcagcactagtatcaggtttttctttctgcatgcggattgctttttggcaatttttttaagaactgagccttttagcaattctcgccctgctttcggcaaccattgtcaaagtaacaattttgtaacttgtacccctgtttatcttaatgaaatttggtcggccttgctggccgacctggcaaaaaaatatatttccccctccagttgttaaaaatcttaagatactagcagcatgttcttttgaattgtatttataggtttttattttatttttcgttgcatacaaggctagttctctatacatattagaaatggtcagttcgtttcctgcaatgtttttgttttatggtggaatatttgatggacaggattggcctatctcacttcctatctcaaagcgaagaagcacaattcctgcatattctctaaaaacagtaagaagataggataggtggggggtgaccacacaaaaacaacccagtaattagctagagctaagctgctcccaaaaaaaaaaattgtgccatcctcttattattccgtatgtgcattagaatttattatttgacacatactaattccttttgtcattgtcatattgtcaatgaaacatttaaacaccacattaatgtctccccatcctaagattttgttttcagttgcattgtcatttagatataatcactcctatgggtttttgcagtcctgttagaagctcttcttgctagtttattctgcttgactgcttgtaagttgatttgttgaatgcttcattgaagattctttctgaaaatgtaatcataacttaattgttccatcttcgccgcaaaaaagaagaagaagaaaacattggattgttccatctattttgattgcgttatgactttctaggcaactacaatatatatattcttcagtaattttgcaatatagtacaaaagatatagctatatataagtttactttacaaggcaaaatttgtgtacactttcaatttgaatgcagttttgtgtcctcaatgtaaatttccaatctattataataaaaatgtgcttgatgctttt

SEQ ID NO: 21286 - DNA, 977 bp, Oryza sativa
  ref <308>: DATABASE ACCESSION NUMBER: AK071574
  ref <309>: DATABASE ENTRY DATE: 2001-12-06
gtcacacaaccaccactcaccaccaacatggcgacgacgacggcggcggcgatggtggtggcaatgtcggtgctgctgctgggtggcggcgaggcggcggcgccgcggaagccggtggacgtggcgttcgagaagaactacgtgccgacgtgggcggaggaccacatccactacgtggacggcgggcgcgaggtgcagctctacctcgacaagtccaccggcaccggcttccagacccggggctcctacctcttcggccacttcagcatgcacatcaagctcgtcgccggcgactccgccggcaccgtcaccgccttctacctgtcgtcgcagaactcggagcacgacgagatcgacttcgagttcctggggaacaggacgggggagccgtacatcctgcagacgaacgtcttctccggcgggaagggggaccgggagcagaggatctacctctggttcgaccccaccaaggactaccactcctactccgtcctctggaacctctacatgatcgcgttcttcgtggacgacacgccgatcagggtgttcaagaacagcaaggacctgggcgtgcggtacccgttcaaccagccgatgaagctctactccagcctgtggaacgccgacgactgggccacccgcggcgggcgggagaagaccgactggtcgcgggcgccgttcgtcgcctcctaccggggcttccacgtcgatggctgcgaggcgtcggcggaggcccggtactgcgccacccagggcgcccggtggtgggaccagccggagttccgcgacctcgacgccgaccagtaccgccgcctcgcctgggtccgcaagacgcacaccatctacaactactgcgacgaccgcgaacgctaccccgccatgtcgcccgagtgccaccgcgaccgcgacgcctgagatctcatcgagatctgtgatcgatgcttgctggccgtccgatggatggatggatggatggg

SEQ ID NO: 21287 - DNA, 1522 bp, Oryza sativa
  ref <308>: DATABASE ACCESSION NUMBER: AK071575
  ref <309>: DATABASE ENTRY DATE: 2001-12-06
gatcctgcgtcccagtgcccaccactcatcacctcccccctctcatcctctcctcctcctccaatggccttctcctccaccgccgccgccgcctccaccgccttcgtctctgggcaccgccgacgcggcggcgcgtgccacctgctgtcctcctctttcctcatcgcgttcccgcgcgccgtcgcggcgaggaggtgcggcgaggcggccgcggcgccgaggagggtgggcgcggtgaccgtgcgcgcgcaggcggcggcgggggcggggaagaagagcgtgctgatcgtgaacacgaatggcggcgggcacgccgtgatcgggttctacctcgccaaggacctgctcgccgcgggccacgccgtcaccgtgctcaccgtcggcgacgagggctccgacaagatgaagaagccgcccttctcccgcttctcggagctgacgagtgccggggcgacgacggtgtggggcgacccggcggacgtcggcgcggcggtcggcggcggcgcctcgttcgacgtcgtcctcgacaacaacggcaaggacctcgacgccgtcaagccggtggtggactgggcgaaggcggccggcgtggcgcaattcctcttcgtcagcagcgccggcatctacacgcccagcgacgagccgccgcacgtcgaggggaacgcggtgaaggagagcgcggggcatgtgggcgtggagaagtacatcgcggagcagttcggcagctgggcgtcgttccggccgcagtacatgatcggctccggcaacaacaaggactgcgaggagtggttcttcgacaggattgtgagggggaggccggtgccgatcccggggtcggggatgcaggtgacgaacatatcgcacgtgcgcgacctggcgggcatggtggcgctcgccgtggagagccccggcgcggcggcggggaggatcttcaactgcgtctccgaccgcgccgtcaccttcaacggcctcgtcaagatgtgcgccgccgccgccggcgcccagccggagatcctccactacgaccccgccgccgtcggcgtcgacgccaagaaggccttccccttccgcaacatgcacttctacgcggagccgagggcggcgaaggaggtgcttggatggaggagctcgacgaacctgccggaggacctcaaggagaggttcgcggagtacgccagcagcggcagagggcagaaggagatgagcttcgacctcgacgacaagatcatcgccgccgcctaacaacacccatctcatctcacctcgtcatggtcaaatacaaatacaaagtgctcggggatctcttcttctcgtgatttattttcttctccctctgtttctttggttcctcttctcataccggaagcatagagaaatgcaaaactgaacaattatatatgtaaatgctaggaaaatgctgttacaaataagtgaataagatgagttttcgcttttcgtttttcatttttccatcacatatccaatatgagaatggaactttgcagagtcaatcagattcagc

SEQ ID NO: 21288 - DNA, 1128 bp, Oryza sativa
  ref <308>: DATABASE ACCESSION NUMBER: AK071576
  ref <309>: DATABASE ENTRY DATE: 2001-12-06
ggtgtagtcgccacctccccaccgtccctctcttccaagttcttccaagtttcagttcaccggtggagagatagcttcggcggaagacagggaaggaggtcaatctgccgcgactaatggagaatatggagaatgaatttcgtagggtcttcaaacatgtctctccaagtgttgtgttagtggaacaagtcggacggatcgactattactgtattggttcgattattttcagtgataaaaaaaaactttcatactcacccagtcctcaattacttcatctgctgcgaatctgtctgtccgtttctccgatggttttaaacagtcagcatccctcattttaaaacaagatgtacaagaaagtgcaagcggacaatgtgaattatgcatcttgatgactgattatcattccaattccaagacggtggagttctttgaaggtgatgttgatcattcatatgcggttgctatcgcccctgagtcaaaatattccgtacacaacatgcccggttttattatacataggtcacttgaagcagcaagcgatagctctgaaagtgtgtacaaaggttctgaggattatttcactttcgcatgccgatatggagacacaagtccgaaccttgtgagcagattaatcacaggtccagtttttaatctgaatgggcaagttttagggatcgttgttgatgatattgagtataaattctggcccaagaagcccaggaaggaagatggtagtcaagagattattcatgaagatcttttctatcgcgcaggatatttcttaaaggttgctatgcgtgttaacaaccttcagcaagacttgaggtcgatggtaaaggacaatgactggcagaatggtctgaagaaaatagctactgaaagaagagtgtaacagcaaaaaggagcatgattcctgagatgaacagtaatagtttttggtcgcgatccctaaactgtttctgctgtagtttagttgtctgctaagtactttggcttgaatcagtcatatttaatcgtactgtaagactttatttgtcgcaaagtgttggctctgcagactttatatgttttcattcgtaccgatcggttgtaattaatttatcagacttgaggtcttttgtttgg

SEQ ID NO: 21289 - DNA, 781 bp, Oryza sativa
  ref <308>: DATABASE ACCESSION NUMBER: AK071577
  ref <309>: DATABASE ENTRY DATE: 2001-12-06
gcttcggccttttctcgctccccttcctcctgcgcacgcgttctcccgatgcgccgccgcctcctgctcctcacgccaccgttctgtgccgccggccccgcaagggaccaccgcgccgccccgcctcggaaaccgcctgggcgccgccacctcctgccgccgtcacctgcgccgacttcgcgaggagccgccgcgtcgcctgccttgggaagccgccgcctgccacctgggagcacccgccgtcgaagtccggcgccggttcctcgccgggaaccgccgccgccgccgcaagctcctgcccgagctacgacgaacgccgcgccgagcaccacgccgctgcacgccgcctgcaatgacgcctccagccgcccgtgaactcgccgccccaaaccacgctgcccacgaaatcagagctccgccaccttgtgccccgccatcgccgtcgctcgctcgctcgctcatgagctgttgcttgttttgccgctgcgactcgccgttcctagcctcgccgccgacatatccactcacgagctcgcacccgccaccgtggtcgccatcgcctgttctcggccagggttaggattggagcagcatagagaacaagcgacgactacataacctagtatatatagtagtatttttctttcaactacttgcaagcgtgagcttcttcagttgacccaaattgaacaacatattatggaatttatcaggatgtacgatccttcattatttctacatcctccatttcaaaatgagttaacctattgttcagatttgc

SEQ ID NO: 21290 - DNA, 544 bp, Oryza sativa
  ref <308>: DATABASE ACCESSION NUMBER: AK071578
  ref <309>: DATABASE ENTRY DATE: 2001-12-06
gatattactcctctctctctctctcaaactcctgtcttatttcacttctctccgatctctttttcctcctgagtgaatggcagccggcgagggccgcgcacggtgggtggtagcaacgggcagttggcagaggagaggagcggcagcaacgggcgccccttcccccagccgtcaacgcgcaggggacggccctcccccgcccggtggtggaggcgaggagcggctgcggcgggtggcggggtggcaagccatcccccgtgtggatccggtggcggtggctcttccgtgcctggatctggcggcagcagcgacaggaggacgacgccaacgatggtggcggcagtgatgggaggatgaggaggatagcagtggcgatgatgagaggatttggattttttttttcttgatttttcttttcgcatgaggtcagcttaagtgcctaagtgcgaaaatctgatttttgcatacctttgggcgtttgcaggctacctgtccgcatgtaaaaatcgatttttagtagtgaattatctcacctgttgtaacg

SEQ ID NO: 21291 - DNA, 1943 bp, Oryza sativa
  ref <308>: DATABASE ACCESSION NUMBER: AK071579
  ref <309>: DATABASE ENTRY DATE: 2001-12-06
gaatcttgcaagccacaggtctatcttccttcccctaccttccttccccaaatccaacgcacgcgccgtggccccacccaaatccgatggcgagctgagtccccggcgtgcaaccacggcgccgacaaactcccgccccaccgctggaggcggcggcggaggccgtcgcgctgccggatgctgcggcggtggcgtcggcatggacgcggcgctgtgcgacgacctgctgcaggaggtgttccgcctgctgccgcgcgcctccgcgccggctgtgtccctcgtctcccgccgctggtacgccctcctccgcgcgtcgattgcctccctgaccctccgcctgccggtctcctccgacgcctcggtgttggcgccgctctctgcgctgctgtctcggttcccctatctctccgccctggcggtggtctgcacagccgcaaccgcccaggtcgcggacgcgatgctgctcgtggtcgcgtcttcgccgtcggccgcgcagctctccgggctgaggttcctgcctgattcggctatctcgcctgcggcgctggttgctgcctgcccagccttctacggcctcacctcgcttcacctgaccgccctccgtcccctctctttctgctggattgcgttcttgccccgcctcaaatccttctacctcgtcaactccgctgccgccgccgccgttgactacgccggatggagctctgatgatgtcgacggcaacggtgagaccattggctctttgcctctagagaggctgtctctgtgcggcatctgctccggcgaccgagggatcgggtggttgtggcgacgatgtgggaacctccagtggcttcagctgcgcgcctgtgacggcactggggacgggccctcgtcgcagttcttcgcgggatgccttgctggcctgctcgcgctagagctccgtgcttgtcgctccgtctctgaccacgtcctcctcctcgctgctgatcgctgccgtgtgctcaagtcactcctggtgtacgatggcggcagccgggaggccctccaccggttcatccaccagcgtggcgcagcgttgcacacgttagacctccgcctccctctcgacttgcacaatgaccacctcctagcgatcggtgccgaggccgagcaaggtcagcaaagccagaatggcgggcatagcctcgctgcgctccggcttcagagctgtgtgctcatcactggcgacggactccggtccctcgcacgcacaaccactggagctggtatcgaagagcttgccttggtgaactgcgatgtggtggaacgggagcctggactgcttaccttcctcagccagagcatgcgccgccttcgccgtcttgatttgtcatacaacgagactctcagtgacaaggaggttggtgccatgctatcgtcctgccataatctaattgatatcaggctcaggggttgcaggtgcctcactcgaggatctttggtatcgttgctcagatactgtggccggtcagtggaggtcatcgacatcactcgctgccttagcattgcagcagccgatgttgaattatttgcacaggaagccactcgattaattcaggtaatcatcgaggacagcttgttgtcagaggaattgcgggccattgcacataagaaaggcataagggttggcccattgcgttgcgattgataattgtgataaaaggtaatcttcttcataatgcccctcatagatgcttgaatctgagcaatcccaactccctacttgaatgtgggaataaggtttcacaacgacatctcactacttgtgtatatgagtttatatgttcaagtatgtatatattattagggaacctattattaattgcaaacttgtctggcaatgtaaattcagcaccaagaattgtgctgttttgtatgctcctagaaataacacgtgaaataatacagaaaacttcaaatcc

SEQ ID NO: 21292 - DNA, 1514 bp, Oryza sativa
  ref <308>: DATABASE ACCESSION NUMBER: AK071580
  ref <309>: DATABASE ENTRY DATE: 2001-12-06
gagtcagaagctaaggaagaaaaagtatagacacagtgatacaatggcctgcatcaacacattccagagctgctccgtcctcaagggagcaaagatcaatggtaccaagatcggaggagggaggggatcaccaaccttccggtgccgggcatcgacgttcatggacgggagcctccggctagagatcgacgagaaccctgaagccatcatctccggtgagtggccggagaacttctccctgctcagctacgacgatctccgcgcctacctccagtcacaggaggccgctgctcaagccgacaaccagcgtgtggcgctcctgagtgaagccatgtcggcgcctgtgctggtagccactgccgagcagacgctggaggaggttgagtgccactttgagacggtctcaggtctcccagttatagatgccagcctcagatgtgttggagtgatcgtcaagagtgaccgggccagggcttctcatgggtcaaagacgaagattgcagaagtgatgacctctccagccatcactctaccatctgacaaaacagtaatggatgcggcagctctgatgctaaagaagaagatccacagattaccaattgtaaatcaggacagacaagtgataggtatagttacccgtgctgacgttcttcgcgagttggaagccctgctggaggtttagacgtgcagtggtccatatgcttcggccttgttgtatatatgtaaatatatgccatggtgtttttgaatagcaggcatctctaatctgtaagagtgttgtagcgcgaatcaccaagataagcctgagaaaataaccggagagcttttctttgtacaataagcacactatgagacctccagtgttgtatgcctgtgaaaaaatttacgttagtgaatggtctccacaacaacatagatgaatgaatatgcctagttatctttcagaacaaaaccaccaaggtgcttcaaagatggatataaaagtgaccttattgaagtttcattgtcagaggatgcatagaacaataggacttaacagaagaaaataggaatgccgatgcaagagatatgcctattcggctattcctttgccacttctgagcactaacaggaaagatggaaatgtgttatacccagaaccaccacaggtcaatcaagatagatggaaaaaaaaaaatcaacaaacaccaatatcgaatgtgacaaatctttagataaaaaatgaacctaatattataagctgaaggaaccgtagctatttcaatctcaggaagacccaaggagaaagaacatactcaatctgtatgtcgtggcaatgctgaggctgtcataactcagattcgagttgctgagacttgcccttgttgatcttctcctgaagcaatactagcagcagaaacgggcattgatgtagtagtactcatgttttctggtgaatcagaaatgactttcatctctaggtttgggattacaggtggctttgtcctccgagtaacagtcattttcaacccctc

SEQ ID NO: 21293 - DNA, 822 bp, Oryza sativa
  ref <308>: DATABASE ACCESSION NUMBER: AK071581
  ref <309>: DATABASE ENTRY DATE: 2001-12-06
gagaggaatagaaaagcataggaaataaagtaaagggaggagaggacaaggaactccttccggctccgatcccacccactccggcggcctctcgctcggcctcgccctcgcctccgatcgattcgcccctcgtcttcctcctcccggatcccccaagccaagcccggggagccgggccgccgccaacgcgcgcggcggacacgaggaagggaaacaggcgacgacgagaagagaggatcagctgggggtgatgaattgttacgctgcatggacggagcaagcgagaagcctccccacaaggactattacaaagttctggaggttgattacgatgcatccgatgacaccatcaaattgagttatagaagattagctttgatgtggcatccagacaagcataagggggataatgatgtcacagctaaatttcaggagatcaatgaagcctacacagttctaagtgatccagctaagcgccttgaatacgacctttccggatgttatgagttaaatcgatatactttgcgtgagtaccttacaaggtttaagggtatgatacttacctgcaatggtcttggcatagaccattcttcaaaatgggcccggcatttgagggaattggagccccattgatctataggtacatcttatttgtccatgagcttcttcagtactttctttgaggccaattggatgcttagctgtttcttttaacacaactatggatacggcagggcatctctctgttctttgtaacacaacgatggattctgtcgtatactaatgtatttttgctgcaagaaatgcatgcacgcagtttcc

SEQ ID NO: 21294 - DNA, 2115 bp, Oryza sativa
  ref <308>: DATABASE ACCESSION NUMBER: AK071582
  ref <309>: DATABASE ENTRY DATE: 2001-12-06
ggttgcccttttgctcctgttgtcttctccgctcctgtcgtctcctctcctcccccccaaatccccctcctttttcttggtgctgctgctgctgcacgaagccacgagcgcctcgccacctcgggatcgcctccaagatccgattttgatctccccgccgccgacgaattcgtcgagacccgccctcgccgtacctgcccaacggtgctcgatttggttgtagccttctggttctggattgcaggaatataacaaaacttaagcactgagcagcagtatgccttggacccctttgtactcgacttattacagcagccgaaagtctgttcaccttgctgtgtttttccgtgtgattgtgtgaggcggtcacatttacaggagaatccttttcctttgtggttctttgttcttgacgacattgggtgtgtaaaaattgagaatgtatgttaaggttgaacttaagagattccgcattgtgaaggaggtgggaacaatagtaatgaatgttaggatctttgcttattaccagttgatgcaagtgtgccaggctgagtacttccgtcaattgcttaagcctgtcacgtagtccaaatacaggagtcgagattagtcactttatctgctatttatctttcgtctggtataaagtcgcaacaacaaaagcagtgcattcatgatggctaccttgtggtagggtgtttagtctcttgttgttgcgagtcgcaaacatattgtagaattctcgttgtttttgggtagtgtagctactacatcagatcaggtagaggtctgtacttaagtgcgttctgtccagtatcagccattgactcatgcagagggatccaacagcattcactggaaacccttcctttgcttatggacatgaagcagatggttatatcgcaaatggacccttgggtggtcagtgcaactacagggttcctgtttcacctgcctttggtgccccttcaggcatgaccagtcctcaactccgaacctcactcggtggatttgagtttcagccttccaaggtatgccccagaaacttcatcatctttgatcaaactgatgacaaagggcgcatcatgtgtcatcctgcattggtgagcaagctaaacccttcagccaccaatgctttcccttcctatcccgagccaatttgcagaagttccggccaagataacggaaacctggaagaagtttcctcatctttcaaggaggatacaagagagattgatgcactgctaagctctgatgaagaaagcgatgaagatgatgtcaagagtactgggcgtactccggactgcttcgagagtgattcccttgattcatcttcaccaccaaggtctaggaaaatgcatcattcttctagccagagttcagtcttccatggatccatggacactgttactcatgagaggatgagaaatatggtcacagttcttaggggaataatccctggtggagaccaattggatacagcctctgtcattgaagaagctgttagatacctgaagtttctcaagatggaggcgaagaaacttggcgtggaggtttcggataactagaactggcaactggtacagtggcgatactaaagctcacacataaataaaatctgaaggcatcaatgtgtgtatatatggtctttggtaaggcccttatcatcattgttacttgattgactttgtgtgggtgtggaaggtaaggcaggcagccagcttttgcttctttctgcaggcctcaaaagaggtattgtttgtgggattctgatgcttgatgtctggtagcatggtgttgctgcgctgtgagctttccctccctcatcatggtgtggcactatggttagatcgtcagacgaagttctggatgatgcattatgttttcaggcttacctttgccttttgtgacttaagcacctcagctctacctatcctatggtcagatcaccgtgctttgctctttttcaagctctgcttatatttgttgcactacttaaataatgtacatacttggcttgttaaattgtagtattgtgtaccgaacaagatcatgtcattgtgaactaaattacgatatgaaataatgtactttggatttatcatactatttgtc

SEQ ID NO: 21295 - DNA, 1865 bp, Oryza sativa
  ref <308>: DATABASE ACCESSION NUMBER: AK071583
  ref <309>: DATABASE ENTRY DATE: 2001-12-06
gacgctaccctcgatcgagctctctctgcggcaaacccctccctccttcccacccaagggggaaagctccgccgccatcgtcgtgctgctccccgttcccgcggatccatccgcggctctgggttgatctacctcgccggtgacgtacccttatccttagcctacactgctttgcttgttccgagattttatcatactgttaaacttttgttttcttacacaaatcctttgtctgggaaatgtaaccaaccaatgaatggaatccccaatctgtgcagtttcctgctgtttcctgctgattcatttgctgttttggtagtgtgcttatatttcatcaaaaaaaaaattctagaattttgcgggtgttcaactgaatcccatgccccttgttaggtcctctcctgatctgatctgggagaacacttcggattgcaattccctttacaaccaatggcatgtctgaagtgggacaacatttcttttctttattttttttaagaaaaaaaagtggaaccatatcaattgttcactatcaatgcagtgataatggtgaagcaaggcatggaatgattaatttgaactattagatggatcttggtctgctaacactgacgtaattaaaatcagaaatgaagttaggaaggtcagctgtttttttccttacctgactagctgacatttccatgattgcagtcatgacaccatcagttttgcacgctgtcagtaattctagaacaaaactgggctgaatggctgatgacctatatatgagtccgtttgctgaccagttcttgatgtattgcacttgacaataaattcatctgctgacccattcaagttgtattgcacttgacaacaaacaaatttaaaacaaaggttgatgcctttttggtagagaaattgactgaatactgatgtggttagtgcttctttgctcatgtcatgttctgaattgaggtctaggtgagtgcatcttttcaagccacttttgactaaatatgcattgcttgcatcatttgtcatgtgcagttgaaattcctgcagacataggatagcagctgtatgaaaacatatatattctctagactgttatttagatttgtacagcctagattatatatatatttttaaatgcttgtgccttttgtcaagaaaaaggcccaaatagactagtatcgaatctagttgttggaaatatttgaaggttgaactgcaatctgtgccaagcatgtctgtcctccatcctcattcaattgtgctcatacatggtattttgcaagatcattgtgctttataaaggcgtgtacttgtttggaaattcggtattaataatgggaacggtattgtttttatcatagactaatcagaataatatgaactcttcttgagctgaaaataaacatgcaatgtatgcatcccctgtttcctcttttcctctgattgaatgcttaacaagcttacagtgacaaacagtgagtcggcataaattttggtacagttgagaagttcttgtgttggacatatccctcctcccctagaaataagaagctggtattagtctccttatttattttatgtacttctgctttcttctattgcataaaggaagggaacaataaacatctgccttttattctgtttctttttctgagaaacttttaccaccctcatgggccatcaaatacattatcttccttttttgtgtatgttagatggttagcgcatactgtgtgctattaaatgattctttgcaccatgagcgtggacactgaaattgaagtcttctctgcagcttaagttcactatgtctggaatgccatctgatgaggcaactggtcaagtgaggctcgaaggagatgtttctg

SEQ ID NO: 21296 - DNA, 1761 bp, Oryza sativa
  ref <308>: DATABASE ACCESSION NUMBER: AK099183
  ref <309>: DATABASE ENTRY DATE: 2002-08-28
ggcctcgcctcttctcgcggccaacgagagagggagagggagagctaggaccaccgccactgcctcgggaagtaggtggctcccctgctttccctcctctcctccgccgtcgccgaggcagccagccaagtcgtcccagcaggtggtaggctactagtccgggtggccggcagtgagcaggaggaatcatctctggcgttcttgtctccgaggaactttgattctttctgggaggggatttggtgtgctgctgctgctccagatgcttcccaccagcaggaacaggccccagcagaggcctgccagatcttggtatttcatctcagacatggacttctccgatccgaagcgcaagccgcggtacctcagtaagatcctcatggtggcgctcctcaccgccatgtgcgtcgtcatgctcacacagccgccctgccataggaggactcccagtgtgttctccatccatgaacccggagtcacgcatgttctagtgacgggcggcgctggatatatcggttcgcacgctgcgcttcggctgctgaaagattccttcagagtcaccatagtagataatctttcaagaggaaatatgggggcaatcaaggttcttcagaacttgttttcagagcctgggcggttgcagttcatctatgctgatttaggcgatccaaaagctgttaatagaatatttgcagaaaatgcttttgatgctgtcatgcactttgctgctgtcgcttatgttggtgagagcacacttgagcctttgaggtactatcataacatcacctcaaacactttagttgtgctagaggctatggcagcacacaatgtgagaaccctgatctactctagcacatgtgccacctatggagaacccgagaagatgcctatcaccgaaggaactccccagtttccgatcaacccatatggtaaagccaagaagatggcagaggacatcatcttggatttttccaaatccaagaaggcagacatggctgtgatgattctaagatacttcaacgtcattggttctgaccctgaaggaaggcttggcgaggctccaaaacctgaattacgggagcatggccgtatatctggtgcatgctttgatgctgcactggggataattcctggtttgaaggttaaaggtactgactatgaaacacctgacggtacttgtgtaagagattacatcgatgtcactgacctcgttgacgcccatgtgaaggcgctcaacaaggcggaaaggggcaaagttggcatatacaatgttggcacaggcaaaggtaggtcagtgaaagaatttgtcgaagcttgcaagaaggcaacaggagttgacatcaaggtcgactacttccctcgtcgacccggtgactatgccgaagtgtacagcgatcccgcaaagaccaacagcgagctgaactggactgctcaacataccgatctcctggagagcctcagggttgcctggacatggcagaagaagcaccggagcggctacggaccccctcaggccatggttttgtgaagagaatttaccctgtagcatctattggctgaaaacttaaaaacttaggtggatatattcttaggaatgttcatcatcaagggctttcaattgctcactcacagaagttatatgtaatatagcgcttatggtcattcgttcaattcttgagattcatattatgggaggattttagaagattgtaatattgttgatgtattcagtatacaataaaaatccaacaagctatcctc

SEQ ID NO: 21297 - DNA, 1797 bp, Oryza sativa
  ref <308>: DATABASE ACCESSION NUMBER: AK071584
  ref <309>: DATABASE ENTRY DATE: 2001-12-06
gatctcccatctcttcctcctcttctcttcattctcttcctgttcctcttcttcctcctcccatctcttcgtcttcctcctctggatccgccccctcccctctcctccccacctctcagacggtcgggccacggcggccaggcggcgcggaggcggcctcgcgcggcggcctggcggcagcgaatctgggaggggaggcggctggctgtcctcttctcttcattctcatcctgagcctgctggagctcggcgtcagcgcgacggtgcacctgctcttcgggctctacgtcttcagcacggccgtcgcggcggacatctcgcaggcggcggcggcctcggggtgcctgctgctgcgccgcccggcggcgccggggctcgtcaacgtcgccgcggccggggaggaggaggagcggaggggcgccgcgcccgtcgtgctcgacggctcgcctccgcccatcgtcctcgtccacggcatcttcggcttcgggaaagggaggctcggcgggctctcctacttcgccggcgccgagaagaaggacgaccgcgtgctcgtgccggatttggggtccctcaccagcatccatgacagggcgcgcgagctgttctactacctcaaaggagggcaggtggattatggcgaggagcacagcaaggttttcgggcacacgcggttcgggaggacgtatgacacaggacattacccggtctgggacgagcaaaacccggtgcactttgtcgggcactcggccggcgtgcaggttgtgagggtgctgcatcagatgcttgccgataaggctttccctggacatgatacttctgaagactgggttcttagccttacttccttgtcgggtgcgcttaatggaaccactagaacttactatgatggcatgctggctgaagacggaagatccatgaaatcaatctgtcttcttcagctctgccggattggagttatcgtctatgattggctagacattccttggctgaagaattactacaattttggttttgaccactttgagatgtcatggaggaaagtgggcctctcaggtctaattgatctgttgctggggcacactggcccatttgcctcaggagattggattctgcctgatcttacgattcaaggatctctaacacttaactctacattgaggaccttcccaaatacattctacttcagttatgctacgaagagaacaagaaagctttttggaattacagtgccttcaagcgtccttggaattcaccccatgctcttcctccgagtcttccaaatgtgtatgtggaggcaccctcaaaatgcacctctaccttacaaaggatacagggatgaagattgggaagataatgatggggctttgaacacaatctccatgacgcaccctcgcattcctacagagcatccaaaccgtttggtagtggatgattctgattgccatcctttgcagcctgggatatggtattacaagataattgaggctgatcacattcttttcattgtaaatcgtgaaagagccggagtgcagtttgatttgctgtatgatggcattttccaacggtgcagaaagcacgcatttaggaggagcccccctactgtaccaaatgaatcgagtcaaagtcaatagcagactacaccaaaaatgaaatctatctagaaagtagaatggaaggaaaaaaaggaatcacgacggtttttctgcttctctttcgcccccggcaaccatgtagatgtaaacaacattgtaaactgtaaattacattattcatttgactatgtgaggagcattgcat

SEQ ID NO: 21298 - DNA, 1356 bp, Oryza sativa
  ref <308>: DATABASE ACCESSION NUMBER: AK071585
  ref <309>: DATABASE ENTRY DATE: 2001-12-06
gacacactgactccatacgcacaaggcaagaaaaaaagaagaaacaaagagagaagaattccaaggaccaagaaatcgaggcaatggctaagcagctcaggcgggtgcgcacgctgggccggggggcgtccggcgccgtggtgtggctcgcgtccgacgacgactcaggggagctcatggccgtcaagtcggcctccgccggcggcgccgcggcgcagctgcggcgagaggggcgtgtcctgtccgggctctgctcgccgcacatcgtcccctgcctcggatcgcgcgccgccgcgggcggcgagtaccagctgttcctcgagttcgcgcccggcgggtcgctcgccgacgaggccgccaggaacgggggctgcctcccggagccggccatccgggcgtacgccgctgacgtggcgagggggctggcgtacctccacgggaattcgctggtgcacggcgacgtcaaggcgaggaacgtcgtgatcgggagcgacggccgggcgaggctcacggacttcgggtgcgcgagggtcatggactcggcggggccgatcggcggcacgccggcgttcatggcgccggaggtggcgcgcggggaggagcaggggccggcggccgatgtctgggccctcggctgcaccatcatcgagatggccaccggccgcgcgccgtggagcgacatggacgacatccttgccgcagtccaccggatcgggtacacgaacgccgtgccggaggttcccgggtggctgtcagcggaggccaaggacttcctggatggctgcttcgagaggaacgcgtccgacaggtcaacggcggcgcagctcctggaacacccattcgttgcctccgccgcggccctcgaccgctggccggagccggcgaagcaagaacgtgcatcccccaagagcacgctgcatgacgcgttctgggactcagacaccgacgacgaggacgacgagatgccaaccggcgcggcggagaggatcggtgcattggcgtgcgccgcctcggccttgccggactgggactccgacgaaggatggatcgaggtgcacgacgaggtctccttcgccgccgtcacgccgccggccagcgacgcggactacttcgtctgggcagaactgtctgacccagagatggagcagttcgccgtcgccgcggatggcgtcaaccatgtcccgcgcaatgaagcagaagcgatcgaatcctccattaggcagggcagttacctgcacgtacatcttggcagtggtaaaaatgaaatttttcacccgttcgatactgacgggactgaatcagtgagattcgattgtgtttgtaacaggaacagagtaataaaattaaattccgccc

SEQ ID NO: 21299 - DNA, 1818 bp, Oryza sativa
  ref <308>: DATABASE ACCESSION NUMBER: AK071586
  ref <309>: DATABASE ENTRY DATE: 2001-12-06
ggtataagccggcgcctcgcgttttcttcgtccgtccaccgacccagcagtgcacctcccgttcgcctcgctcgcgagctcgcgttactttacaccgccgccgccgagctctccagactccggaggaggaagcgatcgttacacgtacgcctcgtcaagcagaagcagaacatctgaagaatggctgacgaggatattcaacctattgtgtgcgacaatggcactggaatggtcaaggcaggttttgctggtgatgatgcaccaagggccgtcttccctagcattgtagggagaccacgtcacaccggtgtcatggttgggatgggccaaaaggatgcctatgtgggtgatgaagctcaggcaaaaaggggtatcctgactctaaagtacccaattgaacatggaattgtcaataactgggatgacatggagaaaatatggcaccacaccttctacaatgagcttcgtgttgcacctgaagatcaccctgtattactaactgaagcccctctcaatcccaaagccaacagagagaagatgacacagatcatgtttgagaccttcaattgcccagcaatgtatgtcgcaatccaggctgttctatccttgtatgctagcggtcgaacaactggtatcgtgcttgactctggtgatggtgtgagccacactgttccaatatatgaaggatatacgcttcctcatgctatcctccggttggatcttgctggccgagacctcactgaccatctcatgaagattctcacagagagagggtattccctcacaacaagcgctgagcgggaaattgtcagagacataaaggagaagctcgcttatgtcgcccttgattatgagcaggagctggaaacttctaggagcagctcctctgttgagaaaagctatgagatgcctgatggccaagtaattaccattgggtcagaaaggttcaggtgccctgaggttctgttccagccatctcttgttggtatggaatctcctggcatacatgaagctacatacaactccatcatgaagtgtgatgtagatataaggaaggacctgtatggcaatgttgtcctaagtggagggtctaccatgtttcctggaattgctgatcgtatgagcaaggagatcacttcccttgctcctagcagtatgaaggttaaagtgattgcaccaccagaaagaaaatacagcgtctggattggtggttctattttggcttctcttagcactttccagcagatgtggatctccaagggcgagtatgatgaatctggtcctggcattgtccatatgaagtgcttctgagcttcttgccaagtttgtagagcggtatttcaagatgtcgagaaatctcagttggtttatgtatacaaggagacctgcttttgcagataaatatatacttgtactctgatagttgagatatgcttttagcgttgggcatggcaaaccaggattcctcagaacgttgagactatcttaccatgaagagaaagaggggcccaggaaaagaaacaaaaaaaacacctgatgacctgaagatacataaacttgagcagtctatgtcgtaaaacctgtttgttcttttggtgtggaattacctcggttgtttacctgctgtatgaaataatgaagcaaaccatatatattcgcatgcgctagtacatcaatgtagttctgtttacgtctattttcatttggcttcgggctctcagctgatgcctgatgcctgatgcctgtggcctgcgctccagtgctccctcacaacctgatgcaatctcaccatggaaaggggaacaaggactatttagc

SEQ ID NO: 21300 - DNA, 778 bp, Oryza sativa
  ref <308>: DATABASE ACCESSION NUMBER: AK071587
  ref <309>: DATABASE ENTRY DATE: 2001-12-06
gacgaagtacgatccaaacaccagcggcgaaggcgacgaagacgagggcaaaaacaccagaaggggaaaacttttgctctcccggcgatctcgagatctctcaagatggtggtgctgcaaccagatccgtttctgagcgagttgacgagcatgtacgagcggagcacggagaagggatctgtctgggtcaccatgaagcgatcatcgatgaagtgccaggcaaggttgaagaagatggcggcgaagggagaggcagtggagtaccggtgcctcgtccgtgccaccgatggcaagaagaacatctgcaccgcgctctctgcaaaggagtacctgaagttccaagcttcatatgcctcagttcttaaagcccatatgcacgctttgaagaagagggagaggaaagacaagaagaaggctgcagaggttgagaagataccagagaaggcaccgaagaagcagaagaaagcaccgtcttcaaagaaatctgcagggtccaagtcgtaagttactgaaagaatttgctaagcccttttttggccacaggcctgagtaagatgggtgtagtcaagacattatcctccattttactcttattcatgtctgcgagatgaagcatgtgaatacctttatagagctgtgccgtcgacattagcaatttttgaagcagctttggttgtctagatgtaagccgccctggaattttctatttctatcatagaaaggcatctcttaaactgtgcctgatctgatcgtcaagttagtgcaactttcaattgac

SEQ ID NO: 21301 - DNA, 1793 bp, Oryza sativa
  ref <308>: DATABASE ACCESSION NUMBER: AK071588
  ref <309>: DATABASE ENTRY DATE: 2001-12-06
gaatcccctcggcgtcgactccccgcgactcgcgacttggcccgccgccgatctccatcccgcggccagatcagggagcgccgccgtcccgctgctcccatccgatctccatcccatcccatcccgatcgttgatttcaggtgggaatgacggagcaggagcaccgtgcgtatgcacgcgtcgggctcctcggcaatccgagcgacatgtatggcggcaagacgctctccttcaccatttccaacttctgggccactgtccatctagctccatccgacgatggtggcccccttgtgatccggccgcacccacgacacgatctcgtcgattttgcgtccctcccacaacttgtgactcgcttgcaaaatgaaggatataatgggggtgttcggctgctcatggccatctgtaaagttttctatagccactgtatccaacatggtatcgcactaaaggagcaaaatttcaccttatcatatgatactaattttcctcggcaggctgggctttctggttcaagcgctattatttgtgccgctctaagctgccttcttgatttttacaacgtcagacgtcctaagcgatatcctccagtacccgtgcttccccgcgaatgccctccagcgcgagcgcggcgtcatcctccgcgagatggaggaggtgcaaggaatgatggacgaggtgatatttgatcacttgcatgccgcagcattccaaggtcatccgctgggtgacacaatattaggtcctgtagagaatattaaatcgatctctaagaaagatttggagcaatacattacaactcactatacctgtcctcgaatggttgtgtctgctgctggagctgtcaatcatgatgaggttgttgatcaagtgagagaattttttacaggattctctactgacccaactactgtagatcaacttgttgaagcaaatccagctatttttactggatctgaggtccgtgtggagcaaccagagatgcctctaacgcactttgcaattgctttcaagggttcatcatgggctaaccctagctcaattcctcttatggtgatccaaagcatattgggaacttggaataggagcattggggttgggaactgctcagggtctgctttagctcgtggtatcagcaacggtaatttagctgagagcatgattgcattcaacactaactaccgagatacaggattgtttggcatctgcactattgctcagccggattccctatatgacctatcacagttaataatgcaagaatttagaagacttgcatttgaagtgtcggaaacagaggttgctcgtgctcgtaatcagttgaaatctgctcttttacttcacattgacggatccactgctgtttctgaaaataacggccgtcagatgctaacgtatgggcgagtaatgccattcttagagctttttgctcgcattgatgctgttgaccgtgatacagtaatggaaacagctaaggatttcataattgacaaggatatcgccctagctgcagtgggaccgctcacgaatttgccggagcttagttggtttcgctcacatacatactcggatgatgaatttagttcaagaacgttcttgcaggatgcacagaataattgaagctccggtcctggtagtgttgttgtagtaactcaagctcacccaagaaatattcgatcgtaggaagcatcaagcattttagttatttgttagatgttctctatttatttgcaaataactcccttcgttcggattgtaaactccttccgttcaccttttactttcttagc

SEQ ID NO: 21302 - DNA, 939 bp, Oryza sativa
  ref <308>: DATABASE ACCESSION NUMBER: AK071589
  ref <309>: DATABASE ENTRY DATE: 2001-12-06
gcggctcacacatcgatcacagaaagctaagctaaagtgctaaactaagcacgagaaaatctaatcaaccaagcttagattagatcattagctatatatagctaggcgatttaatcatccacgagctagcttattagctaagcagtagcagcagcagaagatcgaagatggtgaaggagttcgtgcaggacgaggagaagcagcggctgctgctggacgagcacaccgagaagcacttcaccgccggcgaggtggtccacggagatcgcggacatactgtcgcagtatgggctgggcccagaggagtatgggcccgttgttaactccctccgcagcaaccccaaggcctggctcgaattcatgatgaagtttgagttgggactggagaagccggaaccaaggagggcgctgatgagcgcgggaacgatcgcgctggcttatgtggtgggtgggctggtgccactcctaccctacatgtttgtgccgacggccgaccgagccatggccacctcggtcgtcgtcacgctcgccgcacttctcttcttcggctatgtcaagggccggtttactggcaaccggcccttcatcagcgccttccagaccgctgttatcggcgctctcgcctccgccgccgccttcggcatggccaaggccgtgcagtccatctaagtactgtagccggagctccggctgcaggcatccaagtaaatgtaattaatttagcagatccaataagtattgcagaaatgtatgtataagtatttatgtacgtttgctgcgtgcttgtagtgtattagatgttctggaggtgtatccgtagttagccctaagtgtaccatgtacacgagtgtaatcactcattttatatcgtcttctattttggctcccttttttatattcggttgggattaattaataatgtattgtcgatttgtaagc

SEQ ID NO: 21303 - DNA, 1219 bp, Oryza sativa
  ref <308>: DATABASE ACCESSION NUMBER: AK071590
  ref <309>: DATABASE ENTRY DATE: 2001-12-06
gacctgcaaacagtgcaactactattgagagccacacacaactgtagcttcgccatgggagcaagctggctgctcctccatggcgcggcgctgatgatactgatggcggcggcggccgccggtgagacgacggcgacggcgtcggtcgtcgtcggcgcggccaagtgcgccggctgcggcaggaagaacatggacgccgagaccgctttcaagggacttaaggtggcgatcaagtgcaagaacggcagcagcgaggagtacgagagcaaggccgtcggcgagctcgacggcgcgggcgcgttcgccgtgccgctcgccgccgacctccgcggcgccgactgcgtcgcgcagctgcacagcgcggcgaccgacgcgccgtgccccggccaggagccatccaagatcgagccgctgtcgtcggagggcgagacgggcaccttcgtcgccgtcgccggcaagacgcacctcccgtcgtcgacgtcgtcctcgccggagtgctcgtcggtggccatctgcttcccctgccacaggcgccatcgcatgttccacaggaagcccatgccggagtaccagccgcctccctcgccggtgtacggcacgccggcgccgggatgctcatgctcccctcccagcacgccgccgggatacggccagccggcgccggaatgcccccctgccgacccgggttacggccagccagcgccggagtgccctcctcctcccacgccggcaccggaatgcggccagccggcgccggaatatcctccttccacgccggcatacggaacgccggcgccggagtgcccaccatccacgccggaatacggaacgccggcgacggcatgcccacctcccacggcgccgggatacggatcgccgtcgcctttctggccccctgtctcgccggcgtacggcacgccatcgccgactccgatctaccgtcccccggggagccactgatcgatcgatcgagttcactgctcgatctccatttccaccaaataagttgatgatgtagctactgtatctcgcaactactggcgtgcatttcatttatcggagaaattaatggatgcaaagccacgcgtgcgtgttcatggcttcttgcgtgtttacggcatttgggaatgtgctttgcatgcgctgaattgatgttgattttaacaatgcagtacgtgataataattaacattcaagtatgcaagtctaattactggcg

SEQ ID NO: 21304 - DNA, 1126 bp, Oryza sativa
  ref <308>: DATABASE ACCESSION NUMBER: AK071591
  ref <309>: DATABASE ENTRY DATE: 2001-12-06
ggccgccgcctcctcctcccaaaccccacaagcgaatcctagggtttctcgcctcgccgccgcatcgccgccgggaagtctccgccgccgccgcgatgttggagctgaggcttgtgcaggggagcctgctgaagaaggtgctggaggcgatccgggagctggtgacggacgccaacttcgactgctcggggacggggttctcgctgcaggccatggattccagccacgtcgccctcgtcgcgctgctcctccgctccgaggggttcgagcactaccgctgcgaccgcaacctctccatggggatgaacctcaacaacatggccaagatgctccgctgcgcgggcaacgacgacatcatcaccatcaaggccgacgatggctccgacaccgtcaccttcatgttcgagtcgcccaaccaagataagattgcggatttcgagatgaagctgatggacatcgacagcgagcacctcggcatccctgactccgagtaccaggccatcgtccgcatgccgtcctctgagttttccaggatctgcaaggatctgagcagcatcggagacactgttatcatctcggtgaccaaggagggtgttaagttctcgaccgctggagatattggaactgccaacattgtctgcaggcagaacaagactgttgacaagccagaagatgctacaatcatagagatgcaggaaccggtgtcactaacctttgccctgaggtacatgaactccttcaccaaggcaagcccgctctctgaacaagttacaatcagcctttcatctgagctgccagtggtggttgagtataagattgcagagatgggctacattagattttatctggcgccaaagattgaagaagatgaggaaatgaagtcgtgattgtcgcataaggatatgacaaaataccccctagtcttcagaccatcatcctttgcttaacaattgtttgtaagcaaaatgatgttatgcttatcatcgcttacgacggaatgctttttacctttgtatctgtgacttctgtaaatccttggatttacagtgatgaatgttaggtttagtagatttgtgagtttatgactgcattgctgtagcatgattgtgctgctgtttgtttgttc

SEQ ID NO: 21305 - DNA, 1890 bp, Oryza sativa
  ref <308>: DATABASE ACCESSION NUMBER: AK071592
  ref <309>: DATABASE ENTRY DATE: 2001-12-06
gatctcttcaccattctcaaccccccccccccccatctccacctcctcctcctccgccgccgccgaacccgatggcctccccggcgccggcgccgcccgcggcctcctcctccgcggcggggtccgccccgccgccgcgcatcggcctcgcggggctcgccaccatgggccagaacctcgccctcaacatcgccgagaagggcttcccgatctccgtctacaaccgcaccgccgccaaggtcgacgccaccgtgtcccgcgccgaggccgagggcgcgctcccggtgctcggccaccgcgacccgcggggcttcgtcctctccctctccaggccccgcaccgtcgtgctgctcgtccaggccgggcgcgccgtcgacgccaccatcgacgcgctcgtcccctacctcgacgccggggacgccatcgtcgacggcgggaacgagtggtaccagaacacggagcggcggatcgaggaggccgccgcgagggggatactctacctcgggatgggggtctccggcggcgaggagggcgcgcggaacgggccctcgctgatgccggggggccacatcgacgcctacaacaacatcagggacatcctcgagaaggccgccgcgcagacggaggatggggcgtgcgtcaccttcgtcggccccggcggcgcgggcaacttcgttaagatggtgcacaacgggatcgagtacggcgacatgcagctcatcgccgaggcctacgacgtgctccgccgcgtcggcggcctgtccaactcggagatcgctgacgtcttcgcggagtggaaccggggggaattggagagtttcttggttgagattactgccgatatattcacggtggccgacccgcttgatggcagcggcggcggtgggctggtggacaagattcttgacaagacggggatgaagggaaccgggaagtggacggtgcagcaggcagcagagcttgcgattgctgcgcccacgattgcagcatcactggatgggaggtacttgtctgggttgaaggacgagcgtgtggcggccgcaggggttctagaggcggaggggatgccatcagggctactcgagacgattaatgttgataagaagatgctagttgacagggtgaggcaagctctgtatgcgtcaaagatttgcagctacgcgcaggggatgaaccttctgcgagcaaagagtgtggagaaggggtggaatcttaacctcgcagagcttgcaaggatttggaagggcgggtgcattatccgggcgaagtttcttgataggatcaagaaggcgtatgacaggaaccctgagctggccaatctgatcgtggacagggagtttgcaagggagatggttcagcggcagaatgcatggcggtgggttgtggctcgtgctgtggaggctgggattagcactccagggatgtctgctagcctttcatactttgacacctacaggtgtagtcggctgcctgcaaatctgatccaagcacagagagacttgtttggggcacacacctatgagcgcattgaccgtccaggttcgttccacacagagtggactaagctggcgagaaagactaatggtgcggccatttgaggacttgaatggtatcagtaactctgtgtggtgtctctttgtgggttctctttgaattcactactgttgtctttatgattctaggtctgaattctgtactttgaataatgaagtgtcatgtgcggtatgcatggaaggaacattcatgtagcttgtgcttttatatggtctaggtgcacccattcagttttctcataaatttggaatgcaatggttttaccctcttatcaaatccctgtaattttgatctggcatgtgtcattatagctagtaagacacgtgatgtttggcc

SEQ ID NO: 21306 - DNA, 1564 bp, Oryza sativa
  ref <308>: DATABASE ACCESSION NUMBER: AK071593
  ref <309>: DATABASE ENTRY DATE: 2001-12-06
ggttcgtttcctcgcattctccacgcgaataggagcagaatttgccaccgcaatcttcttctccttcttcttcttctcacctttttctgttcttgaatcccagtttcttgctcctctgaatcttcgatctttgattccttccttctcctccaatcctttgcttcttggactaagattatcccgtccaatcttttttttcttcttttcttcgcttcttgaaactatctctcgcgtcgatcgattcctcctccctcattccctgcctcgcgtggtcgagagctaagaaaacaaaattctcctcttttttttttctactttctcgccgatctttttttccttccagggcgatttgattgaattccatccgagatcaggaagaggaatgcagccggggcacggcggcgcgctgtaccacttcggcaccagcggcgccgccgtcgccgccgccactgccgtcacgcacccgctcgatgttatcaaagttaggctccaaatgcagcttgctgggcaaagaggaaacttagttggaatggggacaatatttacacaaatggtacaagtggaagggcctcgatcactctacctgggactggcaccagcattgactagatctgtcatctacggtggccttcgattagggttatatgagccctgcaaatatgtctgcaattatgcatttggatcaacaaacttcgcttttaagtttgcatctggagtaattgcgggcgccctagcaactgcgttgacaaatccaacagaggttttgaaggtgagatcgcaaatgagtccaagcagaaccagtacaatcggggtgcttaagaaaattgtagcagaggaaggggtcaaagcactttggaaaggagttggcccagcaatggcaagggcgggctgcctcacggcatcacagatggctacttatgatgaggctaagcaggcattgctgaagtggacgccacttgaagaaggtcgagttgcgtagcgggaacagctagtactcttgtgactgcacctatagacatgatcaaaacaaggttaatgttgcagcgtgagtgcaaaggtgccagagtatacaggaatggcttccattgtggttatcaggttgtggtgacagagggtgtaacgtcgctttataaaggtgggtttgccacctttgcaagattaggtcctcagacagcaatcaccttcgttgtgtgtgagaagcttcgtgaactcgcaggaatgactgctatttagtgctagtactccatgactaggaagatgcagaccaatagatgtttagtcggagggcattttttttcccctttaattcaaggcattattttccgcattcattatcagaaaaattcatcgatggggattccatctgaacttttaactcctctcagaatttttgttcttgcaattcaatgatgtaattctatttgttacaaaagtttagttacacactttcttgtcaaataacaattatttgacaaacaaggtatatggaagaaagcagacatgatagtttcagttagtttaatacatgaaattgttctgaataaatcttccaaaactcttgtat

SEQ ID NO: 21307 - DNA, 1713 bp, Oryza sativa
  ref <308>: DATABASE ACCESSION NUMBER: AK071594
  ref <309>: DATABASE ENTRY DATE: 2001-12-06
ggtaacgcactaacgtaacgacggtcgatggccatggaactgtccttcaccgtgcaccgccgcgaggcggtactcgtcggcccatcggtttcgacaccgtgcgaaaccaagcgcctctccgatatcgacgaccaagagtccctgcgctaccacgttcccggcctcctcgtataccgtggtggtcagcctccggcgccatgtgtccgcgacaatgacccgtcgggcatcatccgcgcggcgctgtcgcgggcgctggtgcactactacccgctcgccggcaggctgagagaggtggaaggacggaagctggtgatcgactgcagcggcgagggggtggtgttcgtggaggcggacgcggacgtccggctggaagagatggaggccgccgccgctggtggtcacgggctcaggccgtcattcccctgcgtggatcagctcgtccccgacgtgcgatcatcaggccgaggaggcagcgtgctcagctgcccgctggtgggaatccaggtgacacgcctcctctgtggtggcttcatcgtggggaccgccgtcaaccacagcgtgtgcgatgctatgggtatcgtccagttcctcaacgccgtcgccgacatcgccggtggcctccctgcgccggccgtccacgcgacatggtcgcgtgagctgctcgatgcacgcagccctccggcgccggcgttcccacatcgcgagtacgacatgatcgacatcctccctggaggcggcagggaggccgacaacatcgttcgatccttcctgttcagctccaccgacatcgccgcgcttaaggaggaagcactactgccacaccccgagcaccgcctccgcggcggcagcagcacggcgacgagcttcgaggtcctcgcggcgttcctctggcgcgctcgcactgcggcgctggaggtcccggcggacgaggaggtgcgcctcgtcgccgtcgttggcttcagcaggatcgccgcgctgggcctaccatccggctactacggcaacacatgcgcgtaccccacggtggtgatgaccgccggggagctgctccgcggttgcacgctgggagacgtggtgaggctggtgcaggaggcgaaggcggccgtcaccgccgagtacgtgcgatccacggccgaatgtctggttctgcggcggcgcccgcgtttagccaggaccaacctcttcgtcgttaccgacgtccgacgcgtggggttcgaccgcgtggattttgggtggggcgacccggtgtacggcggcccagctcgggcgcttcccacggtgagcttgctggtcaacgtcaagggcagcagcaatgtcgtgggtgccgttgtttcattgccatcgctcgtcatggggaggttctcggctgagctggagagctttctcaacacttaggtcatatatactcaatgaccccactagctacgtactgcacacctgcatgctaccacacaataattcatctgtacgttagggacgtacgggtggtaacccaaaaatacttttaacttttactactagactattctatgcacgggaaaagcttaatgatcgaaggaaaagctcttcaattgctaatgttatgagatctgttccgctaaatattttttaagtagggttttagttggtcaggacctagcaacttaacatgaattatgtgtttctattgtacatattcagttaccaaaggtgattccatttcatcgtcgttcc

SEQ ID NO: 21308 - DNA, 1631 bp, Oryza sativa
  ref <308>: DATABASE ACCESSION NUMBER: AK071595
  ref <309>: DATABASE ENTRY DATE: 2001-12-06
gagtacaaaggagagagagagagagactctagtgcatatttggcaggaagagccgaagaggggaggtgaggatcagaggaggcagcctcatcgtcatgcttcagcactagtagtagtagtgccaccatttctttgccctcgatctttccccagagagagagagagagagagagagagtcttgattgggggaggagagagggagagagagaaagagagaggacagaaaatgtttgtggatcttgagtaatgccttctaataatgataatgctgttgcaagaaatggagaatcatcctgtccaatgcatggccaagaccaactatgattttcttgccaggaataactatccaatgaaacagttagttcagaggaactctgatggtgactcgtcaccaacaaagtctggggagtctcaccaagaagcatctgcagtaagtgacagcagtctcaacggacaacacacctcaccacaatcagtgtttgtcccctcagatattaacaacaatgatagttgtggggagcgggaccatggcactaagtcggtattgtctttggggaacacagaagctgcctttcctccttcaaagttcgattacaaccagccttttgcatgtgtttcttatccatatggtactgatccatattatggtggagtatcaacaggatacacttcacatgcatttgttcatcctcaaattactggtgctgcaaactctaggatgccattggctgttgatccttctgtagaagagcccatatttgtcaatgcaaagcaatacaatgcgatccttagaagaaggcaaacgcgtgcaaaattggaggcccaaaataaggcggtgaaaggtcggaagccttacctccatgaatctcgacatcatcatgctatgaagcgagcccgtggatcaggtggtcggttccttaccaaaaaggagctgctggaacagcagcagcagcagcagcagcagaagccaccaccggcatcagctcagtctccaacaggtagagccagaacgagcggcggtgccgttgtccttggcaagaacctgtgcccagagaacagcacatcctgctcgccatcgacaccgacaggctccgagatctccagcatctcatttgggggcggcatgctggctcaccaagagcacatcagcttcgcatccgctgatcgccaccccacaatgaaccagaaccaccgtgtccccgtcatgaggtgaaaacctcgggatcgcgggacacgggcggttctggtttaccctcactggcgcactccggtgtgcccgtggcaattcatccttggcttatgaagtatctacctgataatagtctgctgtcagtttatatgcaatgcaacctctgtcagataaactcttatagtttgttttattgtaagctatgactgaacgaactgtcgagcagatggctaatttgtatgttgtgggtacagaaatcctgaagcttttgatgtacctaattgccttttgcttatactcttggtgtatacccattaccaagttgccttaaaaaccctccaattatgtaatcagtcatggttttatagaaccttgccacatgtaatcaatcacctgtttttgtaaattgatctataaacgctataggctgctgtgttatct

SEQ ID NO: 21309 - DNA, 1470 bp, Oryza sativa
  ref <308>: DATABASE ACCESSION NUMBER: AK099184
  ref <309>: DATABASE ENTRY DATE: 2002-08-28
gcctcttgaccccatttcggtgcttaaccaaactcaccataatatcagttcatccacaacaatgtcggcctactgcggcaagtacaaagatgagctcataaagaatgctgcctacattggcaccccgggcaagggtatcctcgctgcggacgagtccactggcaccatcggcaagcgcttcgccagcatcaatgttgagaacgtcgaggataaccgccgtgccttccgcgagctcctcttctgcacccctggcgccctccagtacatcagcggcgtgatcctcttcgacgagaccctctaccagaagaccaaggatggcaagcccttcgtcgatgtcctcaaggaggccggtgccctccccggcatcaaggtggacaagggcaccatcgaggtcgccggcaccgacaaggagaccaccacccagggccacgatgacctcggcaagcaatgcgccaagtactacgaggccggtgcccgcttcgccaagtggcgtgccgtcctcaagatcggacccaaccagccctcccagcttgccattgatctgaacgcccagggccttgcttgctacgccatcatctgccaggagaacgggctggtgccgatcgtcgagccggagatcctcgtcgatggccctcacgacatcgatcgatgcgcgtacgtctccgaggtggtcctcgccgcgtgctacaaggcgctgaacgagcaccatgtcctcctcgagggcaccctcctgaagcccaacatggtcaccccgggttccgacgccaagaaggtggcgccggaggtcatcgcggagtacaccgtccgcaccctccagaggaccgtccctcctgctgtgccggccatcgtcttcctctccggtggacagagcgaggaggaggcgacgctgaacctgaacgccatgaacaagctcagcgccaagaagccgtggtcgctgtccttctcctttggccgtgccctgcagcagagcacgctcaaggcctgggctggcaagacggagaacgtagagaaggccagggcggccttcctcgtcaggtgcaaggccaactccgaggctaccctgggtacttacaagggtgatgctgtcctcggcgagggcgctgctgaaagcctgcacgtcaaggactacaagtactgatctgcatcaggcgctggcctgctatggcttggctacctgatcgatttcccattctggggccgttacataatgcggttttgatatctagaggctctaacaggattcacaatttcggatcggaatttcagaatttttccctttccgatagatcgaaccctggagcacaatatatctgtggttatctaaaagccttgtcttaataatccagaacctttttttttcttgtaaaatatttgctgatgaacatcagctggcccggagtttttatttttatcaatcactttgtaactgtctgatttgcccggtgctgtgtgattttgttgaatgaaatt

SEQ ID NO: 21310 - DNA, 898 bp, Oryza sativa
  ref <308>: DATABASE ACCESSION NUMBER: AK071596
  ref <309>: DATABASE ENTRY DATE: 2001-12-06
gagtccattcctcccctccaccgccgcccctcccctactctcccagtgggccgccttcaccatcccctctccggcgagtcaacggcggcagcatcgcctccaccctcctctcctgaaccatcgtccaccctcccactcccactcccactcccgagcacagtgccaccaccgcctcctcttccttctccacctcactctcatgtccccattactgccactgccgccaccctatcgatctccttccttcatcctttgatttgttcggtgcaagctcaggatagccagatccggttcttttgagctcgggacgtccagatccggcgcccttgagctcggggccactggatgcagctcctagcgcaacggacaagcatggtgggagtacaagggagaccgtcccggccagatccaatgctggcggcggcagcatgctcgagtcctcgggcctgagtgtggggttctgaacgcgttcgcacgccacggcagctgccatggccgccctccctaccgggctccaagtctccaagaggagaatccgtgcgctaccgacgcgttggaccagtgcgctccacgctcgtcttgggcacgccatccagctccttcgtggccacgagagtatgctagctatagcatcagtgtgcgccaatgtcctatattatgtgatttgcattaatttgtagccacattttctgttcctttgcagctgagttacttttatcaaatatccattctcacgagctgtttgttgtagctttctgtatatcaccatagtactttgtagttattcatcaggaattctgtggcatgtttgattagttacagaggacgagatggtcctttataacagttggcggcatggtgctttgggattataaagatgcactatataacttgtgcc

SEQ ID NO: 21311 - DNA, 4804 bp, Oryza sativa
  ref <308>: DATABASE ACCESSION NUMBER: AK071597
  ref <309>: DATABASE ENTRY DATE: 2001-12-06
gacgcgcgcattcagttttcatttcagttcgaaataaacaccgaaagttgcccaaatactctcccaagttattttgttcttgttctctgcattctctgaattctctgtctccctgaaagtttcttcagtctgctgtgccggatagctacaggacgcccacaaggtgttcgattggtgttcttcgccaacaagtggtatcagagcactcaggttgagggctgatctgacaccatggcgttggttccggcgggagccgcagcggatccggcgagggggagctcagggagtgcgttctcctacccacaactcacggcgacgaattacaccagctggtgcattcgcgttcaggcaatgatggaggaccagggcgtgtgggacgccatcgagccggcggccggggtggccgtcgacccaagaagggacaagaagtcgaagtcccatctgctgcagtccctcccggaggacttgctgatgcaggtggcaaagaagagatcggcaaaggaagtgtgggattgcttgaagacaaggttcgtgggcgcggaccgcgttcgcgaagcgcgcctgcagacgttgaagggtgaatttggtgccatggtgatggagccgggggaaactctggatcagtacgcgggccgcatcaccgcgatgagcgtgcgtcactcggtgttgggctcgacactgagtgattccgcgatagtgaagaagctgttcgacacggtgccagagaaattcatcagcctcgtcgcaggtattgagcagttttatgagattgataatatgccatttgaggaggcggtgggtcgtctcaaggcctacgaagaacgagttcgcaagaagaaggcggccgctggtggtgtcaccgccgacggtcaagtacttctcactcaggcggagtgggaggcgcgtttcaggaaggacggcagcgagtcgtcttcgccgcagaaaaacaaacctcccagcgacaggggaaaccgtgcccagggcggacgcggtcgcggcagagggcacggtggaggtggtggacgcggcagcgcgccgcggaacagtggcgctggtggctctggcggcggtggccgtgacaagagccacatcaagtgctacaactgcgaagaattcggccactactccacccagtgccctcatcccaagaagaagaaggtggaggcccatctcgcgcaaaccgacgacgcaaaccctgcattgttactggcggtgaccgaagacgagccggcgagcgggctggtcgtacacgaggagcgtgtgtggccgcagctgctgttggctgacagcggagcagccaccggggacatctggttcctggacaatggggcaagcaaccacatgacgggtgatcgtgctaagttcagagatctagacgtatcaatcaccgggagcgtcaagttcggggacgcctcaactgtgaaaattcaggggaaagggtctatcctgttctcctgcaagaatggggatcaatggctgctgcaggatgttttttatatccctagtctgtgttgcaacatggtgagcttgggccagctcacagaaacggggcacagagtggtgatggatgaagatgtgctcgaggtgttcgacaaaagtcccctgcggctggttatgcgggtgaggcgcacccctaatcggctgtaccggatcgagctgaagctagccactccggtgtgcctgctgacaaggatggatgagccagcatggctctggcatgcacggcttgggcatgtcaatttccaggcgatgaagctgttggctgacaagggcatggctggtggcatcccggcgatcacacatccaaaccagctctgtcaggcatgtctggttgcaaagcagataaggcagccgtttcccgcaacggcgaacttcagggcggaggagccgctcgagttgctccacattgatttatgtggaccgatcaccccgacaactatggccggtaatcgttactttatgctaattgttgatgatttctcacggtggatgtggatgttcgtgatcaaaacgaaggaccaggcactagaggctttcaccaagttcaagccgctggccgagaacacggccgggcggcgcatcaagacgctgagatcggatcgcggtggcgaattcctgtcgggcgaattcgcgcagttgtgcgagcaggcgggcatccagcggcatctgacggcgccatactcaccccagcaaaacggggtggtggaacgccgaaatcgttcggtaatggcgatggcacgatctctgatgaaagggatgtcagtgccgggcaggttttggggggaggcggtgcgccatgcggtgtatctcctcaaccggctaccgacgaaggcgatgggcgatcggaccccgttcgaggcatggacggggcgcaagccgcagctgggacacctgcgggtgtttgggtgcatagcacacgccaagatcacgacgcccaaccagaagaaacttgatgaccggagcgcgccgtatgtgtatctcggcgtggaagaaggcagcaaggcgcaccgcctgttcgacccgcgttgtgggcgtatccatgtaagtcgtgatgtcatttttgaagaaaatgtaccttggcaatggagtgtagtcgcaggggagcaaaactctaccgagttcacggtggaggaggatggagttgatgcaccgccggcaggagcgccggcctacccagtaccgcggtaccgggcgccatccccggcagtcccgcaatcgcctccggcaagcccggtaggggcgtcatcgtcattgccgacttcgccccagtcatcaccgagctctacaccgccttcaacacctgctaccggctctgccgggccggtggcgtcaccaggttccggcggcgaccttagaagcgatgagggtcccgtccggttcaggagtcttgaagatatcatgcgggaggcaccccgcgtggacctggtggaggatgaacacgatggggacgcgctgcttgcagagatggaggagccatcgagctaccgcgaggcagctggccagccggcatgggagaacgccatggcacaggagctgcaggcgattgagaagaattcaacatgggctctcactgcattgccggcaggacacaaacccattggcctcaagtgggtgtacaagctgaaaaagaacactgccggcgaagtaatcaagcacaaggctcgtttggttgcaaagggctatgttcagcgtcaaggggtggattttgaagaggtgttcgcgccagtggcgcggcttgacacagttcgtgtcatcctggctatcgcagctgatcggcggtgggaagtgcaccacctcgacgtcaaatcggcgttcttgaatggcgatcttgaagaagaagtgtacgtagcccagccagagggttttgtgaaacgaggagaagaacacttggtgctcaggctgagcaaggcgctctatggattgcgccaggccccgcgggcgtggaacacgcgtctcgacaagtgcttgaaagaactcggttttgcacggtgcacgcaggagcaggccgtgtatactagaggaaaggggcaagctggtgtaatcgttggtgtgtatgttgatgacttgattgtcacaggagaaaatccacatgagatagccatgttcaagcagcagatgatgggggaatttgagatgagtgatctcggtcttctctcttactatctggggatagaagtaattcagggggagaatgggattgctatcaagcaagctgcgtatgcgaagaagattctgtctcagtttggtatgcagggatgtaatcccacctcaatccccatggagccacggtcgctgctgcacaaggatgctgatggaaatccaattgatgcgaccgagtaccggcgtgtcatcgggtgcctgcgatacttgttacacaccaggccggatctgtcctacgccgttggcgtggcgagcaggttcatggagcggccgacaacgatgcatctcaaggcggtcaagatgatactcagatatctaaaggggacgctggactctggtctggtgtttgcaagcggcagtggctcgttggacatcacgggtttcactgacagtgacttggcaggtgacatggatgaccgtcggagcaccggcggcatggcgttctatgtgaacagcagcttggtgtcttggtgttctcaaaagcagaagacagtggcgctctcgtcttgcgaggcagagttcatggcggccactgcagcagcatgtcacgcgctctggcttagggcgttgctgagcgagatgatgggtactgaagcaaagcgggtgaaactttttgttgacaacaagtcggcgatcgccttgatgaagaatcctgtgttccacgggaggagcaagcatattgatacccgctaccatttcattcgtgaatgtgttgagagtgggcagattctgattgagttcgttcgttctgaggagcagcgagcagatgcaatgacaaagggactgccggcggcgaagctggcgactgcacggcacctgttgggtgtgcgtgatctcaggccacgccaagactaagggggagtatgttgcagttattcctggtgtggcccgagctgatccggacgacgcgggaatgcaacggtgtgtaacggtgtggcgagatgcccgggcaaaggagatcggtggcgactagttcttgcagcgcaggaagcgcgatgaagcagagtgcatgacggggagtaacctcgtcgtttccacatttgtaggatcaaagttgttagcctataaatagttggtggtaacagaatttgtacgcgcgcattcagttttcatttcagttcgaaataaacaccgaaagttgccc

SEQ ID NO: 21312 - DNA, 816 bp, Oryza sativa
  ref <308>: DATABASE ACCESSION NUMBER: AK071598
  ref <309>: DATABASE ENTRY DATE: 2001-12-06
gacacgtttcagctgtctttcagtgttcacgtaggttgtagagagcacaacaacgtacgtacacagcagcaaagactgagactagctagcttagctgacatggctccaaggtgcgcgacgctggcggtggtggtggtgctggtggcggccgtggtggcgccgccgacggcggtgcgcgcggctatctcgtgctcggcggtgtacaacacgctgatgccgtgcctgccgtacgtgcaggcggggggcacggtgcccagggcgtgctgcggcggcattcagagcctgctcgccgccgccaacaacacccccgatcgccgcaccatctgcggctgcctcaagaacgtcgccaacggcgcctccgggggcccctacatcacccgcgccgccgcgctcccctccaagtgcaacgtctccctcccttacaagatcagcaccagcgtcaactgcaacgcgataaactagggcggccggcctgatgcgtacgtgtgtgcccgcgcctcccgtacgagaggagaataaaatgtcattagtaccatcaaattaagctagctagttaagctttacgaaaatcgatccctttcttcctctgtggtgtttagcagtttagggatcgtatgtctccacagttcctactatagtgtcgcttgggcgatggtggagctatattgtgcactttataaggtggtgttattatgtaacgcctgtgctagctttggtcctgatgttctccatgtgaactgtgtcaaccgtccattgttctgcaaatctgcagtatgtactgtgtgtgatagtatcaagctgaacttctgaacatgc

SEQ ID NO: 21313 - DNA, 1906 bp, Oryza sativa
  ref <308>: DATABASE ACCESSION NUMBER: AK071599
  ref <309>: DATABASE ENTRY DATE: 2001-12-06
gggttcataccaacacatctccattgctgcttaagtttcttggaccaaacgtgcaccccaagtgttcgacgatatggagctcaccatggcgtcgacgatgtcgctcgcgctgctcgtgctctccgcggcgtacgtgttggtcgcgttgaggaggagccggtcgtcgtcgtcaaagccacggcggctgccgccgtcgccgccggggtggccggtgatcgggcacctccacctcatgtccggcatgccgcaccacgcgctggccgagctggcgcgcaccatgcgcgcgccgctgttccggatgcggctggggagcgtgccggcggtggtgatctccaagccggacctcgcccgcgccgcgctcaccaccaacgacgccgcgctggcgtcgcggccgcacctgctctccggccagttcctgtcgttcggctgctccgacgtgacgttcgcgccggcggggccgtaccaccggatggcgcgccgcgtggtggtgtcggagctcctgtcggcgcgtcgcgtcgccacgtacggcgccgtcagggtcaaggagctccgccgcctgctcgcgcacctcaccaagaacacctcgccggcgaagcccgtcgacctcagcgagtgcttcctcaacctcgccaacgacgtgctctgccgcgtcgcgttcggccgccggttcccgcacggcgagggcgacaagctcggcgcggtgctcgccgaggcgcaggacctcttcgccgggttcaccatcggcgacttcttccccgagctcgagcccgtcgccagcaccgtcaccggactccgccgccgcctcaagaagtgcctcgccgacctccgcgaggcctgcgacgtgatcgtggacgaacacatcagcggcaaccgccagcgcatccccggcgaccgcgacgaggacttcgtcgacgtcctcctccgcgtccagaaatcccccgacctcgaggtccccctaaccgacgacaatctcaaggccctcgtcctggacatgttcgtcgccggcacggacaccacgttcgcgacgctggagtgggtgatgacggagctagtccgccacccacggatcctcaagaaggcgcaggaggaggtccggcgagtcgtcggcgacagcggccgcgtcgaggagtcccacctcggcgagctccactacatgcgcgccatcatcaaggagacgttccggctgcacccggcggtgccgttgctagtgccgcgcgagtccgtcgcgccgtgcacgctgggcggctacgacatcccggcgaggacgcgggtgttcatcaacacgttcgccatggggcgcgacccggagatctgggacaacccgctggagtactcgccggagaggttcgagagcgccggcggcggcggcgagatcgacctcaaggacccggactacaagctgctgccgttcggcggcgggcggcgagggtgccccggctacacgttcgcgctcgccaccgtgcaggtgtcgctcgccagcttgctctaccacttcgagtgggcgctgcccgccggcgtgcgcgccgaggacgtcaacctcgacgagacgttcggcctcgccacgaggaagaaggagccgctcttcgtcgccgtcaggaagagcgacgcgtacgagtttaagggagaggagcttagtgaggtttaagttaaattaagtaatgattagcgatagatagatttttattatttttattatgttttgggataataataagggttaaagttttgtgcttgctaagtaacctggaggctggagctggtaatattgtgactaagcagagaagcaagcctgtgtgatttcgatgtaaaagtacaggatatggtgcctaatgaataaaagaagtcaataagtggcgtatttctcttgtaacttgtaagctatatcgaattttaaactttagagatt

SEQ ID NO: 21314 - DNA, 627 bp, Oryza sativa
  ref <308>: DATABASE ACCESSION NUMBER: AK071600
  ref <309>: DATABASE ENTRY DATE: 2001-12-06
gaccgccttcctctcctcgtcgtcctcgacaccgccgcggcggcggcggccgctcgtgttgctcctcgctatgtctgatttagttcgtctttctagatgttgttattgctcatgtaggtagtattatttctcgtttgtttcaactttcaagggctgtacatgtggtgtttgatctttctcgatgaagagagtacaagcagacgggcggtctgaactgatgccatgttgatatgtctgcagtttccatgccttccatctggattggcatccgagggaaaccatcacccctattcggtcttcttatttcttcttccttttatacgcaaattgctttctcccttgagaataggtgctctgatgaggatgctttattatttctatgtctggacatctgagatcaatgtctatgattgtattatgcatcattctgagctctcaacaacttgttttttttgttctatttttctctcttcatatcatactggcgcttagcttactttctcttcagattggttccaaatcactggagacaaagcgggtgcccatatctacacggttaacttaccaaccctttgcagcagtttgcattgctctggtgtcaaatggtttaatcgaaatgtttttctt

SEQ ID NO: 21315 - DNA, 799 bp, Oryza sativa
  ref <308>: DATABASE ACCESSION NUMBER: AK071601
  ref <309>: DATABASE ENTRY DATE: 2001-12-06
gaattcctacctcacacttctgcaacaagctttagctccagccaccggaacgagagatcgatacagctcgatcagctagccgcattcgccctcgccgccgccgacgatgtcgagccggaggtcgtcgcgctcctccgtgtcggaggaggagatcaacgagctcatctccaagctccagtccctcctccccagctcccgccgccgcggcgccaaccaggcgtcgacgacgaagctgctgaaggagacgtgcagctacatcaagagcctgcaccgggaggtggacgacctcagcgacaggctctccgacctcatggccggcatggatcacaacagcccaggcgccgagatcatccgcagcctcctccgctagctcatctcttctcatctgttcttcctcctcgatgatcgatcgatctcgtgttattctacgtacatgaaggatgatatgaatgcagctcgtgccctgtagctacgtataaatatacacatatgtatacatgcatacagtacatgatatgcatatgcctagatctgatctagctcagtagaaaatctactcatctcggtgtactactgatgatgatgatgattaaggcatgcagctggcttgatgatcggtactactactactacttcacttcagttcagtaggggcattagctagctagctagggccggctgcctaattaagtaattaagtaatttattatttgtagtagccagcttgatctcatctctcctcatgagccatatgacatgtggttaagttaattaatccttgatgcagtagagtcgtccc

SEQ ID NO: 21316 - DNA, 1747 bp, Oryza sativa
  ref <308>: DATABASE ACCESSION NUMBER: AK071602
  ref <309>: DATABASE ENTRY DATE: 2001-12-06
gaaggatctcaatcacagagaaggcacatcatcaaacaaatcaggaaaggaaggaagaaaggagaggaaaggagggagtgaagaacaaatcttgattcgtcctcactgcgcactgcccccccgtccgtgtggttccagctgatcaccagcagcggccggcgtcttctcgtctcgatccctcctgcctctttggccgcggctcgatttgggcggtcaagatgaacaggatgatgttcatggcgtgctgctacaacgatccggacatgctcatcgatccggacacggtctaccccatccgccccgagtgccgcgaagacgccgccaagacgcgattcaagcccaggcctggcctcactctaagtccaaggagatggaagctgcttcacaatgaagaaggtgtcctagacatagctggaatgatcaaaagagtgcagcgtgggggtacccacccaaatatcaaaggagaagtttgggagtttttgctgggttgttatgaccctaaaagcaatactgaacaaaagagccaattaagacaacagcgaaggttagaatatgagaaactgaaaacaaagtgccgagaaatggacacggcagtcggtagcggaagggtaattactatgcctgtcataacagaagatggccagcctatacaggatcctaactcagttgatgcagaacaacaagctagtgacacacccctaccaaaggaagtaattcaatggaagctaactctgcaccagattggtcttgatgttaatcgtacagatcgtcaactagtctattatgagagccaagagaacttggccaggttgtgggacattcttgcagtttattcatgggttgacaaggacatcggttattgtcaaggaatgagtgatctttgctcaccaatgtcgatcctcttggaacacgaagcggatgcgttttggtgctttgagcgacttatgcgcagggtgcgaggaaatttcgtgagtagttcaacctccattggagttcgatctcaactgaccatattgtcatccgtaatgaaagccgttgatccgaagctacatgagcatttagaaaatcttgatggaggggaatacttatttgccttccgtatgctgatggttcttttccgaagggagttctcttttgtagacacaatgtacctttgggagctcatgtggtctatggagtacaatccaggtctcttttctatgttggagagtgataacagtacatctcaagcaaacacaaaagatgaaaatgccttaaagcagtgtggaaaattcgaacagaaaaacttacaggcggctaaaaaggaagagcagatacctctatctgtgttcattgtggctagtgtcatagaggctagaaacaagcagatactgactgatgcaaaaggtctagacgatgtcgtgaagatattaaacgatatcactggaagtctggatgcaaagaaggcatgcagaggggcactgaagattcatgagagatacctaaccacagtaaaagcatgatagtagcatttacagatccttattaatacatcttaagtgacgatattcgattgggctttttgtgaactggagaagcagctacatcgcaatttttccccatttttgatacgtgtgtgtattatacaattctttgattttctttgtaatactacaaaagaaaggaacgccaatcctgtaaaggtacatcacgaaatgtttggtatcggtggaattatgctgcaataacatcgtcatgattcttcttt

SEQ ID NO: 21317 - DNA, 910 bp, Oryza sativa
  ref <308>: DATABASE ACCESSION NUMBER: AK071603
  ref <309>: DATABASE ENTRY DATE: 2001-12-06
gaaaagcgcaagagactcgcaacgcaggtcagagcggaaggggagaagaaggaggtgctcctctcgagtttggagaaaatttcccccgcagaggcctccgcttgctcgcggagatggcgatgaccgtcgaaggtgagggtcgctctgagtttccctcccccatctaagatttgctcaattgctagtctggttctgttcccgatttcggcgtcgtttgggctctccgattcgagtgtcggggtggcgggggattgggcggctagggttccggttcgagtttggtgttacgattggctgtgctcgctggacttgcatttatgttctcaacaagtattcttttgcaaatactggcttgtgctctgtacaataattggtggcctatgttagcagctcttatgtatgtccttgtaccgatgccatgcctattcttcggtggtggatctacccagttctttactagcagagatggtggagggtggttcaatgctgcaaaattcctgactggtgcatctgccatgggaagcattgcaatcccagcaattctgaggcacgctggcctaattgagactggagccatgttcatcgagttcacgtccttcttcatccttgtatgcacagtgatgtgcttccatagagctacgctggatgaagattggtaaaaggctcgaggcacatggacacaagaaggtaaatctgtttcatggtttgcttctcagcacgtacaagagaaattccttagtggacactaacatggacatgtgtacaaagaagcaaatatttgagttggcgtgactgtctgtataaatgctcaaagatttgctgatctagcgacaatgccaatgttctatgtgcacttttcatgtgaatactcctcacatgatctatgggcaacctgtcagccatccgtgtg

SEQ ID NO: 21318 - DNA, 1026 bp, Oryza sativa
  ref <308>: DATABASE ACCESSION NUMBER: AK071604
  ref <309>: DATABASE ENTRY DATE: 2001-12-06
ggttcgatccaattcccatccttcttcctctctgatccggagcggctgcagcgtagagatggggaggcgtcacggcggcggcggcggcggcggcggcggtcgtggccgtggaggccgaggccgcggaggaggcgaggaggatgacttgcatctgcacaaggccgcgcggtggggagatttggcggcggcggagtctctgtgcgaggccaaccctctcgccctcaattccagagatcgcctctctcgcaccccactccatttggcagcatgggctggacatgttgagcttgtgaagtgcctttgcaagcacaaagctgatgttggagctgcagctatggatgacaccgctgcgatccattttgcctctcagaaaggccatgtagaggttgtccgtgagctgctggcatctggtgcctctgtgaaagcaaagaacaggaaaggcttcactgcgttgcactttgcttcgcagaactcccacctggagcttgtgaagtatttagtcaagaaaggtgcagacatcgccgcaaagacaaaagggggtcagacggctctacatgttgcagagaaggatgatgttcgtgatttcctgaaagaatgtgagcagtcattgaagaagggaggtgagcttccatcggagaagaaggatgattctgtgtcaacgattgctgagaagcctgacgatgacaagtcctcgggtgaggctacaaaagacgaagatgaagcggggtttggcgagaagaggaaaagcgatggcattgctgctgcactgaggtcaccggaactgaaaaaagccaaagtttcacttgggcatctaataagtgcaaatgacatggaggaagaggaagaagctgactagactaatgtaggacgcgagaatgcaatttgatggcaccctctacgttttgttatatatcctttgttctcgtatggcaagctgggatgtggacagaactgtatgagcgtgatactaactgtgtttcttactgaactagcagtaagtataactgattaccagcttgagtactc

SEQ ID NO: 21319 - DNA, 1437 bp, Oryza sativa
  ref <308>: DATABASE ACCESSION NUMBER: AK071605
  ref <309>: DATABASE ENTRY DATE: 2001-12-06
cgatgttcgccatttgtatattaaggcttgtaatggagcaacagttgctggcaataaagctttcgagaaaatgattaccgaaaatattgtcaaactgaaggagctgcgcactctgatcattgacggaggggagacaggaattgaggcaaaggtgttcgatgatatcttcgacagcttgaagtctctacgagtactgattgtagagacacagagtagaagaatattgcaaatcccagaatctattggttacttaaagtatctacgatatctttctatcgagtatagatgccgtatattttttccgcgcacggttacaaagctttaccacttgcgggtgcttgattttggtgaatatggaatgttggaacgtagttgctcccctgaaaatatgagtaaccttgtgaacttgcagagagtggtaggccgttcacttggggattttccaaacataggcaggctgacattgctccgaacattaccaaccttcagggtgaaaagggacctcctgggttacgacattaagcagctgaagcacctaaacaagctccagggaaaattggtgatcagtggtctccaacatgttcgcagcgaggaggaagccgttgaagcgaagttagctgagaaggagcacctcaaacaactgacactggcctgggacgatgataacacaagcagtaaccacgatccagcagtactcgagtgtctatgcccgccaatggggcttcaagtcctggaaatcataggctaccgtggttcataccctggctggatggtgggtaagcatagtggtcaactgtaccttcagaaacttgagctccgccaatgcagcccactgggacctgctcctagactttttgagtgcttcgttcatctggaatcgctctgtctctctcacttaagctggcacaccttgccagataacatggagcaagtcaggactctcaaagttctgatgatctcccactgcaagaatatgaaggtgctgccaacactgccgcagtctctttcgcgttttaaactctcaaactgcgggcacgagttcacaaggtcttgcaaacagaatggagaaaattgggaaaagatccagcacattctcgaaaaaataatcctatgatatccatagctctcaagacgaggcatcatggcgcaatggcgttgcatcagcagggctttaggcatcaatgggaagacgatgaagggaatgttgagcaaggtggcagttcagaccttaagccaaactgcaggctgggccggatgtatgtgtgttatgattccttggtgtattttcattctgtcctttttttatcaaaaactaggaaggtagcccgcgccttgcgcggccatgtattttagattgcgtttgaaaaacttatataggtggaatatcaaccggatgacacctgccatatttttcaaaagtactacttcgaaaaactt

SEQ ID NO: 21320 - DNA, 1470 bp, Oryza sativa
  ref <308>: DATABASE ACCESSION NUMBER: AK071606
  ref <309>: DATABASE ENTRY DATE: 2001-12-06
ggctcgatcaattcatctcatcgtccatggcgcccaaggtggcggtcacggaggcgacggggcggcaggcggcgtcgttcgtgctcggctgcgtggccacgctcaccgtcatgctgctcttccagtaccaggcgccgccggactacggccgcgccgccaggtcgccggtgcagttctccacctccagagaccagctgctgctgcactgcggcggcaatggaacggcgccgccgccgccggtgatcgcacgtggcggcgaggaggctaacatcaccggcaagcctccgacgactgctactgctgtcgccgaggagcagccgccaaccaagcctcctgcgacctttactgcatcttcaccaactcatcatattccagcaaccagtacagatcttgaagaagagggcggcgagttccgggggttggcggcggcggtggcgcgggcggcgacggatgaccggacggtgatcatcacgtgcgtgaaccacgcgttcgcggcgcccgactcgctcctggacatcttcctccagggcttccgcgtcggcgacggcacgccggagctcctccgccacgtcctcgtcgtcgccatggatcccaccgcgctcacccggtgccgcgccgtccacccccactgctacctctacaccatgcccggcctcgacgtcgacttcacctccgagaagttcttcgcctccaaggactacctcgagctcgtctggagcaagctcaagctccagcgccgaattctccagctcggctacaacttcctcttcacggacgttgacattgtgtggctgaggaatccgttcaagcacgtggcggtgtacgcggacatggcgatctcgagcgacgtgttcttcggtgacccggacaacatcgacaacttcccaaacacgggcttcttctacgtgaagccgagcgcgaggacgatcgccatgaccaaggagtggcacgaggcgaggagctcgcacccggggctcaacgagcagccggtgttcaaccacatcaagaagaagctggtgaagaagctgaagctcaaggttcagtacctggacacggcctacatcggcggattctgcagctacggcaaggatctgagcaagatctgcaccatgcacgccaactgctgcatcggcctccaatccaagatcagtgatctcaagggtgttcttgctgactggaagaactacaccaggttgccaccctgggcaaagcccaatgccaggtggactgtgcctggtaaatgcatccattgattttgattgtcgatcgggcagtatctggtgttgtaggctacgtacagtcaggaagatagctttatttgcacatgaaagggcgaattttgttttttttggtttgttgtagattgatgggtcgatttcaagttatattactgtatacctgacggcagacaagtatacgcatgatgggcaaactatatgatatgatatgatatgatagtactttagatgt

SEQ ID NO: 21321 - DNA, 1203 bp, Oryza sativa
  ref <308>: DATABASE ACCESSION NUMBER: AK071607
  ref <309>: DATABASE ENTRY DATE: 2001-12-06
ggttaaagatgatgaggctgggaagggcgccctgctgctactgcttcaccgagccgcaccccgccggcggcgtcgcggccgccgtcaggctgcgactgctgccgcctgcccgcgccgcgaatacctcctcagagccggcggcgcggctgagggcggttctcgagcaggtggacgaggagctgcggaaggggaacgacgaggccgcgccgtccctcgtgcgcggctcgcagggggcggatggcgggctccggttctttggcgcggcgaggcaggtacctcaaagactttatacattggatgagctgaagttaaatgggatcgatacttctgctttcctatctcctgttgatctgactttgggatcaattgagagaaatctccaaattgctgcagttctaggagggctctctgtatcagctgcattcgagctttctaaactccaagttctgtttctgtttttgggtctactatctctgtggtcggtggatttggtatatttcggtggtggagtgagaaacttgattcttgatacaattggtcacaatcttagccagaagtatcgtaatagagttattcagcacgaagctggccacttcttgatagcgtatttgcttggggtccttcccaaaggatacactatcacaagtttagatacattcataaaaaagggctcactgaatgtgcaagctgggacagcttttgttgactttgagttccttcaagaggtcaattcaggcaaactatctgccacgatgttgaacaagttctcatgcattgccttggctggagtagcaacagagtatcttttgtatggatatgctgaaggaggactagctgacattgggcaactagatggattgctcaaaggtctaggtttcacccagaagaaagctgattcacaggtgagatgggctgtgctgaatactgtacctgcactgcgtcgccataaaaaggccagatcacagctcgcggaggcaatgtcctctgggaagtcagttggatcttgcatcggggtcatagaagagaatataaactctgaggatatttagttagtgactataaagatgatggaaaatatagatcacatatgtacaaactttcacaatggactgtaccttttaacttgggctttgtatttagtctgttagcaggaaatacatgtcaaaatcatggtttttattcagtttcatatattaaacgttt

SEQ ID NO: 21322 - DNA, 1576 bp, Oryza sativa
  ref <308>: DATABASE ACCESSION NUMBER: AK071608
  ref <309>: DATABASE ENTRY DATE: 2001-12-06
actgtacgctaagcttgaagggctgcccatccatcaagataaaccagatgcagtgccagctggattcttatcttctttgctcggcgctggatgtgagtgccatggatacaatattgaaatcgttgggcattctttaggaggttctgtagctgcacttcttggtatcagactgtatggacgctttccaaaattacatgtatatgcatatggagcagcaccatgtgtggactatgtgatcgcagaagcatgttcacagtttgttaccagtattgtccacaatgatgaattttctgcccggttatccatgaattcaataattagattacgtgctgctgctgtgagagctctctcaaaggatgctttgccgaattccgccaaagttggaaaactagttgctgggatcgtgaggacgaagggatacaatcgaaatgttgcagatcatcgtcagtctactggtgctcttcagatagtcaatgaggcaaagctaagaaatgatcaaatccacggaaataatctaatgcacacaattagaggtggtgtattcctccttggtaaagcgatatcttgcttggtaaatactccaaaatatcgagtgagctccacagcagcaatcaactatgagttggggagcagatctagaatgaatattcttggtgatagagggaactgcatggctgcttcctgcagtgttctggatgttcctcattttggagaacctagtaatgcatgcggaaatgggaagtcttctgaagatgatctgaatgaatgtagcagggaatacaggctacctcattcaaatgatggcacaaaactctcgattgatcctaatgatctgcgtacaataagtttgcctgaaggacaatcaccggaggtgtatctgcctggtctcgttattcatcttgttccagtaaagaatcatacctctccatttcagaagacacctgtgactcgacacaagagtcgcaagaacaagagttacaaagcatttatagccaatcgacaagattttatggaccttgttgttacacctcgtatgttccttgatcatcttccatggaggtgccactatgccatgcaaagggttatagaaactcggaaaagggcatgctaattcatgattcgtccaccagagatgatactgtgtgaagttaattttgcaactctccttaattcttgtagataagttcaggatgttaggatcatctgcttcttgcaggaggttggctgcatatacagtgttgactgtattactgtaactgtaagtagaacagttcagagctgaagggtgttgccaatgtgaaaaacatcacttggaccttagcatttgttgtactaggagtatctagctttacataggcttgctctgaggtcaaagtagagtacagcatgccactattatttatgaaacctttggtagtgagtaattatattagtctgtagcatcaaattttgctgcaatgttgttgtaactctagtgttcacacattacatgtaattgtctgaacaatcatgtaccatgtactcctacttgctgaataaagaaactagtttctgcagcgaagaaaagctgtccccc

SEQ ID NO: 21323 - DNA, 1156 bp, Oryza sativa
  ref <308>: DATABASE ACCESSION NUMBER: AK071609
  ref <309>: DATABASE ENTRY DATE: 2001-12-06
gaagcaaataattaccaatctaatctcctctctctcaactaagcctgcggcacggggcaacctcgccggagaagacgacggaccgaggctacgagctacgtagccgagggccggctacccgagggcctgacgcccttgacaacctggtatcacgttccagacgatcctcgccgcgccgcgccgtctccccaccacccgccacatcctcgccaccaccagccgccgcgccaccatcctcggactcgtcctccggcgcgtcctgcccacccggcatgggtgaccccaatgacctcaagacctccgtggaggctctcaccaccgccatgaaggagatgcaggcctcgatcgccgccaacgccaaggccattgccgccctctcctccggccgcacctcatcctcgggcgccacgacagactccggcgaaccccgcaccgtccggccgccgcgatttcagaaaatggatttcccgcgctatgatgggaagtccgatccgctcaccttcctcaattggtgtgagtcgtacttccaccaacaacggatcatggacgaagagaaggtttggatggcgtcctacaaccttgaagatggtgcacagctatggtacatgcaagtccaggcggatgagggtaaaccgtcgtggcgtcgcttccgggaactcctcgtcctacggtacgggccgccactccgttcggctcccctcttcgagttagccgactgccgccgcactaccaccgtggaggactaccaggaccacttccaagcgctcctgccccgcgccggccgcctgacgaaggcacaacgggttcagctcttcaccggcggtctgcttcctccgctcagtctcaaggtccagatgcagaatccgcagtccctcgtcaccgccatgagtttggctcggcagttcgagctgatggagcagtgcactgccaccctggccaaagcccctggccacgggatactgccgacgctgggtccgcgccaggccccgccccagccgccggcgcctagggccgcatcgccccctgtcctcatcgacggtcgcccggtgaagcggctctctcaggcggagcaggacgagcgtcgccgcctcgggctatgctttaactgttggaattaatgaatggaccttagcccactcgaagattaattctttgg

SEQ ID NO: 21324 - DNA, 2101 bp, Oryza sativa
  ref <308>: DATABASE ACCESSION NUMBER: AK071610
  ref <309>: DATABASE ENTRY DATE: 2001-12-06
gtgggcttcaggctaactaagccctaaacccgcgtgtctcctccctcctcgcgagttcgccggccgcctcgcctgcgtcgatctccagtgggcagcggcgccggcgtctgctgcttccgccgcatcctcgcccgctgccaagagcacccccggtgaatttgcgagatcagttgggagtaaggacatttcggctgctgtaaaattggttttcataagcagagcagcagatgaggctaactgttggccaagtgcatcgacatgtgcttgcattggcatcttcgcgatcatgcttcgtcctcggtgacaacctcccattgagaatgctttcattaccacgagcggttagatttcaccagaccgcttggcttggtactgaaacagtacaagataagagtgcttcactaactctagctagtcttgaagggcaaaacaaagttgaatatggtaagaaagaaaaagcaacacgcattggaggtccaaagccgtcttcaagggcttctgctcttaaggtgaaaccaaaagtttcttcatttaattccaaaccagcaaagagcaccttaccgaaatcagcagtagtgaagaagactctgaagatagatgaatctcttttctctgcaaaatcatttgaagagcttggtttgccgcctttgcttatagatcggttgaacaaggaaggtctaagtactccaactgaggtccagtctgctgctattcctatcatttcacaaaagcatgatgcagttatccagtcatatacgggctcagggaagacactcgcttaccttctccctattctttctgaaataggccccctaaagaggcctacagaacaagatggttctgataagagatcaggtgtagaggcagttattgttgctccttccagagaattaggaatgcagatagtgcgagaagtggagaagattttgggccctaatgataagaggcttgtccaacaacttgttggtggggctaatcgttcgaggcaggaagaagcattgaaaaagaacaagccacttattgttgtgggaacacctggtcgtatttctgaaatttcagcagggggcaagctacacacccatggttgccgctttcttgtactggatgaggttgaccagcttttgtctttcaattatcgtgaagatatgcatagaatacttgaacatgtaggaaggaaatctggtacttcatctagagatattcttggccctcttgcaaggcggtctgagcgccagactatcttggtttctgcaacaataccgttttcagttatacgagcagccaggagttggggtcacgatccagtccttgttagagctatgagtgttgttccacttgattcaattactgttccaagacctgtgctgtcccagacagatgccaaccccaactctccatcaaattcagtgaatcaagctgcagttaacagcttaccaccatctttggaacattactattgtatatccaaggctcaacacaaagttgacactttgaggagatgtatccatgctctggaagctcagacagttattgcatttatgaacaacaccaagccattgaaagatgttgtatttaagttggaggcccgtgggatgaaagctactgagctacatggagatcttggaaagcttgcaagatcaactgtgctgaaaaagttcaaggatggtgaattcagagttctagttacaaatgagttgtctgccagaggactggacgtgccagaatgtgatcttgtgattaatctggatcttccaacagactctacacactatgcccacagagctggccgaacgggccgtctagggcggaaaggaactgtggtcacaatatgcgaagaaactgaaacatttgttgtaagaaaaatgcgcaagcaattagctgtacccatcaagccatgcgaattcacggaaggcaagttgcttgttcataatgaggaagatgtagaataagctctgcattgtcgaaatgacatttaatgtcttgaagtgttatttgtgtatgggcatttctcatagattgtattatcttaaaatgttatcaaccgatgtttttttgctcgatacaaatattcagataaatgggaatagttgtctttcctggg

SEQ ID NO: 21325 - DNA, 1434 bp, Oryza sativa
  ref <308>: DATABASE ACCESSION NUMBER: AK071611
  ref <309>: DATABASE ENTRY DATE: 2001-12-06
gtgaaaagaacaagaagacagatagagaaggagaaaacccaccgcgcgcggcggcggcggcggcgagggtcgacgaggcgacgcattttggtgatctcgtggtgtcacggtgcgtgtgcgatgacgaggcggtgctcgcactgcagcaacaacggccacaacgcgcggacctgccccgcccgcggcggcggtggaggcggaggcggggtgaggctgttcggcgtgcggctcacgtcgccgccggaggtggcgatgaagaagagcgcgagcatgagctgcatcgcgtcgtcgctcgggagtggcggtgggtcagggggttcgtcgccggcgggaacgggaaggggaggaggaggagggggagagggcgcggccgggtacgcgtccgacgaccccacgcacgcctcctgctcgacgaatggccgcggcgagcggaagaaaggtacaccttggactgaagaagagcatagaatgtttctaatgggtctgcagaagcttggtaaaggagactggcgtgggatctctcgtaattttgttgtttccaggacaccaactcaggtggctagccatgctcaaaagtacttcattagacagacaaactcatcaagaaggaagaggaggtcaagcttgtttgacatggtcccagaaatgcccatggacgaatccccagtggtcgtagaacagcttatgctccatagtactcaagacgaagccacaagctcaaatcaattgccaatatcacatcttgtgaaacagaaggaacctgagtttgctagacacctgtcggatttgcagctaaggaagcatgaggaatctgagttcacagaaccttcactagcagcactagacttggagatgaaccatgctgcacctttcaagactaaatttgttctgacaatgccaacattctacccggcattaatacctgttccactaactctttggcctccaaatgttgctaatgtgggtgaatcaggtacaaatcatgaaatcctaaagcccactccagtgaatggaaaggaggtgatcaataaggctgatgaggttgttggcatgtccaagcttaccataggtgacggcagctctaactccatagaaccctctgctctttcccttcagcttactggaccgacaaatacaagacaatcagcttttcatgtgaacccaccaatggctggacctgacctaaataagagaaacaacagcccaattcatgcagtttgagaaagcatggaaaaggcctgctgggtcaaatcttatagattatatattacttccccaataccatagaatgttgcataaggtcctgagcatgtacttttgtagcagcttctgagttgtatcaccatattatgttctttgatatcgataatgaaaaatgttgtatgcatatacctttgataatacatcctccatcctttggagaaaatggttttc
